United States Patent Application Publication US 2014/0259212 A1 - sequence listing, part 4

SEQ ID NO: 7698 - DNA, 1293 bp, Escherichia coli CFT073
  CDS (1)..(1293): transl_table=11
atgatgaacacggaaggtaataacggtaacaaacccctcggtctatggaacgtcgtttccatcggcattggggcaatggtgggggcggggatcttcgcgctgctggggcaggctgcgttgctaatggaagcctcgacctgggtcgcctttgcttttggcggtattgtggcgatgttttccggttatgcctatgcgcgtctgggggcgagctatcccagcaatggcggtattatcgacttctttcgtcgcggattaggcaacggcgttttttcgctggcgctctcgttattgtacctgttgacgctggcggtgagtatcgccatggtcgcccgtgcttttggcgcttatgccgtgcagtttttgcatgaaggcagccaggaggagcaccttattttgctctacgcattggggatcattgcggtgatgacgcttttcaactccttaagcaaccatgcggtagggcggctggaagtgatcctcgtcggcattaaaatgatgatcctgttattgctgattattgccggtgtctggtcgctgcaaccggcgcatatttccgtttctgcgccccccagctccggggcgttcttctcctgtatcgggataaccttccttgcctatgcgggctttggcatgatggcgaacgcggcggataaagtgaaagatccggaggtcataatgccacgggcgtttctggtggcgattggcgttaccacgttgctttatatctcgctggcgctggttttgcttagcgatgtatcggcattagagttagaaaaatatgccgataccgccgtagcgcaggctgcttctccgctcctcgggcatgtggggtatgtgatcgtcgtcatcggcgctttactggcgacggcttcagccatcaacgcaaacctgttcgccgtgtttaacatcatggacaacatgggcagcgaacgcgaactgccgaagctaatgaataaacctctgtggcggcagagtacctggggcaacatcatcgtcgtggtgttgattatgctgatgacggcggcgctgaatttaggctcactcgccagcgttgccagcgccacctttttgatctgctatctggcggtgtttgtggtggcgatccgcctgcgtcatgatattcacgcctcgttgccgattcttatcgttggtacgttggttatgttgttggtgatcgttggctttatctacagtctctggtcccagggcagccgtgcgctgatatggattattggcgcactcttactcagccttattgtggcaatggtcatgaagcgcaataaaaccgtataa

SEQ ID NO: 7699 - protein, 430 aa, Escherichia coli CFT073
MMNTEGNNGNKPLGLWNVVSIGIGAMVGAGIFALLGQAALLMEASTWVAFAFGGIVAMFSGYAYARLGASYPSNGGIIDFFRRGLGNGVFSLALSLLYLLTLAVSIAMVARAFGAYAVQFLHEGSQEEHLILLYALGIIAVMTLFNSLSNHAVGRLEVILVGIKMMILLLLIIAGVWSLQPAHISVSAPPSSGAFFSCIGITFLAYAGFGMMANAADKVKDPEVIMPRAFLVAIGVTTLLYISLALVLLSDVSALELEKYADTAVAQAASPLLGHVGYVIVVIGALLATASAINANLFAVFNIMDNMGSERELPKLMNKPLWRQSTWGNIIVVVLIMLMTAALNLGSLASVASATFLICYLAVFVVAIRLRHDIHASLPILIVGTLVMLLVIVGFIYSLWSQGSRALIWIIGALLLSLIVAMVMKRNKTV

SEQ ID NO: 7700 - DNA, 1329 bp, Rhodopirellula baltica SH 1
  CDS (1)..(1329): transl_table=11
atgaacactgactcgcgaccgaacaacccttccgagcctgcgaaacttcgacgtgacgtcggcctgtttggtgcgatgatgatgggactgggatccatcgttggcacgggcgtctttgtcagcatcggaatcgcggccggaatcaccggtccgtcagtcgtgctcgcgattctcgtcgctgggttggtcgccaccttcaacggcctgagcagcgctcaattggcggcggctcaccccgtcagtggtggcacctacgaatacggctaccgctggctgacaccttcgatgggattcacggcgggctggatgtttttgtgtgccaagtctgcttccgccgccaccgccgccttgggttttgccggatacgcgttgcaacttttccaattcgatcatgacgactggatcgtgccgttggccattggtgcagtggtcgcgacaacgttgctgctgctcggcggtattcggcgatccaactggaccaacattgcgatcgttagcatgacgctgatcgcactggccagcttcgtgatcgccggtttgccgtttgcgtggcgagaaggctcgtcaaacttgacacccttttttgcgtcggattccccagcaatcgcgacgcggcaattcctggaggcctgcgcattgatgttcgtcgcctacacgggctacggccgaatcgcgacactcggcgaagaagtccacaacccacgccgaacgattccgcgagccatcattgtaatactgcttgtatcttcgctgctgtacgcaatcgttggcggcatcgcggtcgccgcggcgggaattgacgtttggagctccacctcacaacagaccgcacccttgcaacttgtcgcaaatcatctgaactcaccattggtcgccaaactagttgccatcggcgcggtgaccgcgatgctaggtgtgctcctcaacctgattctcggcctatcgagagttgtcttcgccatgggacgccgcggtgacttgccgcgtggcttggcaaccgtctcgactcaaaactcaaatccgtctggtgctgtcatcgcggtgggcatcggcgtgggaacgctcgcgctcatcggagatgtcgaaacaacgtggtcgttcagcgccttcaccgtgttggtctactacgcgctcaccaatctcgcagcaacacgcctgactgctgacgaacgcttgttctcaccaatcgtgccttggcttggcctggcttcctgcctcggcctagcgttctgggtgcaaccaaagatctggatcatcggcttgtcattgatcgctgtcggattggtctttcaacaatgcatgaaacgatctgatacatcagcaagctga

SEQ ID NO: 7701 - protein, 442 aa, Rhodopirellula baltica SH 1
MNTDSRPNNPSEPAKLRRDVGLFGAMMMGLGSIVGTGVFVSIGIAAGITGPSVVLAILVAGLVATFNGLSSAQLAAAHPVSGGTYEYGYRWLTPSMGFTAGWMFLCAKSASAATAALGFAGYALQLFQFDHDDWIVPLAIGAVVATTLLLLGGIRRSNWTNIAIVSMTLIALASFVIAGLPFAWREGSSNLTPFFASDSPAIATRQFLEACALMFVAYTGYGRIATLGEEVHNPRRTIPRAIIVILLVSSLLYAIVGGIAVAAAGIDVWSSTSQQTAPLQLVANHLNSPLVAKLVAIGAVTAMLGVLLNLILGLSRVVFAMGRRGDLPRGLATVSTQNSNPSGAVIAVGIGVGTLALIGDVETTWSFSAFTVLVYYALTNLAATRLTADERLFSPIVPWLGLASCLGLAFWVQPKIWIIGLSLIAVGLVFQQCMKRSDTSAS

SEQ ID NO: 7702 - DNA, 1641 bp, Nasonia vitripennis
  CDS (1)..(1641)
atgtcgaagtcgtcggggagcttgaagggcagcacgaagggcagcataaagggcagcatcaaggatggagaaacgaataacgggccgtacgacagccccggtgttggcggcgacgagatcaagctcgaggcgaagatgtccctgatgaacggggtcaccgtcatcgtaggatcgatcattggatcggggatcttcgtcagtccctccggtgtgctgcagtacaccggcagcgttaacgccagtctactcgtttggacggcctctggcctcttctcgatggtcggcgcctactgttacgcggagctcggctgcatgatacggaagtccggcgcggactacgcctacatcatggagacgttcggcccattcatggccttcataaggctctggatcgagagtatgatcgtgaggccctgcagccaagcgatcgtcgcgctcactttcagcacgtacgtcctaaagccatttttccccgactgcgagccgccccaagacgcagcgaggcttttagccgtctgctgcatatgtgtgctggccttcatcaactgctgggacgtcaagtgggcgacgcgtgtgcaggacatcttcacctacgccaaactcttggctttgttcgtaatcatcggtgcgggtggttatcagctggttaataagcaaacgcagcactttacgttcgacggcacgacgacggaagtcacgcagatagccctgagcttctactcgggcttgttcgcctacaacggctggaactacctcaacttcatcatagaagagctgaaggatcccgtgaggaatctaccacgagccatcgccatctcctgcacactggtaaccatcgtctacgttctgactaacgtagctttctacacgacgctcagtcctaacgaagttttgaacagcaaggctgtcgcagtcaccttcgccaatcgactattcggcccaatggcctggacgataccggtgttcgttgccctgtcgactttcggcgcggtcaatggcatcctgcttacatcatcgaggctcttctacgccggtgcgtgcgagggacagatgcctgagatcttgacgatgatacagacctcgagaatgacacccacgccggctgtgatttgcatggctctcctgtccatgctatacttgtgttcgtccgacattgtggctctcataaactacgtcgggttcgccacgtggttgagcattggagtgtcggtactctgtgtgccgtggttgagatgggctcaaccgaacttgcctagacccatcagggttaatcttgctttccccatcgtctacatcctctgcacgctctttgtcactatcgtgccaatgtactcgagtccggtggaaacaggctacggatgtctgatgattctctcttcagtacctgtctactttgccttcatcgcttggaaaaacaagcccaagttcttccagaaaagtgtcggcgccgttacccaaactttgcagaagatgatggtggtcgtcggaccaaataagacacagttctcttcgaatagaatatcgagaatatcggtcatgaaatccaatttagtattggaaacatcgagcaaagtggattttatggctgaaagagctacacacttgatgataggctttgacaatattcagtattacaattga

SEQ ID NO: 7703 - protein, 546 aa, Nasonia vitripennis
MSKSSGSLKGSTKGSIKGSIKDGETNNGPYDSPGVGGDEIKLEAKMSLMNGVTVIVGSIIGSGIFVSPSGVLQYTGSVNASLLVWTASGLFSMVGAYCYAELGCMIRKSGADYAYIMETFGPFMAFIRLWIESMIVRPCSQAIVALTFSTYVLKPFFPDCEPPQDAARLLAVCCICVLAFINCWDVKWATRVQDIFTYAKLLALFVIIGAGGYQLVNKQTQHFTFDGTTTEVTQIALSFYSGLFAYNGWNYLNFIIEELKDPVRNLPRAIAISCTLVTIVYVLTNVAFYTTLSPNEVLNSKAVAVTFANRLFGPMAWTIPVFVALSTFGAVNGILLTSSRLFYAGACEGQMPEILTMIQTSRMTPTPAVICMALLSMLYLCSSDIVALINYVGFATWLSIGVSVLCVPWLRWAQPNLPRPIRVNLAFPIVYILCTLFVTIVPMYSSPVETGYGCLMILSSVPVYFAFIAWKNKPKFFQKSVGAVTQTLQKMMVVVGPNKTQFSSNRISRISVMKSNLVLETSSKVDFMAERATHLMIGFDNIQYYN

SEQ ID NO: 7704 - DNA, 1425 bp, Anopheles gambiae str. PEST
  CDS (1)..(1425)
ctgaagcgcgaaatgggcctcatgtcggcgattaacgtgatcatcagtgtgatgatcggttccggcatcttcgtgtcaccgaccgcggccctgcgctactccggcagcgtcggcttctgtctggtcgtgtggaccgtctgcggtggcatctcgctgctcggagcgctgtgcttcgcagagctcggtacggtcgtgccacggtccggtgccgaatatgcctatctaatcgaggcattcaaaaagtcgcactccttctggggcccgctgccgtccttcatatgcgcgtgggtatacgtgatgatcctgcggccggccgagattgccgtcatcatactgacgttcgccgagtactcgatactgcccttccggcatctgctcgggctggagtacatggcggcggacgatctgcatctgcttatcaagctgataggcatcttggggttaggcattatcacgtacatcaatctcagcagcgtgaagctgtacgtcaccatcaacaacgtgttcgggttctgcaaggtgttcgcctgtctggtggtcatctttggcggcgtgtaccagctggcgattggcaatacggaaaatttggccggcgggttcgagggcaccaacaccagcccgggccacatcgcgctcgccttctacaatgggctgtgggcgtacgacggctggtcaagcgtgacgaccatcacggaggagatcaagaagccggaggtgaacattccccgctcgatcatgatcgccgtaccgatcatcaccggactgtacgtgttcatgaacctggcctacatgaccgtcctctcgatgggtgagatgatcgcctcggaagcggtcggtatcgatttcggcgaccgtgcgctcggttcgttttcgtttctgattccgctcggcgttgcgctggccacgttcggttgcgccctcagcattcagtttggcgtgacgcgtctctgctacgttgccagccaggagggacagatgctggaaccgctctcatacattcacgtgcgccgtgctacacccgctccggccgttgcaatgcagggtatactggcgctcgcgttcatactggtcggcaacattgagacgctgatcgagttcgcgtcgtttttgatctggttcttttacggagcagccgtcgttgcgctgctggccctgcgccgcacccagccggacgtgcaccggccgtacaaggtgccgctgatcgtgccgtacattacgctggcggtgtcgatcttcctctcgatcgtgccggtgattagtgatccgtcgccgaagtacctgtttgcggtggcgttcatcttgagcggcgtgctggtttacacaccgttcgtgtactacaaagtgcgacccagatggatcaacaaactcacctttctcattcaagtgctcttcgaagttgttccatcatctagcaagttagactag

SEQ ID NO: 7705 - protein, 474 aa, Anopheles gambiae str. PEST
LKREMGLMSAINVIISVMIGSGIFVSPTAALRYSGSVGFCLVVWTVCGGISLLGALCFAELGTVVPRSGAEYAYLIEAFKKSHSFWGPLPSFICAWVYVMILRPAEIAVIILTFAEYSILPFRHLLGLEYMAADDLHLLIKLIGILGLGIITYINLSSVKLYVTINNVFGFCKVFACLVVIFGGVYQLAIGNTENLAGGFEGTNTSPGHIALAFYNGLWAYDGWSSVTTITEEIKKPEVNIPRSIMIAVPIITGLYVFMNLAYMTVLSMGEMIASEAVGIDFGDRALGSFSFLIPLGVALATFGCALSIQFGVTRLCYVASQEGQMLEPLSYIHVRRATPAPAVAMQGILALAFILVGNIETLIEFASFLIWFFYGAAVVALLALRRTQPDVHRPYKVPLIVPYITLAVSIFLSIVPVISDPSPKYLFAVAFILSGVLVYTPFVYYKVRPRWINKLTFLIQVLFEVVPSSSKLD

SEQ ID NO: 7706 - DNA, 1347 bp, Silicibacter pomeroyi DSS-3
  CDS (1)..(1347): transl_table=11
atgaccagaacaccacagacccatgaggccgcgcccgggggcgcgggcagcatcagcctgaccaacgcggttgccatgggcaccggggtgatgatcggggcggggatatttgccctgaccggacagatcgccggtcttgcagggcctttgttcccgctctctttcgtgctgggcgcggtggtgacgatgttcagcgcctacagctatatcgtgatgtcgaacacctggccctcgtccggcggtatcgcgatgatcctgaccaaggcctatggccccggtgccgtggcggcggcggcctcggtgctgatggcgctgtcgatggtcatcaacgaaagcctggtggcgcgcacctttgccacctatgcactgcgcccctttggcattcaggacgggccgctggtgcccgcgattggcgttgcgctgatcgtgatggcctatctggtcaacgtctcgggcaatcgcgcggtggggctgtggtcactggtgatgtcggcggtcaagatcggcggtatcgcgctgttcggcatcgccgccctgtgggccagcggtatcgagaactggtcacccgccgcgcgattgtcgcaaaacgggatcacaggttttgccgcctcggtggcgctgtcgatcctggcgttcaaggggttcacgacgatcaccaacagcggtggcgaaatcaccgatcccaggcgcaatgtcgggcggacgatcctgctttcgatcgcggtctgtgttgtcgtctacctgctggtggcgctggcggtcggctcggcattgacgcccgtgcaaatccagcaggcgcgcgattatgccctggcagaggcggcgcagccggtgctgggccagaccgggttctatctgacggtggcgcttgccatggtggccaccgcatcgggcctgatcgccagcgtctttgcggtgtcgcgcatgctgaccatgctgaccgagatgaagatgatcccgcacagccactttggcatgcccggcggcatccgctcccatatgctgatctatacggttgtgatcgccggtgccctgaccgtgttgttcgatctgggccggatcgcctcgctgggcgctttcttctatctggtgatggatatggtggtgcattggggtgtgtggaagaacctgcggcatcggatcggcgcacggggctgggtcatcctgaccgcactgacactggacgccgctgtactggccgccttcacgctgttcaaatggcgtgccgatcccactatcgtcatcgttgcccttgtcaccatgctggccgccctgctggccgagcggctgtatctcggcgggttcgtatcagatggtggcgagggcaaacacacaggacatcgctaa

SEQ ID NO: 7707 - protein, 448 aa, Silicibacter pomeroyi DSS-3
MTRTPQTHEAAPGGAGSISLTNAVAMGTGVMIGAGIFALTGQIAGLAGPLFPLSFVLGAVVTMFSAYSYIVMSNTWPSSGGIAMILTKAYGPGAVAAAASVLMALSMVINESLVARTFATYALRPFGIQDGPLVPAIGVALIVMAYLVNVSGNRAVGLWSLVMSAVKIGGIALFGIAALWASGIENWSPAARLSQNGITGFAASVALSILAFKGFTTITNSGGEITDPRRNVGRTILLSIAVCVVVYLLVALAVGSALTPVQIQQARDYALAEAAQPVLGQTGFYLTVALAMVATASGLIASVFAVSRMLTMLTEMKMIPHSHFGMPGGIRSHMLIYTVVIAGALTVLFDLGRIASLGAFFYLVMDMVVHWGVWKNLRHRIGARGWVILTALTLDAAVLAAFTLFKWRADPTIVIVALVTMLAALLAERLYLGGFVSDGGEGKHTGHR

SEQ ID NO: 7708 - DNA, 1314 bp, Saccharophagus degradans 2-40
  CDS (1)..(1314): transl_table=11
atgcagcattcacattcaccacattatcaaaaaaatagtttaaccctggctggtgccgttgccatgggtaccggcgtaatgatcggcgcgggtatatttgctttaacaggtcaagttgcggagatggctagagagtggtttccactggcattcttacttgccgctgttatttcgggtttcagcgcctattcctatgtgaaaatgtcgagcgcgtacccgagtgcgggcgggattgccatgtttttggaaaaggcttatggaaaaggcacaacgacggctgtgtgcgccttgctcatgtacttttcaatggtaattaatgaaagtttggtcgcaagaaccttcgccacttataccttgcaaatattcgatgcaactgctgttgattggcttgtgcctgcgttgggttctgcattgctgctcttcgcatttatcgtcaatattctaggcaatcggtttattcaaacattctcgtttgtgatgggctttatcaaaattggtggtctggcgttgctcgctattggtgggctttgggtatcgggctttaatttcgaaagcatttcggttaagccagaggatacgaccatcagcgggtttttaggggcaattgccttgggtatcctggcatataaggggtttaccaccattaccaacagcggtggtgaaattaaagacccgcacaaaaatattgggcgagccataattctgtcgatctcaatttgtttggttgtgtatatgctggtcgccttcgcggtgggcggaaacctgagcatcaatgaaattgtacaggcgaaggattatgtattagccgaagcggcacgcccggcctttggccagtacggcgtgtggattactgtgggattcgccatagtcgcaacggtttccggtgtgattgccagtgtgttcgcagtctcgcgaatgcttgccatgctgaccgacatgaaacttgttccgcactcgcatttcggtatgcctggcagcatccagcaacacactctggtgtataccatcgtagtggcgatgtttttaacaatattttttgacttaagtcgaatcgcgtctctgggagctattttttatatcgttatggatatcgccatacattggggcgttttgaaaaatttgagaaaggacgttaaggcaagccccacgatacttaccttggcaattggattggatgtgttggtgctaattgcatttatttgggtaaaaattcagaccgacatgctggtgatttgggcatcactcattggatttataggtattttcctaggagagtattttttcctcaagcactatcgaacacaggataaataa

SEQ ID NO: 7709 - protein, 437 aa, Saccharophagus degradans 2-40
MQHSHSPHYQKNSLTLAGAVAMGTGVMIGAGIFALTGQVAEMAREWFPLAFLLAAVISGFSAYSYVKMSSAYPSAGGIAMFLEKAYGKGTTTAVCALLMYFSMVINESLVARTFATYTLQIFDATAVDWLVPALGSALLLFAFIVNILGNRFIQTFSFVMGFIKIGGLALLAIGGLWVSGFNFESISVKPEDTTISGFLGAIALGILAYKGFTTITNSGGEIKDPHKNIGRAIILSISICLVVYMLVAFAVGGNLSINEIVQAKDYVLAEAARPAFGQYGVWITVGFAIVATVSGVIASVFAVSRMLAMLTDMKLVPHSHFGMPGSIQQHTLVYTIVVAMFLTIFFDLSRIASLGAIFYIVMDIAIHWGVLKNLRKDVKASPTILTLAIGLDVLVLIAFIWVKIQTDMLVIWASLIGFIGIFLGEYFFLKHYRTQDK

SEQ ID NO: 7710 - DNA, 1302 bp, Methanococcoides burtonii DSM 6242
  CDS (1)..(1302): transl_table=11
atgaatgatgtatcttctgagaaatctataggatatttgtctgcagtttctataggcattgggggtatggttggcgggggtatctttgcagttcttggccttgctgttgagattggaaaaggtggaacacctattgcatttggacttgccggcatagtcgcattgatcacatcatattcatatgcaaaactatctgttagatatccttcagaaggaggaactgtcgaatttttgaatcaggcatttggttcagggttggttacaggagggctaaatattcttctatggttaagttatgttgtgatgctctcgctttatgcctatgcttttggaagctatggttccacgttttttcccgattcgatgcaagcggtcttaagacatgtactcaccagcattattattgtatcattaactgtggtgaatattgttggtgcaaaagtagttggaaaattggaaacgtggattgttggctttaaagttgctattttgttaatattcattggtgtaggtatatggagtgttaaatcccagccgtttcaaccaacaattagttctaatccacttcagcttgtagctggaggtatgattatttttttggcttatgaagggtttgaactgatagcaaacaccgcaaaggatgtgaaaaatcctggaaaaacacttccttgcgcctattattcagcagttgtctttgttattgtactttatgtattaattgcttttattaccgttgaaactgtatcaatcgattccataatacaagctaaagattatgctcttgctgtagctgcaaaaccttttttgggaaattttggtttcaaccttattgcagttgcagccctcttgtctacagcttcagctattaacgcaactttgtatggtgcttcacgtgtgagctttactattgccaaagatggggaattgcctgaaatattggaagaaaaaatatggaatcgaccaattgaaggcctattgatcacctctgctctcacattgattgtagcaaatacatttaatttagccagtatctcaataatgggaagcgctggatttttgttaatctttggagctgtaaacgcttctaacgcttgcctgtatcagaagacagcaagttacagatggatttcaataacagggatcattgtctgttctattgcactgtttacattgatctggtacactttgaacaattccccaaaagatattttcatattggcctttatgctttgctcagcatttgccatcgaagcaatttatagaaggtttacaggcaggtacataaagaaaatccatgaatga

SEQ ID NO: 7711 - protein, 433 aa, Methanococcoides burtonii DSM 6242
MNDVSSEKSIGYLSAVSIGIGGMVGGGIFAVLGLAVEIGKGGTPIAFGLAGIVALITSYSYAKLSVRYPSEGGTVEFLNQAFGSGLVTGGLNILLWLSYVVMLSLYAYAFGSYGSTFFPDSMQAVLRHVLTSIIIVSLTVVNIVGAKVVGKLETWIVGFKVAILLIFIGVGIWSVKSQPFQPTISSNPLQLVAGGMIIFLAYEGFELIANTAKDVKNPGKTLPCAYYSAVVFVIVLYVLIAFITVETVSIDSIIQAKDYALAVAAKPFLGNFGFNLIAVAALLSTASAINATLYGASRVSFTIAKDGELPEILEEKIWNRPIEGLLITSALTLIVANTFNLASISIMGSAGFLLIFGAVNASNACLYQKTASYRWISITGIIVCSIALFTLIWYTLNNSPKDIFILAFMLCSAFAIEAIYRRFTGRYIKKIHE

SEQ ID NO: 7712 - DNA, 1410 bp, Ralstonia metallidurans CH34
  CDS (1)..(1410): transl_table=11
atgagtctctttcgcaccaaaaacatcgacgccatgctggaagtcagcgagcacgacggattgcgaaaggtgctgggggcggtggatctggtgctgatgggtatcggggccatcatcggcaccgggattttcgtgctgactggcaccggggcgctgaccgcgggccccgcgctgacggtgtcgttcgtgatcgcggccatggcctgcggcttcgcggcgctgtgctatgcggagttcgcttccgcgatccccgtatcgggttcgatctacacgtatagctacgccacgctcggcgagatcgtggcgtggatgattggctgggacctgctgctcgagtacgggctggccacgtcggcggtgtcagtagggtggtccggctacttccagtcgctgatcgccgggttcggcatccatctgccgaccgtgctgactgccgcgccgggcgcggtgcccggtgaacacacgctgttcaacctgcccgcctgcctgatcatgctggcgatcacctggatcgtttcatacggcgtcaaggagtcggcgcgactcaacaacgtgatggtggcgatcaagatcggcgtcgtgctgctgttcatcgccgtcggcgtctggcacgtgaagcccgccaactggcagccgttcgcgccgttcggcatgaccggcgtcttcaacgccgccgcgctcgtcttcttcgcgttcatcgggttcgatgcggtgacgtcggccgccgaggaagtgcgcaacccgcgccgtgacctgccgatcggcatcatcggctcgctggcggtttgcaccatcctttacgtgaccgtggcagccatcatgaccggcatcgtgccattcatgaagttcgagggcgttgaccatccggtgtcgctggcgctgcaatacgcggggcagaactgggtggccgggtttgttgatctgggcgccatcctcggcatgaccaccgtgattctggtgatgacctacgggcagacgcggatcatcttcgccatgtcgcgcgacgggttgctgccggaagcgttatcgacggtgcacccggttcatgcaacgccgtacacggccacgtggaccgtcggcatcgtgttcgcggcgatcgccgccttcgtgccgctgaacgtactggccgaactgatcaacatcggcacgctggccgcgttcacgctgatctcgatcgcgatccttgtgttgcgccgcacgcgcccagatttgcggcgcggcttccgctgcccgggcgtgcccgtggtgccgctgctggccgttggcttctgcctgttcctgatggcccatctgcaggcgctgacctggattgcattcctgtgctggatcgggctgggtctgatcatttacttcgcttactcgcgccgcaacgcggtgctgcacaaccacggcggcgacgccgagggctga

SEQ ID NO: 7713 - protein, 469 aa, Ralstonia metallidurans CH34
MSLFRTKNIDAMLEVSEHDGLRKVLGAVDLVLMGIGAIIGTGIFVLTGTGALTAGPALTVSFVIAAMACGFAALCYAEFASAIPVSGSIYTYSYATLGEIVAWMIGWDLLLEYGLATSAVSVGWSGYFQSLIAGFGIHLPTVLTAAPGAVPGEHTLFNLPACLIMLAITWIVSYGVKESARLNNVMVAIKIGVVLLFIAVGVWHVKPANWQPFAPFGMTGVFNAAALVFFAFIGFDAVTSAAEEVRNPRRDLPIGIIGSLAVCTILYVTVAAIMTGIVPFMKFEGVDHPVSLALQYAGQNWVAGFVDLGAILGMTTVILVMTYGQTRIIFAMSRDGLLPEALSTVHPVHATPYTATWTVGIVFAAIAAFVPLNVLAELINIGTLAAFTLISIAILVLRRTRPDLRRGFRCPGVPVVPLLAVGFCLFLMAHLQALTWIAFLCWIGLGLIIYFAYSRRNAVLHNHGGDAEG

SEQ ID NO: 7714 - DNA, 1353 bp, Mycobacterium sp. KMS
  CDS (1)..(1353): transl_table=11
gtggacaagaacgacacctcgaagatctccttgatcgggtcagtcgcgttgggcactggcgtcatgatcggtgcggggatcttcgcgctcgtgggacaggtggcggagctggccggctcggccgtgccctgggcgttcgtggccggcgctgtagtggccgccgtcagcgcctactcatacgtgcgatgcgcgagcgccaatccgtcatcgggtgggatcgccatgatcctcaaagcggcgtatggccccggcgtcgtcgccggaaccttctcgctgttcatgtatgtgtccatggtcctggccgagagcctgctggcgcgaaccttcggcacctacgctctgcgtccgttcggactgcagggttcggcgatcttggtgcctgtcctcgccgtattggcgatcgtgatcgcgacgtcggtcaacctcgtgggtaaccgttgggtcgagtcgtcggcgacggtgaccgcgatcgtgaagatcaccgggattgccgtgctcgcgatcgccggaatctacgccaccgggttgtcttcgctgtcacaggttttcgagacaggagccgaagccacgccgccgcgcagtggaatcctcggcttccttgccggtgtcacactctgcatccttgcttacaagggcttcaccacgatcacgaatcagggcgacgacatccgtgatccccgccgaaacatcggccgggcaatcgtcatctcgctcgtcgtgtgcgctgtcgtctacctgctactcacgatcgccgtcaccgggagtctgtccgtcgccgagatcgtggacgcacgtgactacgctctcgcggaggcagcggaaccgctcttcggctcatggggtgtgcggttgaccgttgccgtcgccgtcgtggcgacgatgtccggtctgatcgcgagcttgtactccgtgtcacggctctacgacatgctgcggcacatgcatcaggtgcctgatgtacccggcagcgtgcaccgcccgtcactgctgatcaccgcggccgctgccatcgtcacggcggcactgttcgacctgagtcgaatcgcttcgctgggcgcgatgctgtacctgtcgatggacatcgcgatccactggggattgctccgtcggttgagacacgatgtggacttcaaggtttgggttccactgctggcgatcgcgctcgatgtcgtggtgttggtgcccttcgtgatcctcaccgcgcgcaacagtctgccaacactcgtcattttcggcgtcgtctcagcggtgatcgtcctgggtcagcaagcggcggtgcggcatcgcaaccggtcgtcggcggcgccggccgctccgaacgacggcaccgacgagaatcaggaccgctcctga

SEQ ID NO: 7715 - protein, 450 aa, Mycobacterium sp. KMS
MDKNDTSKISLIGSVALGTGVMIGAGIFALVGQVAELAGSAVPWAFVAGAVVAAVSAYSYVRCASANPSSGGIAMILKAAYGPGVVAGTFSLFMYVSMVLAESLLARTFGTYALRPFGLQGSAILVPVLAVLAIVIATSVNLVGNRWVESSATVTAIVKITGIAVLAIAGIYATGLSSLSQVFETGAEATPPRSGILGFLAGVTLCILAYKGFTTITNQGDDIRDPRRNIGRAIVISLVVCAVVYLLLTIAVTGSLSVAEIVDARDYALAEAAEPLFGSWGVRLTVAVAVVATMSGLIASLYSVSRLYDMLRHMHQVPDVPGSVHRPSLLITAAAAIVTAALFDLSRIASLGAMLYLSMDIAIHWGLLRRLRHDVDFKVWVPLLAIALDVVVLVPFVILTARNSLPTLVIFGVVSAVIVLGQQAAVRHRNRSSAAPAAPNDGTDENQDRS

SEQ ID NO: 7716 - DNA, 1326 bp, Prosthecochloris aestuarii DSM 271
  CDS (1)..(1326): transl_table=11
atgaagagtgctggaaaagaggggaaggccactatcgggtttttcggtgctgttgccattggtatcggcggtatggtcggtggaggaatttttgccgttctcggtgaagctgtctctctggcgcatggctcaacctctcttgcgttcattattgccggaagtgttgccattgtgacggcattcgcatacgcaaggctttcggttgcttttcccggaaggggaggaacggttctttttattgacagggcatttggaaacaaccttgcttcaggtagtgtgaacctgatgctctggctgagttatcttgttactattgctctttatgccaatgcgtttgcttcctatgctgagacattctttcacggtggcggtggtttaccgtttttgcgtcaccttctgatcagcgcagcaattcttctgcccacgtttatcaatctgacgaacgcttcatttgtcagccgatccgaaacggtcattgtcctgttcaaactgcttctgctcatcgttattatcggtttcagccttcctgcagtcggcgttgtcgctgttctgccgacggagttgactcttctgccctctattgctactgcaggaatggtgatttttgtggcctatgagggcttcgaactgatagcaaatgcttcggatgacgttcgcaatccgggaaacacgctgcccgctgctttcttttcttcagtggtgattgtcatcatgctttatgtgattatcggttacgttaccgtcggtgctgtgccggagaaggagttgttgcgcgcaaaggattacgctctggcggttgcggccaggccctctctcggcgagacaggttttacgattgttgcgattgctgcgttgctggcgacgttttcagcaatcaatgcaacgatctacggtaatgcacggctcggatattttcttgcgagagacggcgaactgccgaaggtattcgacaggcagctctggaatgaaccggtgacaggagtgctggttactgcatgcataagccttcttatcgctaatacgcttgatatttcttctatcgctgttattgcaagcgcaagttttctgcttgtcttcgccctcgtcaatgcgagtgcagctgcactgacaaaggagatcaatgggcgtcgctggatccatgttctcggtgctgtctgttgtggcgtgtcgctctctgttcttctcgttcacgctgttctgagcgatttcagtgctattgtcgtttttcttgtatttatcgttgtgtcggttctctttgaatggatctacggaaaaaccgcacgtggtcattttctcgggcgcccctacgatgccggaaaaacatga

SEQ ID NO: 7717 - protein, 441 aa, Prosthecochloris aestuarii DSM 271
MKSAGKEGKATIGFFGAVAIGIGGMVGGGIFAVLGEAVSLAHGSTSLAFIIAGSVAIVTAFAYARLSVAFPGRGGTVLFIDRAFGNNLASGSVNLMLWLSYLVTIALYANAFASYAETFFHGGGGLPFLRHLLISAAILLPTFINLTNASFVSRSETVIVLFKLLLLIVIIGFSLPAVGVVAVLPTELTLLPSIATAGMVIFVAYEGFELIANASDDVRNPGNTLPAAFFSSVVIVIMLYVIIGYVTVGAVPEKELLRAKDYALAVAARPSLGETGFTIVAIAALLATFSAINATIYGNARLGYFLARDGELPKVFDRQLWNEPVTGVLVTACISLLIANTLDISSIAVIASASFLLVFALVNASAAALTKEINGRRWIHVLGAVCCGVSLSVLLVHAVLSDFSAIVVFLVFIVVSVLFEWIYGKTARGHFLGRPYDAGKT

SEQ ID NO: 7718 - DNA, 1344 bp, Prosthecochloris aestuarii DSM 271
  CDS (1)..(1344): transl_table=11
atgtcaaaaaattctcacgcaatatccctggtcgaagccgtttctatggctgtaggcacgatgatcggagccagtattttttcgatttttggcctgggcgctgaaatagcaggccaaaacctgccgatggctttttttctttccggtatgcttgctttcatggtagcatattcatatgccatcctcggcagacagattatttcgaatgccggtccgatctcatttcttcttaaagggatcggtgacaatgtgttgaccggaacattagctgtcttgatgtggctgagttatgtgatttcaatagcactttttgtcaagggcttttccggatatctgctgccgtttatcaatatagaatcgactccgcttgcaattgggctcaccgaagcgggcattatcatgtttttcacgttactcaacacctatggcagtcaggctgtcggtaaacttgagctctacattgtcgcggtcaaactgtcgattctgctcatttttatcgttctcggcatgtcatcgattcatctgtcttctatcgttccatcattgacgcctaaaggcactgaaggaatgctgatgggcagtatcgtcttttttctgtcctacatggggtttggcttgattaccaatgcatcggaaaacatagacaacccgtttgtgaatgtgccgcgagctatttatatcagcatttcgatcgtcatcatggtctacgtcctggtttcagtcgtagctcttggaaatcttgccattccggatcttgtcaaggcccaggacaacgctcttgctgtagctgcgcggccatttcttggtcagacaggctttgcgctgttatctgttggcgcacttttttcaattgcatcagcactcaacgccacactctacggcggagcgaatattgcgtattctctggcgaaagatggcgagttacccgggatattcgagcgaaaaatatggttcggatccagcgaaggcctttacataaccgctggtcttggattgttttttgctttgctgttcgatatcggagcaattgcttcaatcaccagtactatctatacgataatctatctctgtgtcatgatttctcactatcggatcgccggtacctatggcggaagcagacccttgatcttcatcttttcatgcaccatggctgtcgtcctgattggactgatgagctatcaatacatgaccagcaaaatcacctttttcgccactatagcaacatttttcggcgctttgctgattgagtatctctaccgatatggaaggaaacgcaggtttggcatcatcaataatctttcagatacgtctcaagccctacatcccgcaaggaaagatatctga

SEQ ID NO: 7719 - protein, 447 aa, Prosthecochloris aestuarii DSM 271
MSKNSHAISLVEAVSMAVGTMIGASIFSIFGLGAEIAGQNLPMAFFLSGMLAFMVAYSYAILGRQIISNAGPISFLLKGIGDNVLTGTLAVLMWLSYVISIALFVKGFSGYLLPFINIESTPLAIGLTEAGIIMFFTLLNTYGSQAVGKLELYIVAVKLSILLIFIVLGMSSIHLSSIVPSLTPKGTEGMLMGSIVFFLSYMGFGLITNASENIDNPFVNVPRAIYISISIVIMVYVLVSVVALGNLAIPDLVKAQDNALAVAARPFLGQTGFALLSVGALFSIASALNATLYGGANIAYSLAKDGELPGIFERKIWFGSSEGLYITAGLGLFFALLFDIGAIASITSTIYTIIYLCVMISHYRIAGTYGGSRPLIFIFSCTMAVVLIGLMSYQYMTSKITFFATIATFFGALLIEYLYRYGRKRRFGIINNLSDTSQALHPARKDI

SEQ ID NO: 7720 - DNA, 1389 bp, Bacillus subtilis
  CDS (1)..(1389): transl_table=11
ttgatgagttcattatttagaaaaaaaccgcttgaaacattgagtgcgcagagcaagtcaaaaagccttgcccgtacgttaagcgcatttgatttaaccttgctcggtatcggttgtgtcatcggtacagggatttttgtcattacaggaacagtggcagcgaccggtgcaggtcccgccctcatcatatcgtttattttagcggggctcgcctgtgcgctggctgctttctgttatgctgagttttcgtcttccattccgatttcgggaagcgtgtactcatactcatacgtgacacttggagagctgctcgcctttttgatcggatgggatctcatgcttgaatatgtcattgcactgtcggcggttgccaccggctggtcttcatactttcaatcactgcttgccggcttcaatcttcatattccggctgcactgacaggagcgccgggaagcatggcgggcgccgtatttaaccttccggctgcggtgatcattctcctcatcactgcgattgtcagcagaggcgtcaaggaaagcacacgctttaacaacgtcatcgtactgatgaaaatcgcgatcatattattgttcattattgtcggcatcggctatgtgaaaccggataactggtctccttttatgccattcgggatgaaaggcgtcatacttagcgctgccactgtattcttcgcgtaccttgggtttgacgcggtttctaacgcatcagaggaagtgaaaaatccgcaaaaaaacatgcccgtcggcattatttcagctctagccgtctgtacggttctgtacatcgcggtatcgcttgtgctgacaggcatgatgccttatgccaaattgaatgtcggagatcctgtatcctttgcgctgaaattcgtcggacaggacgctgttgccggaattatttctgtcggtgcgattatcgggattacgacggtgatgctcgctttgctgtacgcacaggtccgcttgacatttgccatgagcagagacggccttctgcctggattgttcgcaaaggttcatccgtcatttaaaaccccgttccgcaacacatggctgacagggatcgttgcagcgggaatcgccggctttattaacctcggaacgctggcccatctggtgaacatgggaacacttgccgcgtttacggtcatttccattgctgtcattgtgttaagaaagaaacatcctgaaatcaaagcgtccttcagagtgccattcgttccggttgtgccgattatcagcgcaggcatctgcctttggttcatgtacagccttcccggcgtcacatggctttcatttgtcatctggatcgctgtcggaacgctggtttacttcctatattcgagaaaacacagcttattaaacaaataa

SEQ ID NO: 7721 - protein, 462 aa, Bacillus subtilis
MMSSLFRKKPLETLSAQSKSKSLARTLSAFDLTLLGIGCVIGTGIFVITGTVAATGAGPALIISFILAGLACALAAFCYAEFSSSIPISGSVYSYSYVTLGELLAFLIGWDLMLEYVIALSAVATGWSSYFQSLLAGFNLHIPAALTGAPGSMAGAVFNLPAAVIILLITAIVSRGVKESTRFNNVIVLMKIAIILLFIIVGIGYVKPDNWSPFMPFGMKGVILSAATVFFAYLGFDAVSNASEEVKNPQKNMPVGIISALAVCTVLYIAVSLVLTGMMPYAKLNVGDPVSFALKFVGQDAVAGIISVGAIIGITTVMLALLYAQVRLTFAMSRDGLLPGLFAKVHPSFKTPFRNTWLTGIVAAGIAGFINLGTLAHLVNMGTLAAFTVISIAVIVLRKKHPEIKASFRVPFVPVVPIISAGICLWFMYSLPGVTWLSFVIWIAVGTLVYFLYSRKHSLLNK

SEQ ID NO: 7722 - DNA, 1308 bp, Methanococcus jannaschii
  CDS (1)..(1308): transl_table=11
atggagttaaaaaataaaaagcttagtttgtgggaagctgtttctatggctgttggtgtaatgattggggcaagtatattttctatatttggagttggagctaaaatagctggaagaaaccttccagaaacatttatattgtctggaatttatgcacttttagttgcttattcctatacaaaacttggagcaaagatagtttcaaatgcgggacctattgcattcatccataaagccattggagataatataataactggagctttgagcattttattatggatgagttacgttatatccattgctctatttgcaaaagggtttgctggctatttcttacctttaataaatgctccaataaatacattcaatattgccataactgaaataggcatagttgcgtttttcactgctctgaatttctttggttctaaggctgtagggagggctgaattttttattgttttggttaagctcttaatattagggttgtttatatttgctgggttgataacaattcatccatcttatgtaattccagatttagccccatctgcagtaagtgggatgatttttgcatcagctatattcttcctatcatatatgggttttggagttataactaatgcctcagaacatattgaaaaccctaaaaagaacgttccaagggctatatttataagcatattgattgtgatgtttgtgtatgttggagtagccatttcagcaataggaaatttaccaatagatgaactaattaaagccagtgaaaatgccttagcagtggcggcaaaaccattcttaggaaacttagggtttttattaatatctataggagctttattttcaatttcatcagcaatgaacgccacaatatacggaggggctaatgttgcctattcattagcaaaagacggagaacttccagaattctttgagagaaaggtatggtttaaatccacagagggactttatataacctcagcccttggagtgttgtttgcattactgtttaatatggagggggtggcatcaataacaagtgccgtatttatggttatatatctctttgttattctctcccactatatccttatcgatgaagttggagggagaaaagagattgtaatctttagctttattgttgtattaggagtttttctacttttattgtattatcagtggataaccaatagatttgtgttttatgggataatagcaacatttattggagtgctgatatttgagattatctatagaaaagtaacaaaaagaacattctccaacaatatgtatgttaaaagctaa

SEQ ID NO: 7723 - protein, 435 aa, Methanococcus jannaschii
MELKNKKLSLWEAVSMAVGVMIGASIFSIFGVGAKIAGRNLPETFILSGIYALLVAYSYTKLGAKIVSNAGPIAFIHKAIGDNIITGALSILLWMSYVISIALFAKGFAGYFLPLINAPINTFNIAITEIGIVAFFTALNFFGSKAVGRAEFFIVLVKLLILGLFIFAGLITIHPSYVIPDLAPSAVSGMIFASAIFFLSYMGFGVITNASEHIENPKKNVPRAIFISILIVMFVYVGVAISAIGNLPIDELIKASENALAVAAKPFLGNLGFLLISIGALFSISSAMNATIYGGANVAYSLAKDGELPEFFERKVWFKSTEGLYITSALGVLFALLFNMEGVASITSAVFMVIYLFVILSHYILIDEVGGRKEIVIFSFIVVLGVFLLLLYYQWITNRFVFYGIIATFIGVLIFEIIYRKVTKRTFSNNMYVKS

SEQ ID NO: 7724 - DNA, 1770 bp, Glycine max
  CDS (1)..(1770)
atggcttccacaagagacaaagatgaggctgaacatcagagaggctattggagatggagcaaacaagatttcttgcctgaggagtccttccaaagctggagcaactacgtttccgccctttctcaaacacggctaaggttcaaggaccgtctcttagcaagatcagatgatgccactgagacagaggaactcaagaaacaaagtgagcatgacatgaaacgttgcctcaactggtgggacctcatatggttcggttttggcgcagtgataggagcaggaatctttgtgctcactggacaagaggctcatgaccatgctggaccagccattgtcttatcctatgttgcctcaggcttctcagcaatgctttctgttttctgctacacagagtttgctgtggaagttccttctgcaggaggctcatttgcttatatgagagttgaattaggagactttgttgctttcataactgccggcaacattcttcttgaaagtgttattggaagtgcagcagtggcaagatcatggacttcatactttacaagccttttgaaccgtcccaaggattcgctgcgcattaaaacaagtctcaaagagggttacaacttgctggaccctatagcttctgtggttctggtgattgcttcagtaatcacaatcatcagcacaagaaaaacttcagttctcaattggctagcatccgccatcaacactgctgttattatatttgtgattgttgcagggtttcttcatgctgacacatcaaatttgacaccctttttaccttatggggctaaaggggtgtttcaagctgcagcaattatttattttgcatatggagggtttgatcatattgcaaccatggctgaagaaaccaagaatccttcaagggacataccaataggattggtggggtcaatgtccatgatcacagtgatttactgcttgatggcactctcactgagcatgatgcagaagtacacagagatagacactggtgctgctttctcagttgcatttcagaatgtgggaatgaggtgggcaaaatatgtggtagcttttggtgcactaaaagggatgaccacagtgcttcttgtgggtagattggcacaggcacgttatattactcacattgcacgttgtcacatgatcccaccatggtttgctcttgtgcactctaagacaggaacccctataaatgctacactcttgattaccattgcaagtgccaccatagcttttttcacaggcttgaaagtgttgtcaagcctgatatcagtgagcacactctttgtgttcatgatgatatcagttgcccttctggtgaggaggtactatgtgagaggggtcacaccaagagagaacttgttgaagctagttatcttcttggttctcattattgcttcctcaattggaatttcagcttattgggggctgaggcctaatggttggtttggatacagtgtgactgttcctatttggttcatggcaacactagggatgtcactgtttttgactcagcaaagggtgccaagagtttggggtgttccacttgtgccatggttgccatctttgtcaattgcaacaaatgtattcctcatggggtctttggaatatgaagccttcataagatttggagtgtgcactgtggtaatgctgatctactaccttctttttgggcttcatgcaacttatgatatggctcaccaacaagagaagctgccatccaaagtagaacacacacagacagttaaaaatgaagtgtcttag

SEQ ID NO: 7725 - protein, 589 aa, Glycine max
MASTRDKDEAEHQRGYWRWSKQDFLPEESFQSWSNYVSALSQTRLRFKDRLLARSDDATETEELKKQSEHDMKRCLNWWDLIWFGFGAVIGAGIFVLTGQEAHDHAGPAIVLSYVASGFSAMLSVFCYTEFAVEVPSAGGSFAYMRVELGDFVAFITAGNILLESVIGSAAVARSWTSYFTSLLNRPKDSLRIKTSLKEGYNLLDPIASVVLVIASVITIISTRKTSVLNWLASAINTAVIIFVIVAGFLHADTSNLTPFLPYGAKGVFQAAAIIYFAYGGFDHIATMAEETKNPSRDIPIGLVGSMSMITVIYCLMALSLSMMQKYTEIDTGAAFSVAFQNVGMRWAKYVVAFGALKGMTTVLLVGRLAQARYITHIARCHMIPPWFALVHSKTGTPINATLLITIASATIAFFTGLKVLSSLISVSTLFVFMMISVALLVRRYYVRGVTPRENLLKLVIFLVLIIASSIGISAYWGLRPNGWFGYSVTVPIWFMATLGMSLFLTQQRVPRVWGVPLVPWLPSLSIATNVFLMGSLEYEAFIRFGVCTVVMLIYYLLFGLHATYDMAHQQEKLPSKVEHTQTVKNEVS

SEQ ID NO: 7726 - DNA, 24 bp, Artificial sequence
  primer
atgatgaacacggaaggtaataac

SEQ ID NO: 7727 - DNA, 24 bp, Artificial sequence
  primer
ttatacggttttattgcgcttcat

SEQ ID NO: 7728 - protein, 330 aa, Artificial sequence
  consensus sequence
  Variant (2)..(2): Xaa in position 2 is any amino acid
  Variant (4)..(6): Xaa in position 4 to 6 is any amino acid
  Variant (8)..(8): Xaa in position 8 is any amino acid
  Variant (12)..(14): Xaa in position 12 to 14 is any amino acid
  Variant (16)..(28): Xaa in position 16 to 28 is any amino acid
  Variant (29)..(30): Xaa in position 29 to 30 is any or no amino acid
  Variant (32)..(34): Xaa in position 32 to 34 is any amino acid
  Variant (36)..(44): Xaa in position 36 to 44 is any amino acid
  Variant (46)..(52): Xaa in position 46 to 52 is any amino acid
  Variant (54)..(55): Xaa in position 54 to 55 is any amino acid
  Variant (56)..(56): Xaa in position 56 is any or no amino acid
  Variant (58)..(92): Xaa in position 58 to 92 is any amino acid
  Variant (93)..(100): Xaa in position 93 to 100 is any or no amino acid
  Variant (102)..(103): Xaa in position 102 to 103 is any amino acid
  Variant (105)..(126): Xaa in position 105 to 126 is any amino acid
  Variant (127)..(147): Xaa in position 127 to 147 is any or no amino acid
  Variant (149)..(168): Xaa in position 149 to 168 is any amino acid
  Variant (170)..(179): Xaa in position 170 to 179 is any amino acid
  Variant (181)..(209): Xaa in position 181 to 209 is any amino acid
  Variant (210)..(218): Xaa in position 210 to 218 is any or no amino acid
  Variant (221)..(221): Xaa in position 221 is any amino acid
  Variant (224)..(235): Xaa in position 224 to 235 is any amino acid
  Variant (237)..(253): Xaa in position 237 to 253 is any amino acid
  Variant (254)..(254): Xaa in position 254 is any or no amino acid
  Variant (256)..(279): Xaa in position 256 to 279 is any amino acid
  Variant (280)..(283): Xaa in position 280 to 283 is any or no amino acid
  Variant (285)..(299): Xaa in position 285 to 299 is any amino acid
  Variant (300)..(300): Xaa in position 300 is any or no amino acid
  Variant (302)..(328): Xaa in position 302 to 328 is any amino acid
  Variant (329)..(329): Xaa in position 329 is any or no amino acid
GXGXXXGXGIFXXXGXXXXXXXXXXXXXXXFXXXGXXXXXXXXXYXXXXXXXPXXXGXXXXXXXXXXXXXXXXXXXXXXXXXXXXXXXXXXXXXXXXXXXFXXYXXXXXXXXXXXXXXXXXXXXXXXXXXXXXXXXXXXXXXXXXXXTXXXXXXXXXXXXXXXXXXXXKXXXXXXXXXXGXXXXXXXXXXXXXXXXXXXXXXXXXXXXXXXXXXXXXXAYXGFXXXXXXXXXXXXPXXXXXXXXXXXXXXXXXXYXXXXXXXXXXXXXXXXXXXXXXXXXXXXAXXXXXXXXXXXXXXXXAXXXXXXXXXXXXXXXXXXXXXXXXXXXXP

SEQ ID NO: 7729 - protein, 15 aa, Artificial sequence
  protein pattern
  Variant (2)..(2): Xaa in position 2 is any amino acid
  Variant (4)..(4): Xaa in position 4 is Ala, Cys, Gly, Ser or Val
  Variant (5)..(5): Xaa in position 5 is any amino acid
  Variant (6)..(6): Xaa in position 6 is Ile or Val
  Variant (8)..(8): Xaa in position 8 is Ala, Gly or Thr
  Variant (10)..(10): Xaa in position 10 is Ile or Val
  Variant (12)..(12): Xaa in position 12 is Ala, Ser or Val
  Variant (13)..(14): Xaa in position 13 to 14 is any amino acid
GXGXXXGXGXFXXXG

SEQ ID NO: 7730 - DNA, 1002 bp, Escherichia coli
  CDS (1)..(1002): transl_table=11
atgattgatttacgcagtgataccgttacccgaccaagccgcgccatgctcgaagcgatgatggccgccccggttggggacgacgtttacggagacgaccctaccgttaatgctctgcaggactacgcagcagagctttccggtaaagaagccgccatttttctgcctaccggcactcaggccaacctggtcgctctgctcagtcactgcgaacgcggcgaagagtatattgtcggtcaggccgcgcataactatctgtttgaagccggtggcgcggcggtgctgggcagtattcaaccgcaacccatagacgcggctgccgacggcacgctaccgctggataaagtggcgatgaaaatcaaacccgacgatatccatttcgcccgcaccaaattactcagtctggaaaacacccacaacggcaaagtgttgccgcgggaatacctgaaagaagcatgggaatttacccgcgagcgcaatctggcgctgcatgttgacggtgcgcgcatctttaatgccgtggtggcttacggctgcgaactgaaagagatcacgcaatattgtgattcgttcaccatttgcctgtcgaaaggtcttgggacgccagtcggttcattactcgtcggtaatcgtgattacattaaacgtgccattcgctggcggaaaatgacaggtggcgggatgcgccagtccggcattctggctgccgccgggatatatgccctgaaaaataacgttgcgcgcttgcaggaagaccacgacaacgctgcctggatggcggagcagctgcgtgaagcaggcgcggatgtgatgcgtcaggacaccaatatgctgtttgttcgcgtcggggaagaaaatgctgccgcgttaggcgaatacatgaaagcgagaaacgtgctgattaacgcctcgccgattgtccgcctggtgacgcatcttgacgtctcgcgcgaacaactggcggaagtcgccgcccactggcgtgcattcctggcgcgttaa

SEQ ID NO: 7731 - protein, 333 aa, Escherichia coli
MIDLRSDTVTRPSRAMLEAMMAAPVGDDVYGDDPTVNALQDYAAELSGKEAAIFLPTGTQANLVALLSHCERGEEYIVGQAAHNYLFEAGGAAVLGSIQPQPIDAAADGTLPLDKVAMKIKPDDIHFARTKLLSLENTHNGKVLPREYLKEAWEFTRERNLALHVDGARIFNAVVAYGCELKEITQYCDSFTICLSKGLGTPVGSLLVGNRDYIKRAIRWRKMTGGGMRQSGILAAAGIYALKNNVARLQEDHDNAAWMAEQLREAGADVMRQDTNMLFVRVGEENAAALGEYMKARNVLINASPIVRLVTHLDVSREQLAEVAAHWRAFLAR

SEQ ID NO: 7732 - DNA, 1351 bp, Zea mays
  CDS (133)..(1251)
cattgggtacctcgaggccggccggggaaaccccacacaccagtccatttcacccatccatcatcctaacaaaggactactctctctctcgtcctcgtcccgcctcgcagtcgcagtcgcagcacgagcacgatggtgaccaacgtggtggacctccggtcggacacggtcaccaagccgtccgacgccatgcgcgccgccatggccgcggccgacgtggacgacgacgtcctgggcgcggaccccaccgcgcgccgcttcgaggcggagatggccgcgctcctgggcaaggaggcggcgctgttcgtgccctcgggcaccatggccaacctcgtctccgtcctcgcgcactgcgacgtccgcggcagcgaggtcatcctcggcgacgcctcccacatccacgtctacgagaacggcggcatctccaccctcggcggcgtgcaccccaggaccgtgcccaacaaccccgacggcaccatggacctcgccaggatcgtcggcgccatcaggaaccccgacggggcgctgctgtacccgaccaccaggctcatctgcctggagaacacgcatgccaattctggtgggaaatgcttgtctgtagagtacacggacaaggttggcgaaattgccgtgaaccacggcttgaagcttcacatcgatggagctcgtattttcaatgcctctgtggcactgggagttcctgtacatagacttgtaaaagctgccgactcagtttcggtatgcctatctaaagggttaggcgcacccatcggatcagttgttgttggttcagaggccttcatcgacaaggctagaattcttaggaagaccctaggcggtgggatgagacaggttggagttctttgtgccgctgcttatgttgctgttcgtgacaccgtgggaaagcttgcggatgatcacaggaaggctaaagccttggcagagggcctcacgaaaattaaacagttcacggtggattcatcttcagtcgagaccaatatggtgttcttcgatatcgtggatccacacatttcaccgagcaagctatgccaagtcttggaacagcgcaatgttcttgcaatgccagcaagttcaaaaagtgtcaggttcgtcatccattaccagatttcagacagcgatgttcaatatgcattgacgtgtgtcgagaaagctgttgaagagctactgaagggcggtacaaagttggagcatttgacgaatggtactgccaaaaactcatattggcactagacgtcagcagggtgtcctgcttgtttgttatcaacgctagctgttaaaactcttctctattaatgaaatagggcacaccactcgtgtgcccgtttgatcc

SEQ ID NO: 7733 - protein, 372 aa, Zea mays
MVTNVVDLRSDTVTKPSDAMRAAMAAADVDDDVLGADPTARRFEAEMAALLGKEAALFVPSGTMANLVSVLAHCDVRGSEVILGDASHIHVYENGGISTLGGVHPRTVPNNPDGTMDLARIVGAIRNPDGALLYPTTRLICLENTHANSGGKCLSVEYTDKVGEIAVNHGLKLHIDGARIFNASVALGVPVHRLVKAADSVSVCLSKGLGAPIGSVVVGSEAFIDKARILRKTLGGGMRQVGVLCAAAYVAVRDTVGKLADDHRKAKALAEGLTKIKQFTVDSSSVETNMVFFDIVDPHISPSKLCQVLEQRNVLAMPASSKSVRFVIHYQISDSDVQYALTCVEKAVEELLKGGTKLEHLTNGTAKNSYWH

SEQ ID NO: 7734 - DNA, 1445 bp, Zea mays
  CDS (182)..(1294)
attgggaccctcgaggccggccggggaaaggtacgcaattctgaaggagaaagaaaccatatctgaaagacaaagcgcggacggaccgttggagcatccaattcgtgagctttggcgtctgtgtatttttaatcgggagctgtaggctgtagctagctagagaggtttagagcagcaccaaatggcgagcaaggtggtggacctccggtcagacacggtcaccaagccctccgaggccatgcgggccgccatggccgccgccgacgtcgacgacgacgtcctgggcgcggacccgaccgcgcatcgcttcgaggcggagatggccgcggtcatgggcaaggaagccgcgctgttcgtgccgtcgggcaccatgggcaacctcatctccgtcctcgtgcactgcgacgtcaggggcagcgaggccatcctcggcgacaactcgcacatccacgtctacgagaacggcggcatctccaccatcggcggcgtgcaccccaggaccgtgaagaacaaccccgacggcaccatggatatcgacaagatcgttgccgccatcaggcatcctgatctccattacccgacgaccagattgatctgcttggagaacacacatgggaatactggtggaaagtgtttatctgtagaatacactgacaaggttggtgaaattgccaagagccatggcttgaagcttcatatcgatggagctcgcatcttcaatgcgtctgtggcacttggagttcctgtagatagactcgtgaaagctgctgattcagtttcggtatgcctatcgaaagggttaggcgcacccgtcggatcagtgattgttggttcgaaggccttcattgacaaggccagaattctccggaagaccctaggcggtggaatgagacaggtgggagttctttgtgctgctgctcatgttgccgttcgtgacactgtgggaaagcttgcggatgaccacaggaaggctaaagctttggcagagggactgaagaaaatcgagcagattacagtggattcagcttcggtcgagaccaatatggtattctttgaggtcatggatccaagaatatcacctgacaaactgtgtcaagtcttggaacaggacaacgtgcttgcactgccagccaattcaaaaagtattaggttcgtcatccattaccagatttcagacgctgatgttgggtacgcattggcatgtgtcgagaaagcaatcaaagagctactggaaggcagtactgagttggggcattcgataaacggagctaccaaaagctcgtatgggcactagatcactcggattctgccaacctgatgcatcgacacatggtacccagctgcttgttagctgctctgcttgtctgtgaccaacgcctagctgttgtagtctcgcctttcccgaataattgttgctgttcagtctctgtttggatcaaaaaaaa

SEQ ID NO: 7735 - protein, 370 aa, Zea mays
MASKVVDLRSDTVTKPSEAMRAAMAAADVDDDVLGADPTAHRFEAEMAAVMGKEAALFVPSGTMGNLISVLVHCDVRGSEAILGDNSHIHVYENGGISTIGGVHPRTVKNNPDGTMDIDKIVAAIRHPDLHYPTTRLICLENTHGNTGGKCLSVEYTDKVGEIAKSHGLKLHIDGARIFNASVALGVPVDRLVKAADSVSVCLSKGLGAPVGSVIVGSKAFIDKARILRKTLGGGMRQVGVLCAAAHVAVRDTVGKLADDHRKAKALAEGLKKIEQITVDSASVETNMVFFEVMDPRISPDKLCQVLEQDNVLALPANSKSIRFVIHYQISDADVGYALACVEKAIKELLEGSTELGHSINGATKSSYGH

SEQ ID NO: 7736 - DNA, 1380 bp, Zea mays subsp. mays
  CDS (126)..(1259)
acacatcagttcatttcagtttcagcaggtcagttttcgtcctgatactctgtcgctgcagcggtgccggtgcagtgcagcgctagctgcagttgggttgcggccgcagagcagcagcaggaaggatggcgaccaaggtggtggtggacctgcggtccgacacggtcaccaagccttccgaggccatgcgcgcgtccatggccgcggccgacgtcgacgacgacgtccggggcgcggacccgaccgcgcgccgcttccaggaggagatggcggcgctcatgggcaaggaggccgcgctcttcgtcccgtcggggaccatgggcaacctcgtgtccgtcctcgcgcactgcgacgtccgcggcagcgaggtcatcctcggcgacgactcgcacatccacctctacgagaacggcggcatctccaccctcggcggcgtgcaccctaagaccgtcagaaacaactccgacggcaccatggacatcgacagcatcgtcgctgcaatcaggcctcccggcggtggcctgtattacccgaccaccaggctcatctgcttggagaacacacatgggaattccggagggaagtgtttatccgcagaatacactgaaaaggttggcgaaattgccaagagtcatggcctgaagcttcatatcgatggagctcgcattttcaacgcctctgtggcacttggagttcctgtggacagacttgtgagagctgcagattcagtttcggtatgcatttctaaaggtttaggcgcccccgttggatcagttattgttggctcgaaggccttcatcgacaaggccaaaattctccggaagaccctaggtggtggaatgaggcaggttggagttctctgtgctgctgctcatgttgccgttcgtgacaatgtgggaaagcttgcagatgaccacagaaaggctaaagctttggcagacggactgaataaaatcgaacagttcagagtggattcagcatcagtccagaccaatatggtattcttggacatcgtggattcacgcatatcatctaacaagctgtgccaggttctgggaacgcacaatgtgctcgcaagtccaaggagtccaaaaagtgtcaggcttgtccttcattaccaaatttcagatgatgatgttcaatatgcactgacgtgttttaagaaagctgctgaacagctactaatgggcagtactgaactcgagcatttggctgaacagctactgatgggcactaccaagaactcgtacgggcaatagggcaccctgatgcataagctcggtgtggtcttatctgtaatcagctcgaaatattgtagccgcaccaaacctttgctgaataactgttgcttctcacttgtttattggatgtgttcgttcc

SEQ ID NO: 7737 - protein, 377 aa, Zea mays subsp. mays
MATKVVVDLRSDTVTKPSEAMRASMAAADVDDDVRGADPTARRFQEEMAALMGKEAALFVPSGTMGNLVSVLAHCDVRGSEVILGDDSHIHLYENGGISTLGGVHPKTVRNNSDGTMDIDSIVAAIRPPGGGLYYPTTRLICLENTHGNSGGKCLSAEYTEKVGEIAKSHGLKLHIDGARIFNASVALGVPVDRLVRAADSVSVCISKGLGAPVGSVIVGSKAFIDKAKILRKTLGGGMRQVGVLCAAAHVAVRDNVGKLADDHRKAKALADGLNKIEQFRVDSASVQTNMVFLDIVDSRISSNKLCQVLGTHNVLASPRSPKSVRLVLHYQISDDDVQYALTCFKKAAEQLLMGSTELEHLAEQLLMGTTKNSYGQ

SEQ ID NO: 7738 - DNA, 1008 bp, Vibrio vulnificus
  CDS (1)..(1008): transl_table=11
atggattttcgttctgacaccgtaactcgccctactcccgccatgcgcgaagccatggctaacgccatcgtcggcgatgatgtttacggtgatgacccaaccgtaaatgaactggaagcctttgccgccaaagaagccggctttgaagcggcgctctttactacttcaggtacgcaagcaaacctgctaggtttgatggcgcattgtgaacgcggtgatgagtatctttgtggccaacaagcgcacaactatcgttacgaggctggcggcgcggcagtattaggttcaatccaacctcaaccggttgagaacaatcccgatggcactttaccgtttgacaagctagccgccgccatcaaacccgatgacagccactttgcgcgcactaagctgcttagccttgaaaataccatcaacggtaaagtgctgcctttgagctatttgcaggaggcgcgtgctttcgtcgataaacacaatctaaaactccatcttgatggtgctcgtgtttataacgcagcaacggcgttggatgttccagtaagagacatcgctcagtattttgattcaatgaccatttgtctttccaaaggattgggcgctccggtgggttctctgctgctgggttctaaagaatacatcgcaaaagcacgacgtttacgcaaaatggtcggtggcggtatgcgccaagcgggtattttagccgcggcaggtaagcttgctttgaccgaacaagtggctcagttgaaagtcgatcatgccaatgccaaagcattggcgcagggtttgtctgagttgccaggtgtgcatgtcaatcctgatttcgtgcaaacaaacattgtgtttgccaaactggatgacaatgtcgacatcaacgcgattgcgcaaaaattggcggaagaatcgatcatcattaccccgggaaatccgattcgttttgtgactcacaaagatatttctcgccaagatattgatctatttctagaaaagttgcgattcttcctcggctaa

SEQ ID NO: 7739 - protein, 335 aa, Vibrio vulnificus
MDFRSDTVTRPTPAMREAMANAIVGDDVYGDDPTVNELEAFAAKEAGFEAALFTTSGTQANLLGLMAHCERGDEYLCGQQAHNYRYEAGGAAVLGSIQPQPVENNPDGTLPFDKLAAAIKPDDSHFARTKLLSLENTINGKVLPLSYLQEARAFVDKHNLKLHLDGARVYNAATALDVPVRDIAQYFDSMTICLSKGLGAPVGSLLLGSKEYIAKARRLRKMVGGGMRQAGILAAAGKLALTEQVAQLKVDHANAKALAQGLSELPGVHVNPDFVQTNIVFAKLDDNVDINAIAQKLAEESIIITPGNPIRFVTHKDISRQDIDLFLEKLRFFLG

SEQ ID NO: 7740 - DNA, 1374 bp, Glycine max
  CDS (118)..(1200)
actttcactcgaagaaccttgaagcgagtctgggccacagcaaccagcgacaacaactcaatcagctagggttgctttgcttgctatcttgttggaggattttctgttcaagagaagatggtaactagaattgtggatcttcgttcagacacagttacaaagccaactgaagcaatgagagctgctatggcaagtgctgaagttgatgacgatgttctaggctatgatccaactgcttttcgcttagaaacagagatggcaaagacaatgggcaaagaagctgctctttttgttccatctggcactatggggaaccttgtatctgtacttgttcattgtgatgtcaggggaagtgaggttattcttggagacaattgccatatcaacatttttgagaatggaggcattgcaaccattgggggagtgcatccaagacaagtgaaaaataacgatgatggaaccatagacattgatttgattgaggctgctataagggacccaatgggggagctattctatccaaccaccaagcttatttgcttggaaaacactcatgcaaactctggtggcagatgcctctcagttgaatatacagacagagttggagagttagctaagaagcatggactgaagcttcacattgatggggcccgtatttttaacgcatcagttgcacttggtgttccagtggataggcttgtccaggcggctgattcagtttccgtttgcctatctaaaggtataggtgctccagttggatctgttattgttggttccaagaattttattgccaaggctagacgactccggaaaaccttaggaggtggaatgagacagattggcctcctttgtgccgctgcacttgttgccttgcaggaaaatgttgggaagctggaaagtgatcacaagaaagctagacttttggctgatggattaaaagaagttaaaggactgagagtggatgctggttctgtggagaccaatatggtatttattgacattgaagagggtacaaagactagggcagaaaagatatgcaagtacatggaagaacgtggtatccttgtgatgcaagagagttcatcaagaatgagagttgttctccaccaccaaatatcagcaagtgatgtgcaatatgcattgtcgtgctttcagcaagctctagctgtcaagggagtacaaaatgaaatgggcaactagtggaagaatttgaatatggcacgttgctgccatattagtcattaaaaaggaattccgtgttccatttgcctttgctcatttgattttcttaaatgtaccctaaagaacatgcaaagatttacatctttgatgttgttccctgttatgaattatgttgactaaaaaaaaaaaaaa

SEQ ID NO: 7741 - protein, 360 aa, Glycine max
MVTRIVDLRSDTVTKPTEAMRAAMASAEVDDDVLGYDPTAFRLETEMAKTMGKEAALFVPSGTMGNLVSVLVHCDVRGSEVILGDNCHINIFENGGIATIGGVHPRQVKNNDDGTIDIDLIEAAIRDPMGELFYPTTKLICLENTHANSGGRCLSVEYTDRVGELAKKHGLKLHIDGARIFNASVALGVPVDRLVQAADSVSVCLSKGIGAPVGSVIVGSKNFIAKARRLRKTLGGGMRQIGLLCAAALVALQENVGKLESDHKKARLLADGLKEVKGLRVDAGSVETNMVFIDIEEGTKTRAEKICKYMEERGILVMQESSSRMRVVLHHQISASDVQYALSCFQQALAVKGVQNEMGN

SEQ ID NO: 7742 - DNA, 1500 bp, Glycine max
  CDS (115)..(1197)
gcacgaggaagaaccttgaagcgagtctgggccacagcaaccagcgacaacaactcaatcagctagggttgctttgcttgctatcttgttggaggattttctgttcaagagaagatggtaactagaattgtggatcttcgttcagacacagttacaaagccaactgaagcaatgagagctgctatggcaagtgctgaagttgatgacgatgttctaggctatgatccaactgcttttcgcttagaaacagagatggcaaagacaatgggcaaagaagctgctctttttgttccatctggcactatggggaaccttgtatctgtacttgttcattgtgatgtcaggggaagtgaggttattcttggagacaattgccatatcaacatttttgagaatggaggcattgcaaccattgggggagtgcatccaagacaagtgaaaaataacgatgatggaaccatagacattgatttgattgaggctgctataagggacccaatgggggagctattctatccaaccaccaagcttatttgcttggaaaacactcatgcaaactctggtggcagatgcctctcagttgaatatacagacagagttggagagttagctaagaagcatggactgaagcttcacattgatggggcccgtatttttaacgcatcagttgcacttggtgttccagtggataggcttgtccaggcggctgattcagtttccgtttgcctatctaaaggtataggtgctccagttggatctgttattgttggttccaagaattttattgccaaggctagacgactccggaaaaccttaggaggtggaatgagacagattggcctcctttgtgccgctgcacttgttgccttgcaggaaaatgttgggaagctggaaagtgatcacaagaaagctagacttttggctgatggattaaaagaagttaaaagactgagagtggatgctggttctgtggagaccaatatggtatttattgacattgaagagggtacaaagactagggcagaaaagatatgcaagtacatggaagaacgtggtatccttgtgatgcaagagagttcatcaagaatgagagttgttctccaccaccaaatatcagcaagtgatgtgcaatatgcattgtcgtgctttcagcaagctctagctgtcaagggagtacaaaatgaaatgggcaactagtggaagaatttgaatatggcacgttgctgccatattagtcattaaaaaggaattccgtgttccatttgcctttgctcatttgattttcttaaatgtaccctaaagaacatgcaaagatttacatctttgatgttgttccctgttatgaattatgttgactatcatcgtcgttcccctgctaatttagctcattgtttactgtcccattattaggcatgttaggcatgtataggatattgtgcaacgttagcaatatatttttaatatatcttttatcaattaggtaaaaaaaaaaaaaaaaaa

SEQ ID NO: 7743 - protein, 360 aa, Glycine max
MVTRIVDLRSDTVTKPTEAMRAAMASAEVDDDVLGYDPTAFRLETEMAKTMGKEAALFVPSGTMGNLVSVLVHCDVRGSEVILGDNCHINIFENGGIATIGGVHPRQVKNNDDGTIDIDLIEAAIRDPMGELFYPTTKLICLENTHANSGGRCLSVEYTDRVGELAKKHGLKLHIDGARIFNASVALGVPVDRLVQAADSVSVCLSKGIGAPVGSVIVGSKNFIAKARRLRKTLGGGMRQIGLLCAAALVALQENVGKLESDHKKARLLADGLKEVKRLRVDAGSVETNMVFIDIEEGTKTRAEKICKYMEERGILVMQESSSRMRVVLHHQISASDVQYALSCFQQALAVKGVQNEMGN

SEQ ID NO: 7744 - DNA, 1077 bp, Brassica napus
  CDS (1)..(1077)
atggtgatgcgaactgtggatctacggtcagacaccgtgactagacctaccgatgccatgcgtgaagcaatgggaagcgcagaagtagacgatgacgtcctcggctacgacccaacggctcgacgtcttgaagaggagatagccaagatgatggggaaagaagcagctctcttcgtgccatctggtacaatggggaacctcatatgcgttatggttcactgcgacgtgagaggcagcgaggtgattcttggagacaactgtcacatccatgtctacgagaacggagggatatcaacgataggaggcgtgcatcccaagacaatcaagaatgaagaagacgggacaatggacttgggggctatagaagcagctattagagatcctaaaggaagcacgttttatccatcaacaaggttgatttgtttggagaacacacatgccaactctggtgggagatgtttgagtgcggaatacacagatagagttggagagattgccaagagacatggattaaagcttcatatcgatggagctcgcctttttaatgcttccattgcacttggagttccagtccataggcttgtacaggctgctgactctgtttcggtgtgtctctctaaaggtcttggagctccaataggatctgtagtcgttggttcacagagtttcatagaaaaggcgaaaacgttaagaaaaacattaggtggaggaatgagacaaataggcgtcctgtgcgcagccgctttggtcgcacttcaagagaatctcccaaagttacaatttgaccacaagaagacaaaattgttagctgaagggttgaatcaaatgaaagggattagagtgaacgttgcagccatggagaccaacatgatattcatggatatggaggatggatcaaaactgaccgctgaaaaactccgcaagagtctaacggagcatggcattctcgtcatccctgaaaactctacccgaatcagaatggttctacaccaccagataacaacaagtgatgtgcattacacattgtcttgcttacaacaagcagtgcagacgattcatgaaccatgccaaaactaa

SEQ ID NO: 7745 - protein, 358 aa, Brassica napus
MVMRTVDLRSDTVTRPTDAMREAMGSAEVDDDVLGYDPTARRLEEEIAKMMGKEAALFVPSGTMGNLICVMVHCDVRGSEVILGDNCHIHVYENGGISTIGGVHPKTIKNEEDGTMDLGAIEAAIRDPKGSTFYPSTRLICLENTHANSGGRCLSAEYTDRVGEIAKRHGLKLHIDGARLFNASIALGVPVHRLVQAADSVSVCLSKGLGAPIGSVVVGSQSFIEKAKTLRKTLGGGMRQIGVLCAAALVALQENLPKLQFDHKKTKLLAEGLNQMKGIRVNVAAMETNMIFMDMEDGSKLTAEKLRKSLTEHGILVIPENSTRIRMVLHHQITTSDVHYTLSCLQQAVQTIHEPCQN

SEQ ID NO: 7746 - DNA, 1035 bp, Dehalococcoides sp. BAV1
  CDS (1)..(1035): transl_table=11
atgaaaattatagaccttcggagtgatactgttacccgtcccacccccgaaatgaaaaaaaccatgtgcgatgcccctctgggagatgacgtgtttggggaagatcccactgtaaaccgtctggagaaaatggcagccgggaaaacgggtaaagaggccgctttgtttacccccagcggcaccatgagtaatctgctttcagtcctgtcccagacccgcccgggtgatgaaataatactggggagtgaagcccatatactctggtacgaagtaggcggggcatcagcagtgggaggtgtggttatgcgggctgtgccaaaccaacctgacggcactatctatctggcagatataaaagatgctatacgcggctcaaatcttcattttccgcctacccggcttatctgtctggaaaatacccacaaccgttgcgggggtgcggtgctaagcccgtcctacaccgccggggtggcaaatctggccagaatgcggggtattaaggtccatctggacggtgcccgtttgttcaatgcctgtgtggctctgggtgtttcagccaaggaactctgtcaggggatggatacagtcagtttttgcctttcaaaagggctgtcggcaccggcaggatcacttttgtgttctgaccaagaaaccataaaccgggccagaaaattccgcaagatgctgggcggaggcatgcgtcagacaggggtattggcagcctgcggtattgtggcgctggaaactatgatagagcgcttggctctggatcacgctatggctaaaactctggcggaaggtctgtttgatatagataaccatacgctggataaacaaattgtccaaaccaatattgtcattttcaacccgccgtttggtcttggcgctgacgaatttttagagcaggccaaacaggccgggttactctttaccatgggtagtcacggccgggtcagggctgtttgccaccatgacctgagcgaggcagatatacaaacagcccttaggcgtattgccgctatgaaaaaggcttaa

SEQ ID NO: 7747 - protein, 344 aa, Dehalococcoides sp. BAV1
MKIIDLRSDTVTRPTPEMKKTMCDAPLGDDVFGEDPTVNRLEKMAAGKTGKEAALFTPSGTMSNLLSVLSQTRPGDEIILGSEAHILWYEVGGASAVGGVVMRAVPNQPDGTIYLADIKDAIRGSNLHFPPTRLICLENTHNRCGGAVLSPSYTAGVANLARMRGIKVHLDGARLFNACVALGVSAKELCQGMDTVSFCLSKGLSAPAGSLLCSDQETINRARKFRKMLGGGMRQTGVLAACGIVALETMIERLALDHAMAKTLAEGLFDIDNHTLDKQIVQTNIVIFNPPFGLGADEFLEQAKQAGLLFTMGSHGRVRAVCHHDLSEADIQTALRRIAAMKKA

SEQ ID NO: 7748 - DNA, 1119 bp, Oryza sativa (japonica cultivar-group)
  CDS (1)..(1119)
atggtgaccaacgtggtggacctacggtcggacacggtgacgaagccctccgacgcgatgcgcgccgccatggccgccgcggacgtggacgacgacgtccttggcgccgacccgaccgcgcaccgcttcgagatggagatggcgaggatcacgggcaaggaggccgcgctgttcgtgccgtccggcaccatggccaacctcatctccgtcctcgtccactgcgacaccaggggcagcgaggtcatcctcggcgacaactcccacatccatatctacgagaacggcgggatctccaccatcggcggcgtccaccccaagaccgtcaggaacaaccccgatggaaccatggacatcgacaagattgtcgtcgccatcaggcatccggatggggcgctgtattatccgaccacaaggctgatctgcctggagaatacccatgcaaactgtggtggaaagtgtctgtctgctgaatatactgacgaggttggtgaagttgccaagagtcatggtctgaagcttcacatagatggagctcgcatttttaatgcttctgtggcccttggagttcctgttcatcgacttgtgaaagctgcggattcagtctcggtgtgcatatctaaagggttaggcgctcctgttggatcagttattgttggttcgacggccttcatagaaaaggctaaaattcttaggaagacactaggtggtggaatgaggcaagtgggaattctttgtgcggctgcctatgttgccgttcgcgacactgtaggaaaacttgctgatgaccatagaagggctaaagttttagcagatggtctgaagaaaatcaagcattttagagttgatacaacttcagtggagaccaatatggtattctttgatattgtggattcacgcatatcacctgacaaactgtgtcaagtccttgaacaacgcaatgtgcttgccatgccagcaggctcgaagagcatgaggcttgtcatccactaccaaatttctgatagtgatgttcagtatgcactgacatgcgtggagaaagctgctgaagaaatactgacaggcagtaagaagtttgaacatctgacaaacggtactaccaggaattcatacgggcactag

SEQ ID NO: 7749 - protein, 372 aa, Oryza sativa (japonica cultivar-group)
MVTNVVDLRSDTVTKPSDAMRAAMAAADVDDDVLGADPTAHRFEMEMARITGKEAALFVPSGTMANLISVLVHCDTRGSEVILGDNSHIHIYENGGISTIGGVHPKTVRNNPDGTMDIDKIVVAIRHPDGALYYPTTRLICLENTHANCGGKCLSAEYTDEVGEVAKSHGLKLHIDGARIFNASVALGVPVHRLVKAADSVSVCISKGLGAPVGSVIVGSTAFIEKAKILRKTLGGGMRQVGILCAAAYVAVRDTVGKLADDHRRAKVLADGLKKIKHFRVDTTSVETNMVFFDIVDSRISPDKLCQVLEQRNVLAMPAGSKSMRLVIHYQISDSDVQYALTCVEKAAEEILTGSKKFEHLTNGTTRNSYGH

SEQ ID NO: 7750 - DNA, 1035 bp, Arabidopsis thaliana
  CDS (1)..(1035)
atggtgatgagaagtgtggatctacgatcagataccgttactagaccgacagatgcgatgcgagaagcaatgtgtaacgcagaggtggatgatgacgtcctcggatatgacccaacggctagacgtcttgaagaggagatggctaagatgatggggaaagaggctgctctgttcgtgccatccgggacaatggggaatctgatcagcgtgatggttcactgcgacgtgagaggcagcgaggtgattcttggcgacaattgtcacatccatgtttacgagaatggagggatatcgactatcgggggagtgcatcctaagacagtcaagaatgaagaagacgggaccatggacttggaggccattgaagcagctattagagatcctaaaggaagcacgttttatccatcaacaaggttgatttgcttggagaacacacatgccaactctggtgggagatgtttgagcgtggaatacactgagaaagttggagagattgcgaagagacatggcgtgaagctccatatcgacggagcccgtcttttcaatgcttccattgcacttggagttccagtccataagcttgttaaggctgcggactccgttcaggtgtgtctctctaaaggtcttggagctccggtaggatctgtaatcgttggttcgcaaagcttcatagagaaggcgaaaacggttaggaaaacattaggtggaggaatgagacaaataggtgttctgtgcgcagccgctttggtcgcactccaagaaaacctcccaaagctacaacatgaccacaagaaggctaagttgttagctgccgtggagaccaacatgattttcatggatatggaggatggttcaagacttacggctgagaaactgcggaagaatctagaggagaatggcattctccttatccggggaaactcatcccggatcagaatagttatacaccaccagataacaacaagtgatgtgcattacacattgtcttgctttcagcaagcaatgctaacgatgcaggaaccaagccgaacctaa

SEQ ID NO: 7751 - protein, 344 aa, Arabidopsis thaliana
MVMRSVDLRSDTVTRPTDAMREAMCNAEVDDDVLGYDPTARRLEEEMAKMMGKEAALFVPSGTMGNLISVMVHCDVRGSEVILGDNCHIHVYENGGISTIGGVHPKTVKNEEDGTMDLEAIEAAIRDPKGSTFYPSTRLICLENTHANSGGRCLSVEYTEKVGEIAKRHGVKLHIDGARLFNASIALGVPVHKLVKAADSVQVCLSKGLGAPVGSVIVGSQSFIEKAKTVRKTLGGGMRQIGVLCAAALVALQENLPKLQHDHKKAKLLAAVETNMIFMDMEDGSRLTAEKLRKNLEENGILLIRGNSSRIRIVIHHQITTSDVHYTLSCFQQAMLTMQEPSRT

SEQ ID NO: 7752 - DNA, 1164 bp, Saccharomyces cerevisiae
  CDS (1)..(1164)
atgactgaattcgaattgcctccaaaatatatcaccgctgctaacgacttgcggtcagacacattcaccactccaactgcagagatgatggaggccgctttagaggcctctatcggtgacgctgtctacggtgaagatgttgacaccgttaggctcgaacagaccgttgcccgcatggctggcaaagaagcaggtttgttctgtgtctctgggactttgtccaaccagattgccatcagaactcacttgatgcaacctccatactctattctatgtgattacagggctcacgtttacactcacgaagccgctggactggcgatcttgtctcaagcgatggtggttcctgtggttccttccaacggtgactacttgaccttggaagacatcaagtcacactacgtcccagacgacggtgatattcacggtgcccccaccagattgatttctctggaaaacactttacacggtattgtttatccattggaagaactggtccgcatcaaagcttggtgtatggaaaatggtctcaaactacattgtgacggtgccagaatctggaatgccgctgcacaatctggcgtgccattaaagcaatatggggaaatcttcgactccatctccatctgtctatccaagtctatgggtgctcctattgggtccgtcttggttgggaaccttaagtttgtcaagaaggccacccatttcagaaaacaacaaggtggtggtattagacaatctggtatgatggctagaatggctcttgtaaacatcaacaacgattggaagtcccaattgctgtactcgcactctttggctcatgaattagccgaatattgtgaggcaaagggcatcccgctagagtctccagcagacaccaactttgtctttattaacctgaaggccgctagaatggacccagatgtccttgttaagaagggtttgaagtacaacgttaagctaatgggtggtagagtctcgttccactatcaagtcaccagagatactttggaaaaagtcaaattggccatctccgaggccttcgactatgctaaagaacatcctttcgactgtaacggacctacccagatttaccgtagtgaatccaccgaggtcgacgttgatggcaacgctatccgcgaaataaaaacctacaaatactga

SEQ ID NO: 7753 - protein, 387 aa, Saccharomyces cerevisiae
MTEFELPPKYITAANDLRSDTFTTPTAEMMEAALEASIGDAVYGEDVDTVRLEQTVARMAGKEAGLFCVSGTLSNQIAIRTHLMQPPYSILCDYRAHVYTHEAAGLAILSQAMVVPVVPSNGDYLTLEDIKSHYVPDDGDIHGAPTRLISLENTLHGIVYPLEELVRIKAWCMENGLKLHCDGARIWNAAAQSGVPLKQYGEIFDSISICLSKSMGAPIGSVLVGNLKFVKKATHFRKQQGGGIRQSGMMARMALVNINNDWKSQLLYSHSLAHELAEYCEAKGIPLESPADTNFVFINLKAARMDPDVLVKKGLKYNVKLMGGRVSFHYQVTRDTLEKVKLAISEAFDYAKEHPFDCNGPTQIYRSESTEVDVDGNAIREIKTYKY

SEQ ID NO: 7754 - DNA, 1032 bp, Thermotoga maritima MSB8
  CDS (1)..(1032): transl_table=11
atgatcgatctcaggtccgacaccgttacaaaaccaacagaagagatgagaaaagccatggcacaggctgaggtgggagacgatgtgtacggagaagatccaaccatcaacgaactcgaaaggctcgccgcagagacctttggaaaggaagcggctctctttgtaccctccggcaccatgggaaatcaagtgagcataatggctcacacccagaggggcgatgaagtgatactggaggcagacagccacatcttctggtacgaggtcggagccatggcggttctctccggagtcatgccccatcctgtacctggaaaaaatggagccatggaccccgatgatgtgaggaaggccataagacccagaaacatacacttccccagaacttcgctcattgccatcgaaaacacacacaaccgttccggtggaagagtggtcccgcttgaaaacataaaagagatttgcacgatagccaaagaacacggcataaacgttcacatagatggtgcgaggatcttcaacgcctcaatcgcttcaggtgttcccgtgaaggagtacgccgggtacgccgattccgtgatgttctgtctttcaaaaggtctctgcgcacccgtcggttcggtggttgtaggagacagggacttcatagaaagagcgagaaaggcgagaaagatgctcggtggagggatgagacaggcaggtgttctcgctgccgctggaataatcgccttgacaaagatggtagatcgattgaaagaagatcatgaaaacgccagatttctcgccctgaagttgaaagaaatagggtactccgtgaatcccgaagatgtgaaaaccaacatggtgattctgaggaccgacaacctgaaggtgaacgcgcacgggttcatagaagcgctcagaaacagcggggtgctcgcgaacgccgtatccgacacggagatcagactggtaacccacaaagacgtttcaagaaacgacatagaagaggctctgaacatcttcgaaaaactcttcagaaaattctcctga

SEQ ID NO: 7755 - protein, 343 aa, Thermotoga maritima MSB8
MIDLRSDTVTKPTEEMRKAMAQAEVGDDVYGEDPTINELERLAAETFGKEAALFVPSGTMGNQVSIMAHTQRGDEVILEADSHIFWYEVGAMAVLSGVMPHPVPGKNGAMDPDDVRKAIRPRNIHFPRTSLIAIENTHNRSGGRVVPLENIKEICTIAKEHGINVHIDGARIFNASIASGVPVKEYAGYADSVMFCLSKGLCAPVGSVVVGDRDFIERARKARKMLGGGMRQAGVLAAAGIIALTKMVDRLKEDHENARFLALKLKEIGYSVNPEDVKTNMVILRTDNLKVNAHGFIEALRNSGVLANAVSDTEIRLVTHKDVSRNDIEEALNIFEKLFRKFS

SEQ ID NO: 7756 - DNA, 1005 bp, Pseudomonas aeruginosa PAO1
  CDS (1)..(1005): transl_table=11
gtgcctgtcatcgacctgcgcagcgacaccgtcacccagcccaccgccggcatgcgcgaagccatggccgcggccgaactgggcgacgacgtctatggcgaggaccccacggtcaaccgcctggaggccgaactggcggcgcgcctgggcttcgccgcggcgctcttcgtaccgaccgggaccatgagcaacctgctcggattgatggcccactgcgagcgcggcgacgaatacatcgtcggccagcaggcgcatacctacaaatacgagggcggcggtgccgcggtgctgggctcgatccagccgcagccgatcgacggcgaggccgacggatcgctccacctggacaaggtcgcggcggcgatcaaggccgacgatttccacttcgccaggacccgcctgctggccctggaaaacaccatgcagggcaaggtgctgccgctcgactacctggccgcggcgcgcgccttcactcgcgcgcgtggcctggccctgcacctggatggcgcgcgcctgtacaacgcggcggtgaagctgggcgtagacgccagcgagatcacccgacacttcgactcggtgtcggtgtgcctgtccaagggcctcggtgcgccggtgggctcggtgctttgcggcagcgtcgaactgatcggcaaggcccgccgctggcgcaaaatggtcggcggcgggatgcgccaggccggcctgttggcggctgccggactgtacgccctcgaccaccaggtggcacgcctggccgacgaccacgccaacgccgcgcgcctgggcgacgggctgcgcgaactgggctatgcggtggagccggtgcagaccaacatggtctacgtcgatgtcggcgagcgggcggtcgcgctgcgcgacttcctcgccgagcgcggggtgcggatcagcgcggcggcgcgtttgcgcctggtcacccacctggacgtttccgccgagtccataggacaagtactggatgccttcgcggcctttcgtcgctcataa

SEQ ID NO: 7757 - protein, 334 aa, Pseudomonas aeruginosa PAO1
MPVIDLRSDTVTQPTAGMREAMAAAELGDDVYGEDPTVNRLEAELAARLGFAAALFVPTGTMSNLLGLMAHCERGDEYIVGQQAHTYKYEGGGAAVLGSIQPQPIDGEADGSLHLDKVAAAIKADDFHFARTRLLALENTMQGKVLPLDYLAAARAFTRARGLALHLDGARLYNAAVKLGVDASEITRHFDSVSVCLSKGLGAPVGSVLCGSVELIGKARRWRKMVGGGMRQAGLLAAAGLYALDHQVARLADDHANAARLGDGLRELGYAVEPVQTNMVYVDVGERAVALRDFLAERGVRISAAARLRLVTHLDVSAESIGQVLDAFAAFRRS

SEQ ID NO: 7758 - DNA, 1074 bp, Halobacterium sp. NRC-1
  CDS (1)..(1074): transl_table=11
atgtttcggaacgtaactggcaggatgacttttccccctgggggtggatgtcccgatatgatcgatcttcgcagcgacacggtcgccacgccgaccgaggcgatgcgggaggcggcggcccaggcgccggtcgagcacggcgagcacggcgacgacccggctgtggcagcggtggaggcgacggcggcggacgccgtgggcatggcggcggccgtgttcgtgccgagccggacgatggccaaccagatcggggcgcaggtacacaccgcccgcgggcagagcgtgctcgtcgagcgggccagccacagctacaggcgggggagtggcgggctggcacaacacgctggggtgcaggcgcgcgcgttcgacggcggcgaaaccggctgtccgaccgcggagcaggtggccgccgagatcacggcggggggtgggcaccggccggaggtcgggctggcgtgcgtggagatcgcacacggggcgaacggcggggtcgtggcgcccgtcgacgcgttcgcggctgccgtggagaccgcccacgagcacgacgtgccggtgcacgtcgacgggacgcgggtgttcagcgctgcgaccgcgctgggcgtcgatgcggcgacgctgctgtcgccggtggattcggtggcggtgtgtctgtcgacggggctgggcgcacccatgggggcagtgctggcgggaagcgagtcgttcgtggcgtcggcccgacgcgtgcaggagatgtacgggggtgggatgcagcaggcgggcatggtcgcggcggcgggcgtgtgcgccctggagaaccgccaccgagtccacgaggaccacgagaacgcgcgtcggttggccgaggacctcgacgcgctcccgggggtgacggcggccgaaccggacacgaacatcgtgctcgcggacacccgggacgcggacgtgaccgccgcggcgttcctggcgggctgtgaggaagagggcgtgctggggacggcggacggcgagtacacggtccggttctgcacgcaccgcgacatcgggggcgcggacatcgcggcggtggtgtcggcggcgggggaggtcgtctaa

SEQ ID NO: 7759 - protein, 357 aa, Halobacterium sp. NRC-1
MFRNVTGRMTFPPGGGCPDMIDLRSDTVATPTEAMREAAAQAPVEHGEHGDDPAVAAVEATAADAVGMAAAVFVPSRTMANQIGAQVHTARGQSVLVERASHSYRRGSGGLAQHAGVQARAFDGGETGCPTAEQVAAEITAGGGHRPEVGLACVEIAHGANGGVVAPVDAFAAAVETAHEHDVPVHVDGTRVFSAATALGVDAATLLSPVDSVAVCLSTGLGAPMGAVLAGSESFVASARRVQEMYGGGMQQAGMVAAAGVCALENRHRVHEDHENARRLAEDLDALPGVTAAEPDTNIVLADTRDADVTAAAFLAGCEEEGVLGTADGEYTVRFCTHRDIGGADIAAVVSAAGEVV

SEQ ID NO: 7760 - DNA, 1002 bp, Escherichia coli O157:H7 EDL933
  CDS (1)..(1002): transl_table=11
  misc_feature (196)..(196): s is g or c
atgattgatttacgcagtgataccgtaacccgaccgagccgcgccatgctcgaagcgatgatggccgccccggttggggacgacgtttacggagacgaccctaccgttaatgctctgcaggactatgcagcagagctttccggtaaagaagccgccatttttctgcctaccggcactcaggccaacctggtcgctstgctcagtcactgcgaacgcggcgaagagtatattgtcggtcaggccgcgcataactatctgtttgaagccggtggcgcggcggtgctgggcagtattcaaccgcaacccatcgacgcggctgccgacggcacgctaccgctggataaagtggcgatgaaaatcaaacccgacgatatccatttcgcccgcaccaaattactcagtctggaaaacacccacaacggcaaagtgttgccgcgtgaataccttaaagatgcatgggaatttacccgcgagcgcaatctggcgctgcatgttgacggtgcgcgcatctttaatgccgtggtggcttacggcagcgaactgaaagagctcacgcaatattgtgattcgttcaccatttgcctgtcgaaaggtcttgggacgccagtcggttcattactcgtcggtaatcgtgattacattaaacgtgccattcgctggcggaaaatgacaggtggcgggatgcgccagtccggcattctggctgccgccgggatgtatgcgctgaaaaataacgtcgcacggttgcaggaagatcacgacaacgccgcctggatggcggagcaactgcgtgaagcaggcgcggatgtgatgcgtcaggacactaatatgctgtttgttcgcgtcggcgaagaaaatgctgccgcgttaggcgaatacatgaaagcgagaaacgtactgattaacgcctcgccgattgtccgcctggtgacccatcttgacgtctcgcgcgaacaactggcagaagtcgccgcccactggcgcgcattcctggcgcgttaa

SEQ ID NO: 7761 - protein, 333 aa, Escherichia coli O157:H7 EDL933
  misc_feature (66)..(66): The Xaa at location 66 stands for Leu, or Val.
MIDLRSDTVTRPSRAMLEAMMAAPVGDDVYGDDPTVNALQDYAAELSGKEAAIFLPTGTQANLVAXLSHCERGEEYIVGQAAHNYLFEAGGAAVLGSIQPQPIDAAADGTLPLDKVAMKIKPDDIHFARTKLLSLENTHNGKVLPREYLKDAWEFTRERNLALHVDGARIFNAVVAYGSELKELTQYCDSFTICLSKGLGTPVGSLLVGNRDYIKRAIRWRKMTGGGMRQSGILAAAGMYALKNNVARLQEDHDNAAWMAEQLREAGADVMRQDTNMLFVRVGEENAAALGEYMKARNVLINASPIVRLVTHLDVSREQLAEVAAHWRAFLAR

SEQ ID NO: 7762 - DNA, 1029 bp, Deinococcus radiodurans R1
  CDS (1)..(1029): transl_table=11
atggtgtgcgccatgacccgcccgccgctgatcgccgacctgcgctccgataccgtcaccaagcccactcccgccatgcgtgaggcgatggcgaccgccgaggtgggcgacgacgtgtacggcgaagaccccaacgtcaacgccctgcaaaacgaactcgcgcacctgaccggctttgaggcggggctgttcatgccgtcgggcagcatgacgaaccaggtggcgattgccgtgcacacccgccggggcgaggaagtcatctgcgccgagggcagccacatctacgagtgggaactggggatgatggcggccttttccggcgtggtcccgcgcttcgtgcccgcgccgctgggcgtgccgagtcccgaggacgtgcggctggcggtccgccgcagcgtccaccagtcacccaccggcctgatcagcctggaaaacacccacaacaaggccgggggcacggtgattccgctggcggtgctgcggcagatgcgggcagtggccgacgccgagggactgcctctgcacctcgacggagcgcgggtcttcaacgccgccgtgaagctgggcgtggacgtgcgcgaaatcacgcgctgcttcgacaccgtgagcgtgtgcctgagcaaggggctcggcgccccggtgggcagcgtgctgctcggctcggcgcaggcgattcggcaggcgcaccgctaccgcaagatgctcggcggcgggatgcggcaggccggaattctggcggcggcggcgcgggtggccctgcgcgaaggtccggcgcgactggccgacgaccacttgcggacccggcgattggcccgcgccctggtcgaagcgggctacgacgtggacctcgccgccgtgcagaccaacatcatctatgcccggctgcccgaggccgagcgccgcgccgctgcctgggccgaacagggcgtgctcgccagtgcgctggggcacgactcggtgcgcttcgtgctgcaccatcaggtggacgacgacgcgctcgaccaggccattcgcgtgctgaccgcctga

SEQ ID NO: 7763 - protein, 342 aa, Deinococcus radiodurans R1
MVCAMTRPPLIADLRSDTVTKPTPAMREAMATAEVGDDVYGEDPNVNALQNELAHLTGFEAGLFMPSGSMTNQVAIAVHTRRGEEVICAEGSHIYEWELGMMAAFSGVVPRFVPAPLGVPSPEDVRLAVRRSVHQSPTGLISLENTHNKAGGTVIPLAVLRQMRAVADAEGLPLHLDGARVFNAAVKLGVDVREITRCFDTVSVCLSKGLGAPVGSVLLGSAQAIRQAHRYRKMLGGGMRQAGILAAAARVALREGPARLADDHLRTRRLARALVEAGYDVDLAAVQTNIIYARLPEAERRAAAWAEQGVLASALGHDSVRFVLHHQVDDDALDQAIRVLTA

SEQ ID NO: 7764 - DNA, 1002 bp, Salmonella typhimurium LT2
  CDS (1)..(1002): transl_table=11
atgattgatttacgcagtgataccgttacccgaccgggccgcgccatgctcgaggcgatgatgaccgccccggtcggggacgacgtatacggcgatgaccctactgttaacgcccttcagcgctacgccgccgacctttccggtaaagaagcggcgctttttttacccaccggcacccaggccaatctggtcgcgctgcttagccattgtgaacgcggcgaagagtatatcgtcggtcagggcgcgcataattatctctatgaagctggcggcgcggcggtgctcggcagcattcagccgcagcccatcgacgccgccgcggacggtacgctgccgctggagaacgtggcggcgaagattaaagcggatgacatccacttcgcgcgcacgcgcttgctcagtctggaaaatacgcataacgggaaagtgctgccgcgcgcgtatctgaaagacgcctggacatttacccgcgaacgtggactggcgctgcacgttgacggcgcccgaatttttaacgcggtggttgcctacggctgtgagttaaaagagattacgcagtattgcgactcttttaccatctgcctgtcaaaaggtctcggaacgccggtcggttcactgctggtcggcaaccgcgattacattaaacgcgcgacgcgctggcgtaaaatggtcggcggcggaatgcgtcaggccgggattctggcagcggccggactgtatgcgctgaagcataacgtggcgcgtctgcaagaggatcatgataacgccgcctggctggcgcagcagcttcgggaagcgggcgcggaggtcatacgccacgaaacgaatatgctgtttgttcgcgttggcgaagcacaggccgccgcgcttggcgactatttgcgggaacggaatatcctgattaacgccgcgccgattgtgcgtctggtgacgcatctggatgtctctcgcgaacagcttaccgacgtcgtcgcccactggcgcgcctttttagcccgctaa

SEQ ID NO: 7765 - protein, 333 aa, Salmonella typhimurium LT2
MIDLRSDTVTRPGRAMLEAMMTAPVGDDVYGDDPTVNALQRYAADLSGKEAALFLPTGTQANLVALLSHCERGEEYIVGQGAHNYLYEAGGAAVLGSIQPQPIDAAADGTLPLENVAAKIKADDIHFARTRLLSLENTHNGKVLPRAYLKDAWTFTRERGLALHVDGARIFNAVVAYGCELKEITQYCDSFTICLSKGLGTPVGSLLVGNRDYIKRATRWRKMVGGGMRQAGILAAAGLYALKHNVARLQEDHDNAAWLAQQLREAGAEVIRHETNMLFVRVGEAQAAALGDYLRERNILINAAPIVRLVTHLDVSREQLTDVVAHWRAFLAR

SEQ ID NO: 7766 - DNA, 1068 bp, Arabidopsis thaliana
  CDS (1)..(1068)
atggtgacgccaactacaattagaaccgtcgatctccgctccgacacggtgactaaaccaacagagtcaatgcgttcagcaatggcaaacgcggaagtagacgacgacgttttgggaaacgatccaacggctctgcgtttggagaaagaggtggctgagatcgctggaaaagaggcggcgatgtttgttccgtcagggacaatggggaatctgataagcgtgttggtccattgtgatgagagagggagtgaagtgattcttggagacgactctcacattcatatatatgaaaacggcggcgtttcaagcctcggtggtgtgcatccgaggacggtgaagaatgaggaagacggtacgatggagattggtgctattgaagctgccgtgaggagtcccaaaggagatctccatcatccggttactaagcttatatgtcttgagaatactcaagcaaattgtggaggtagatgccttcctatagaatatatagacaaagtcggagaattagccaagaaacatggtttgaagcttcacattgacggagctaggattttcaacgcttctgtggcacttggagttcccgtgaagaggattgttcaagcagctgattctgtctcgatctgtttgtcgaaaggtattggtgcaccggtcggttcggtaatcgtgggaagcaagaagttcattactaaagcaaggtggttaaggaaaacattaggcggaggaatgagacagatcggcgtgctctgcgccgccgcattggtggctctccatgaaaacgtcgccaagctcgaagatgaccataagaaagccagggttttggcagaaggactgaaccggattgaacggttaagagtgaacgttgcagctgtggaaaccaacatcatatacgtagacataccagaagatccaaaatttggagcagaagaggcatgtaagagcttggaagatgtcggtgtgcttgtcataccccaagctacattcagaatcaggattgttctacaccaccaaatctcagacgtcgacgtggaatatgtactctcttgctttgagaaaatatttcactcgtga

SEQ ID NO: 7767 - protein, 355 aa, Arabidopsis thaliana
MVTPTTIRTVDLRSDTVTKPTESMRSAMANAEVDDDVLGNDPTALRLEKEVAEIAGKEAAMFVPSGTMGNLISVLVHCDERGSEVILGDDSHIHIYENGGVSSLGGVHPRTVKNEEDGTMEIGAIEAAVRSPKGDLHHPVTKLICLENTQANCGGRCLPIEYIDKVGELAKKHGLKLHIDGARIFNASVALGVPVKRIVQAADSVSICLSKGIGAPVGSVIVGSKKFITKARWLRKTLGGGMRQIGVLCAAALVALHENVAKLEDDHKKARVLAEGLNRIERLRVNVAAVETNIIYVDIPEDPKFGAEEACKSLEDVGVLVIPQATFRIRIVLHHQISDVDVEYVLSCFEKIFHS

SEQ ID NO: 7768 - DNA, 1041 bp, Thermoanaerobacter tengcongensis MB4
  CDS (1)..(1041): transl_table=11
atgaaatatattgacctaagaagcgacacagtaacccagcccactcctgagatgagagaagccatgtacaaagctgaagtgggcgatgacgtatacggagaagaccctactgtgagaaaacttgaagaaatggcagcagaaatgctaggaaaagaagcagcaatgcttgtgaccagcggaactcaagggaaccaagtctcaataatgactcacactcatccaggagaagaaatcatactagaggaaaattcccacataataacctatgaagttggagggataggctatctcgctggagtacaggcaaaaactttgaagggcaataaaggagttttaaatccggaagatgtggaaaaagctataaggcctaaaaacatacactttcctgagacaagcctaatctgccttgaaaacacacacaatagagcaggtggcactgtgactccaattgaagtcatgaaaaagatatatgaaatcgcacaaaagcatggaatacctgtacatctggacggcgccagaatatttaacgccgcgacatatctcaaagtagatgtaaaagaaattgcgaaatatgctgacagcgtgatgttctgcctttcaaaagggttatgtgcccctatcgggtctatcgtcgtcggaacaaaagaatttattgaaagggcgaggaaataccgcaagatgctgggaggaggaatgaggcaggcaggtttcatcgctgctgctggcatcgtagcccttgaaaaaatgacaaaaaggcttcaagaagaccatgacaatgcaaggcttctggccgaaggtctgaaaaacatccccgggatagaccttgatatggaaacagtgcaaactaacatagtaatgactgatatttctggcactggaatgacaggaagggaattttctctaaagttaaaagaacacggcgttttagtaaatgggggagatgacttttcagtaagatttgtgactcactattacataactaaagaagacgtaaagaaggccttgagtgcaattgaaaaagtggtaagagaaaagcattaa

SEQ ID NO: 7769 - protein, 346 aa, Thermoanaerobacter tengcongensis MB4
MKYIDLRSDTVTQPTPEMREAMYKAEVGDDVYGEDPTVRKLEEMAAEMLGKEAAMLVTSGTQGNQVSIMTHTHPGEEIILEENSHIITYEVGGIGYLAGVQAKTLKGNKGVLNPEDVEKAIRPKNIHFPETSLICLENTHNRAGGTVTPIEVMKKIYEIAQKHGIPVHLDGARIFNAATYLKVDVKEIAKYADSVMFCLSKGLCAPIGSIVVGTKEFIERARKYRKMLGGGMRQAGFIAAAGIVALEKMTKRLQEDHDNARLLAEGLKNIPGIDLDMETVQTNIVMTDISGTGMTGREFSLKLKEHGVLVNGGDDFSVRFVTHYYITKEDVKKALSAIEKVVREKH

SEQ ID NO: 7770 - DNA, 1152 bp, Drosophila melanogaster
  CDS (1)..(1152)
atgaccacccattccgttgttgacctgcgctcggacaccgtcagccagccgacggacaagatgcgggcccggatggccaccgccgtggtcggggatgacgtttatggcgaggatcccaccgtcaacgaactggaggcgcgaacagcggccattttcggcaaggaggcgggcctctttgtgcccagcggcaccatgggaaatctactggcaattatggttcactgccatcgtcgtggcacggaggccctggtcggcgatttatcgcacatctttctgtacgaacaaggtggcgcctcgcatttggccggagtccaattagccactctgaagaacgagcaggatggcacctttagtctgcaggatctgcgccgcaggatacgccacgaagactgccacgagcccatcacctcgctggtggtggtggagcagacccacaatatctgcggtggcaaagtggtgcctctggccttcttggatgagctagctgctctggtccgacagccgggcgtgggcactgggaacgcccgtatcgctctacacatggacggagcgagggtctttaatgcggccaccgccttgggcgtgggagtggagcgcatctgccgcgatttcgattcggtatctatctgcctcagcaagggcttatcggctcccgtgggatccgtgttagtcggctccaaggccttcatttcggaagcccatcgactgcgcaaagctttgggaggcggaatgcggcaggtgggagtgttagcagcagctggactggtagctttggatgaagtggtaccacttctgagcaaagatcacgagcggaccaataaaattgccaacgctatatatgaactgaaaagtcccaacattaccgtacacgtgtcgtctgtccagagcaatatccttctggtagagataacccaacccaaactgacggccagtgagttctccacccggttgagcatcgttgatgctggtgaagtggaagccggagtgaaggacaaaaacggagccggaatcgtggtgaaggctagtgcccgggattgggcatttgcgagacttgtgctctaccatcaggtggacgatgagcaagtggacctggccatcaggaagctgaagtacgtcatcggccagtacgacaagcaatttcccaggacctag

SEQ ID NO: 7771 - protein, 383 aa, Drosophila melanogaster
MTTHSVVDLRSDTVSQPTDKMRARMATAVVGDDVYGEDPTVNELEARTAAIFGKEAGLFVPSGTMGNLLAIMVHCHRRGTEALVGDLSHIFLYEQGGASHLAGVQLATLKNEQDGTFSLQDLRRRIRHEDCHEPITSLVVVEQTHNICGGKVVPLAFLDELAALVRQPGVGTGNARIALHMDGARVFNAATALGVGVERICRDFDSVSICLSKGLSAPVGSVLVGSKAFISEAHRLRKALGGGMRQVGVLAAAGLVALDEVVPLLSKDHERTNKIANAIYELKSPNITVHVSSVQSNILLVEITQPKLTASEFSTRLSIVDAGEVEAGVKDKNGAGIVVKASARDWAFARLVLYHQVDDEQVDLAIRKLKYVIGQYDKQFPRT

SEQ ID NO: 7772 - DNA, 1020 bp, Yersinia pestis KIM
  CDS (1)..(1020): transl_table=11
atgctgatcgatttacgcagtgacacagtaacgcaaccctgtgccgccatgcgcgccgcgatggcgaatgccgaggtcggtgatgatgtgtatggcgatgacccaaccgtcaatgcgcttgaagccaaagccgccagtttatccggtaaagaagccgcgctgtttctgccaacaggcactcaggcaaatttggtggcgctattgacccattgtcagcgtggtgaagagtatattgtcggccaaaaagcccataactatttgtatgaagccgggggtgccgccgttttgggcagtatccaaccacaacctattgatgccaacgatgacggcacactaccactggataacgttctggccgccatcaaacccgatgacattcactttgcccccacccggctgttaagtttggaaaatactcacaatggcaaagtcttgcctttgcgttatttacagcaagcctgggcgttgacccgcgaaaaaaaactggcgttacatattgatggcgcacgtgtttttaatgctgcggtggcgctgaatgtgccactgaacgatattagccagtattgcgataccctgacaatttgtctgtcaaaaggattagggacgcctgttggttccctgctctgtggcagcgcagaattcattcatcgcgcccggcgctggcgaaaaatgaccggtggtggtatgcgtcaggccggtattttagcggcagccgggttgtatgcgctgcaacataatgtggcgagactcaaagatgatcacgataacgcccagtggttggaacagcaattacgtgacttaggcattgagatagccgcccccggcgcgcaaacaaacgtgctgtacattacgcaatctgccgaatcagcgttgaaacttggcccctggatgcgtgaacgtggtgtgctgatcagtgccgggccgctcacccgcctgattactcaccttaacgtgagccgaaaagatctggaaaaagtcgtcgcgctgtggcgtgaatttattgccgagcaacattcatga

SEQ ID NO: 7773 - protein, 339 aa, Yersinia pestis KIM
MLIDLRSDTVTQPCAAMRAAMANAEVGDDVYGDDPTVNALEAKAASLSGKEAALFLPTGTQANLVALLTHCQRGEEYIVGQKAHNYLYEAGGAAVLGSIQPQPIDANDDGTLPLDNVLAAIKPDDIHFAPTRLLSLENTHNGKVLPLRYLQQAWALTREKKLALHIDGARVFNAAVALNVPLNDISQYCDTLTICLSKGLGTPVGSLLCGSAEFIHRARRWRKMTGGGMRQAGILAAAGLYALQHNVARLKDDHDNAQWLEQQLRDLGIEIAAPGAQTNVLYITQSAESALKLGPWMRERGVLISAGPLTRLITHLNVSRKDLEKVVALWREFIAEQHS

SEQ ID NO: 7774 - DNA, 1002 bp, Shigella flexneri 2a str. 301
  CDS (1)..(1002): transl_table=11
atgattgatttacgcagtgataccgttacccgaccgagccgcgccatgctcgaagcgatgatggccgccccggttggggacgacgtttacggagacgaccctaccgttaatgctctgcaggactatgcagcagagctttccggtaaagaagccgccatttttctgcctaccggcactcaggccaacctggtcgctctgctcagtcactgcgaacgtggcgaagagtatattgtcggtcaggccgcgcataactatctgtttgaagccggtggcgcagcggtgctgggcagtattcagccgcaacccatcgacgcggctgccgacggcacgctaccgctggataaagtggcgatgaaaatcaaacccgacgatatccatttcgcccgcaccaaattactcagtctggaaaacacccacaacggcaaagtgctgccgcgtgaatacctgaaagaagcatgggaatttacccgcgagcgcaatctggcgctgcatgttgacggtgcgcgcatctttaatgccgtggtggcttacggctgcgaactgaaagagatcacgcaatattgtgattcgttcaccatttgcctgtcgaaaggtcttgggacgccagtcggttcattactcgtcggtaatcgtgattacattaaacgtgccatccgctggcggaaaatggccggtggcgggatgcgtcagtccgggattctggctgccgccgggatgtatgccctggaaaataacgtcgcacggttgcaggaagatcacgacaacgccgcctggatggcggagcaactgcgtgaagcaggcgcggatgtgatgcgtcaggacactaatatgctgtttgttcgcgtcggggaagaaaatgctgccgcgttaggcgaatacatgaaagcgagaaacgtgctgattaacgcctcgccgattgtccgcctggtgacgcatcttgacgtctcgcgcgaacaactggcggaagtcgccgcccactggcgcgcattcctggcgcgttaa

SEQ ID NO: 7775 - protein, 333 aa, Shigella flexneri 2a str. 301
MIDLRSDTVTRPSRAMLEAMMAAPVGDDVYGDDPTVNALQDYAAELSGKEAAIFLPTGTQANLVALLSHCERGEEYIVGQAAHNYLFEAGGAAVLGSIQPQPIDAAADGTLPLDKVAMKIKPDDIHFARTKLLSLENTHNGKVLPREYLKEAWEFTRERNLALHVDGARIFNAVVAYGCELKEITQYCDSFTICLSKGLGTPVGSLLVGNRDYIKRAIRWRKMAGGGMRQSGILAAAGMYALENNVARLQEDHDNAAWMAEQLREAGADVMRQDTNMLFVRVGEENAAALGEYMKARNVLINASPIVRLVTHLDVSREQLAEVAAHWRAFLAR

SEQ ID NO: 7776 - DNA, 1014 bp, Shewanella oneidensis MR-1
  CDS (1)..(1014): transl_table=11
atgatcgatttgcgcagtgataccgtgacccagccaactgaggcgatgcgtttagccatgtctagggcagaagtgggcgacgatgtttatggtgatgatccgaccgtgaacagtttgcaggacatggccgccgagatgtttggttttgagagcgctctttttacggcatcgggcactcaagccaatttgctcgcactgatggcgcattgcgagcgtggggatgaatatttatgtggtcagcaggcccataactacaaatttgaaggtggtggcgcggcggtattgggtagcattcaaccacaaccgttgacgaatcaactggatggcactattgcccttactgatgttgaagcagccatcaagcccgatgatattcattttgcccgcacacgcttactgagtttagaaaatactattggggggaaagtgttgtcgcaggcctatcttgccaatgcgcaggcgttggcttttcaacgtggtttaaaaattcatttagatggtgcaagggtggccaatgctgcagtagcacaaggtattgctattgctgatatagcagcgcattttgattcagtttccatttgtttatcaaaaggattatgtgcgccagtagggtcgttactcttaggggatgaacgcctgattaaaaaagcgacacgttggcgaaaaatgcttggtggcggtatgcgtcaagcgggtattttagcggcggctggcaagttagccttaactgaacaagttgaaagacttgcagaagatcatgaaaatgcggcttatctggctcagcagttaagccagttggatgagtttgacattgacttagcctcagttcaaaccaatatggtgtttgcaacattggcatcccatgtcgatgaacaggccttagtgaaacgctgtcgtggcgagggcattctgattagtcctggacgtaccttacgttttgttacccataaagatgtctcgcgtcaggatattgataaggtattgcaggtatttaaattacatctgcaggcgtaa

SEQ ID NO: 7777 - protein, 337 aa, Shewanella oneidensis MR-1
MIDLRSDTVTQPTEAMRLAMSRAEVGDDVYGDDPTVNSLQDMAAEMFGFESALFTASGTQANLLALMAHCERGDEYLCGQQAHNYKFEGGGAAVLGSIQPQPLTNQLDGTIALTDVEAAIKPDDIHFARTRLLSLENTIGGKVLSQAYLANAQALAFQRGLKIHLDGARVANAAVAQGIAIADIAAHFDSVSICLSKGLCAPVGSLLLGDERLIKKATRWRKMLGGGMRQAGILAAAGKLALTEQVERLAEDHENAAYLAQQLSQLDEFDIDLASVQTNMVFATLASHVDEQALVKRCRGEGILISPGRTLRFVTHKDVSRQDIDKVLQVFKLHLQA

SEQ ID NO: 7778 - DNA, 1044 bp, Bradyrhizobium japonicum USDA 110
  CDS (1)..(1044): transl_table=11
atggtcgcgcaagagagaggccgcgacggcgtcgtcgatctgcgcagcgacaccgtcacgctgccgacggccgcgatgctggagcgcatgcagcgggccccgctcggcgacgacggccgcgagggcgacccgaccgtccgcgcgctcgaagcgcggggcgccgcgttgaccggcaaggaagctgccctgttcgtgccgagcggcacgatgggcaatctcctggcgatgctcgcccatgccgagcgcggcggagaggtcttcgccgacgctggtgcgcacctgctcaactccgagctcggcagcgtcgtgacgatcgcggggctggtgcccaagcccatgccgagccgtcgcggtgcaatggacgaagcggcgcttgcagacgcgatccgcggctcggaacgtcccggcctgatcgcaatggagactgcgcataacggcgccggcggcgccgtgctgcccccgccgcacatgatgcgaattcacgcgctcggacagagcaacgggatccccgtgcatctggacggcgcccgcctgttcaatgcctcggtcgcgctcggcgtgccggcggcacggatcgccgagcatgccgacagcgtgatggtctgcctgtccaagggcctgagcgcgccggtcggcagcctgctgtgcggcggcgcggcgttcgtcgcacgggcgcgcacgttgcggaaactcgtcggcggcaccatgcgccagtccggtgtcgtcgcagccgcgggcctcgtcgcgctggagacgatgatcgagcgcctctccaaggatcacgcggcagcaaggcggctcgccgcggccttgagctggctcgacccggcactcgccgatcccgaccaggtgcaaaccaacatcctgcgcgtcgacgtctccgcaagcggacgcgaggccgccgcatgggccgagggcgtgaagcagcgcggcatcctggtgcaggccagcggcccctcgcagctccggctcgtcacccatcgccacatcgacggagcggcggtggaccgcaccattgccgccttcgcggcgctcggccgctag

SEQ ID NO: 7779 - protein, 347 aa, Bradyrhizobium japonicum USDA 110
MVAQERGRDGVVDLRSDTVTLPTAAMLERMQRAPLGDDGREGDPTVRALEARGAALTGKEAALFVPSGTMGNLLAMLAHAERGGEVFADAGAHLLNSELGSVVTIAGLVPKPMPSRRGAMDEAALADAIRGSERPGLIAMETAHNGAGGAVLPPPHMMRIHALGQSNGIPVHLDGARLFNASVALGVPAARIAEHADSVMVCLSKGLSAPVGSLLCGGAAFVARARTLRKLVGGTMRQSGVVAAAGLVALETMIERLSKDHAAARRLAAALSWLDPALADPDQVQTNILRVDVSASGREAAAWAEGVKQRGILVQASGPSQLRLVTHRHIDGAAVDRTIAAFAALGR

SEQ ID NO: 7780 - DNA, 1005 bp, Pseudomonas syringae pv. tomato str. DC3000
  CDS (1)..(1005): transl_table=11
gtgacggtcatcgatctgcgcagcgacacagtgactctgcccaccgcaggcatgcttgacgccatggcacatgcgccggtgggcgatgatgtctacggtgaagaccctacggtcaatctgctcgaggccacgctcgccgagcgcctcgggttcgacgccgccttgttcgtgccctccggcaccatgagcaatctgctggcgttgatggcgcactgtgagcggggcgatgaatacatcgtcggtcagcaggcccacacctataaatacgaagggggtggcgcggcggtactgggctcgattcagcctcagccgctggacgtgcaggcggacggttcgctgagcctgcaacaggtgctcgacaccatcaagccggacgacttccactttgcccgcacacgcctgctggccctggaaaacaccatgcagggcaaggtgctgccgcttgagtacctggccgccgcgcgcaagctgaccctggaaaaaggcctcgcgctgcacctcgacggcgcgcggctgtacaacgcggcggtcaagctgggcgttgatgcccgggagatcacccggcacttcgattcagtctccatctgcctatccaaaggcctgggcgcccccattggctcggtgctgtgcggctcgcagccgctgatggtcaaggcgcggcgtctgcgcaagatgctcggcgggggcatgcgtcaggcaggcgggctggccgctgccgggctctatgcgctggatcatcaggtccagcggctggccgacgatcatgccaatgcggcgtttctggccgagagcttgagcgggctgggttacagtgtcgagcctgtgcagaccaacatggtctatgtgcagatcggtgatcgcgccgcagcgctcaaggcattctgcgccgagcgtggcatcgtgctcactgccgcgtcgcggctgcgcatggtcactcacctgaatgtttcgcgtgctcaggcagagcaagtgatcgcggcattcgcagcctttgaacacccatga

SEQ ID NO: 7781 - protein, 334 aa, Pseudomonas syringae pv. tomato str. DC3000
MTVIDLRSDTVTLPTAGMLDAMAHAPVGDDVYGEDPTVNLLEATLAERLGFDAALFVPSGTMSNLLALMAHCERGDEYIVGQQAHTYKYEGGGAAVLGSIQPQPLDVQADGSLSLQQVLDTIKPDDFHFARTRLLALENTMQGKVLPLEYLAAARKLTLEKGLALHLDGARLYNAAVKLGVDAREITRHFDSVSICLSKGLGAPIGSVLCGSQPLMVKARRLRKMLGGGMRQAGGLAAAGLYALDHQVQRLADDHANAAFLAESLSGLGYSVEPVQTNMVYVQIGDRAAALKAFCAERGIVLTAASRLRMVTHLNVSRAQAEQVIAAFAAFEHP

SEQ ID NO: 7782 - DNA, 1005 bp, Vibrio parahaemolyticus RIMD 2210633
  CDS (1)..(1005): transl_table=11
atggattttcgttcagacacagtgactcaacccacccaagctatgcgcgaagtaatgttcagcgcccctgttggcgatgatgtttatggtgacgatcctaccgtaaacgagctagagcaattcgcggctgaattagcagggtttgaggcagcgttgtttaccacttctggcacacaagcaaaccttttaggattaatggcgcactgtgagcgtggcgatgaatatttatgcggccagcaagcgcacaattacaaatatgaagcaggtggcgcagcggtactgggttctatccagcctcaaccaatagaaaacaatccagatggcacgttgccatttgacaaattagaggcggcaattaaacctgatgacgcgcactttgctcgtactcgtctgctaagtttagaaaacaccatcaacggtaaagtgatcccactgtcttacttagcggaagctcgtgaattcgttaataaacacaatctgaaactgcatctcgacggtgcccgtgtgtttaacgcagctgttgcgctcgatgttcccgtcaaagatattggtcagtactttgattccatgacgatttgtttatcgaaaggtcttgcggcacccgttggttcactgctgcttggcagcaaggaatacatcgcgaaagctcgccgtttaagaaagatggtcggtggcggaatgcgtcaggcaggtattctagcggcagcaggtaaactggcgatcactgaacaagtcgcgcagttaaagcaagatcacatcaatgcaaaagcattggcggaaggtttagctgaactaccgggtttctcggtaaatcctgacttcgttcaaaccaacattgtgtttgctaagttggatgctaaagtcgatatccaaagcatcgcggaacaactcaagcaacaaaacatcatcatcagcccaggaaacccaattcgctttgtcacacacaaagacatctctgctgaagatattcaaaccttcctatcgagccttaaatctctgctttag

SEQ ID NO: 7783 - protein, 334 aa, Vibrio parahaemolyticus RIMD 2210633
MDFRSDTVTQPTQAMREVMFSAPVGDDVYGDDPTVNELEQFAAELAGFEAALFTTSGTQANLLGLMAHCERGDEYLCGQQAHNYKYEAGGAAVLGSIQPQPIENNPDGTLPFDKLEAAIKPDDAHFARTRLLSLENTINGKVIPLSYLAEAREFVNKHNLKLHLDGARVFNAAVALDVPVKDIGQYFDSMTICLSKGLAAPVGSLLLGSKEYIAKARRLRKMVGGGMRQAGILAAAGKLAITEQVAQLKQDHINAKALAEGLAELPGFSVNPDFVQTNIVFAKLDAKVDIQSIAEQLKQQNIIISPGNPIRFVTHKDISAEDIQTFLSSLKSLL

SEQ ID NO: 7784 - DNA, 1002 bp, Salmonella enterica subsp. enterica serovar Typhi Ty2
  CDS (1)..(1002): transl_table=11
atgattgatttacgcagtgataccgttacccgaccgggccgcgccatgctcgaggcgatgatgaccgccccggtcggggacgacgtatacggcgatgcccctaccgttaacgcccttcagcgctacgccgccgacctttccggtaaagaagcggcgctttttttacccaccggcacccaggccaatctggtcgcgctgcttagccattgtgaacgcggcgaagagtatatcgtcggtcagggcgcacataattatctctatgaagctggcggcgctgcggtgctcggcagcattcagccgcagcctattgatgccgccgcggacggtacgctgccgctggagaacgtagcggcgaagattaaagcggatgacatccacttcgcgcgcacgcgcttgctcagtctggaaaatacgcataacgggaaagtgctgccgcgcgcgtatctgaaagacgcctggacgtttacccgcgaacgtgggctggcgctgcacgttgacggcgcccgaatttttaacgcggtggttgcctacggctgtgagttaaaagagattacgcagtattgcgactcttttaccatctgcctgtcaaaaggtctcgggacgccggtcggttcgctgctggtcggcaaccgcgattacattaaacgcgcgacgcgctggcgtaaaatggtcggcggcggaatgcgtcaggccgggattctggcagcggccggactgtatgcgctgaagcataacgtggcgcgtctgcaagaggatcatgacaacgccgcctggctggcgcagcagcttcgcgaagcgggcgcggatgtcatgcgccacgaaacgaatatgctgtttgttcgcgttggcgaagcacaggccgccgcgcttggcggctatttgcgggaacggaatatcctgattaacgccgcgccgattgtgcgtctggtgacgcatctggatgtctctcgcgaacagcttgccgacgtcgtcgcccactggcgcgcctttttagcccgctaa

SEQ ID NO: 7785 - protein, 333 aa, Salmonella enterica subsp. enterica serovar Typhi Ty2
MIDLRSDTVTRPGRAMLEAMMTAPVGDDVYGDAPTVNALQRYAADLSGKEAALFLPTGTQANLVALLSHCERGEEYIVGQGAHNYLYEAGGAAVLGSIQPQPIDAAADGTLPLENVAAKIKADDIHFARTRLLSLENTHNGKVLPRAYLKDAWTFTRERGLALHVDGARIFNAVVAYGCELKEITQYCDSFTICLSKGLGTPVGSLLVGNRDYIKRATRWRKMVGGGMRQAGILAAAGLYALKHNVARLQEDHDNAAWLAQQLREAGADVMRHETNMLFVRVGEAQAAALGGYLRERNILINAAPIVRLVTHLDVSREQLADVVAHWRAFLAR

SEQ ID NO: 7786 - DNA, 1077 bp, Arabidopsis thaliana
  CDS (1)..(1077)
atggtgatgagaagtgtggatctacgatcagataccgttactagaccgacagatgcgatgcgagaagcaatgtgtaacgcagaggtggatgatgacgtcctcggatatgacccaacggctagacgtcttgaagaggagatggctaagatgatggggaaagaggctgctctgttcgtgccatccgggacaatggggaatctgatcagcgtgatggttcactgcgacgtgagaggcagcgaggtgattcttggcgacaattgtcacatccatgtttacgagaatggagggatatcgactatcgggggagtgcatcctaagacagtcaagaatgaagaagacgggaccatggacttggaggccattgaagcagctattagagatcctaaaggaagcacgttttatccatcaacaaggttgatttgcttggagaacacacatgccaactctggtgggagatgtttgagcgtggaatacactgagaaagttggagagattgcgaagagacatggcgtgaagctccatatcgacggagcccgtcttttcaatgcttccattgcacttggagttccagtccataagcttgttaaggctgcggactccgttcaggtgtgtctctctaaaggtcttggagctccggtaggatctgtaatcgttggttcgcaaagcttcatagagaaggcgaaaacggttaggaaaacattaggtggaggaatgagacaaataggtgttctgtgcgcagccgctttggtcgcactccaagaaaacctcccaaagctacaacatgaccacaagaaggctaagttgttagctgaagggttgaatcaaatgaaagggattagagtaaatgttgcagccgtggagaccaacatgattttcatggatatggaggatggttcaagacttacggctgagaaactgcggaagaatctagaggagaatggcattctccttatccggggaaactcatcccggatcagaatagttatacaccaccagataacaacaagtgatgtgcattacacattgtcttgctttcagcaagcaatgctaacgatgcaggaaccaagccgaacctaa

SEQ ID NO: 7787 - protein, 358 aa, Arabidopsis thaliana
MVMRSVDLRSDTVTRPTDAMREAMCNAEVDDDVLGYDPTARRLEEEMAKMMGKEAALFVPSGTMGNLISVMVHCDVRGSEVILGDNCHIHVYENGGISTIGGVHPKTVKNEEDGTMDLEAIEAAIRDPKGSTFYPSTRLICLENTHANSGGRCLSVEYTEKVGEIAKRHGVKLHIDGARLFNASIALGVPVHKLVKAADSVQVCLSKGLGAPVGSVIVGSQSFIEKAKTVRKTLGGGMRQIGVLCAAALVALQENLPKLQHDHKKAKLLAEGLNQMKGIRVNVAAVETNMIFMDMEDGSRLTAEKLRKNLEENGILLIRGNSSRIRIVIHHQITTSDVHYTLSCFQQAMLTMQEPSRT

SEQ ID NO: 7788 - DNA, 1020 bp, Bordetella bronchiseptica RB50
  CDS (1)..(1020): transl_table=11
atgatcgatctgcgcagcgataccgtgacccgtcccagcgccgccatgcggcaggccatggcggccgcgccggtgggtgacgatgtgatgggcgatgaccccagcgtacggcgcctgcaggacgaggttgccgcgcgggcgggcaaggaggccgggctgttcttcccgtcgggcacgcagagcaacctggccgcgctgatggcgcattgcgcccgcggcgacgagtatctggtggggcagcaggcccatacgtacaaattcgagggaggcggcgctgcggtgctgggcagcatccagccgcagcccgtcgaccatgccgccgacggcagcctgccgctggacaggctggcggccgcgctcaagccgggcggcgatccgcatttcgcccgtacccggctgttggcgctggaaaacaccttccagggccgggtcatgcccgccggctatgtcgcgcaggccacgggctgggcccgcgagcatggcctgtccacccatctggacggcgcgcgcgtcttcaatgcggccgtggccagcggcgtgccggtgcaacagctgtgcgagccgttcgatacggtttcgatctgtttttccaaggggctgggcgcgccggtcggatcggtgctggtcggcagccgcgccctgatcgagcaggcgcatcgctggcgcaagatgctgggcggcggcatgcggcaggccggcatactggctgccgcctgcctgcacgcgctgcaccaccacgtcgagcgcctggcgctagaccacgacaacgcggcgcggctggccgcgggcctggacggcatcgacggcgtgcgcgtgctggggcagcacaccaacatggtgttcgccgagttcgatccggcccggtgcgaatcgctgaccacggcgctgcgcgggcagggcattctgatgcgggcggtctatggcgggccgacccgcctggtgacgcacctggacgtggacgccgacggcatcgatcgcgtcgtcgacgcggtacgcgggcattgcgcggccgcgcgctga

SEQ ID NO: 7789 - protein, 339 aa, Bordetella bronchiseptica RB50
MIDLRSDTVTRPSAAMRQAMAAAPVGDDVMGDDPSVRRLQDEVAARAGKEAGLFFPSGTQSNLAALMAHCARGDEYLVGQQAHTYKFEGGGAAVLGSIQPQPVDHAADGSLPLDRLAAALKPGGDPHFARTRLLALENTFQGRVMPAGYVAQATGWAREHGLSTHLDGARVFNAAVASGVPVQQLCEPFDTVSICFSKGLGAPVGSVLVGSRALIEQAHRWRKMLGGGMRQAGILAAACLHALHHHVERLALDHDNAARLAAGLDGIDGVRVLGQHTNMVFAEFDPARCESLTTALRGQGILMRAVYGGPTRLVTHLDVDADGIDRVVDAVRGHCAAAR

SEQ ID NO: 7790 - DNA, 1029 bp, Chromobacterium violaceum ATCC 12472
  CDS (1)..(1029): transl_table=11
atgcagtggatagaccttcgcagcgataccgtcacccatccgaccccggcgatgcgccgcgcgatggccgaggccgaagtcggcgacgatgtctacggcgacgaccccaccgtgctgaagctggaggcgctggccgccgacaggctgggcaaggaggcggcgctgctcgtccccagcggcaccttcggcaaccagctggcgctgttcacccactgccgccgcggcgacgaggtgattgtcgaggacaacagccacatcgtctggcacgaggccggcgcggcggcggtgatcgccggcgcccacctgcggacgatagagggcgataacggcctgatggcggtggacgcgatcgagcggcgcatccgcgtcggcgacgacatccacgagcctcgcaccggtctgatctgcctggaaaacgcccatggcaacggccgcgtgctgccgttgtcggcgatggccgacaccgcggcgctggcgcgcgagcacggcgtgccggtgcacctggacggcgcgcgggtgttcaacgccgccgcccatctgggctgcgacgtgcgcgaggtcacccgccacgtcgacagcgtgatggcctgcctgtccaagggcctggccgcgccgatcggctccatcctggccggttccgccgatttcatcgatcaggcgcgccgcaagcgcaagctgctgggcggcggcctgcgccaggccggcgtgatcgccgcgcccggcatcctggcgctgaccgagatggccgcgcgtctggacgaggaccaccgcaatgcccgctacctggccgagggcctggccaagctgccgtgcgtggacttgaatccggccgatgtccacatcaacctggtgtggttccgcttcaacgccgacatcgacgccgctgaactgatggccgcgctgaagcaggccggcttcctcgccaatccgccgcatcagggcgcgatgcgcctggtgacccactggcaggtaggccgcgccgacatcgaccgcctgttggaggtgatgcagcgcgtgctctgcgactga

SEQ ID NO: 7791 - protein, 342 aa, Chromobacterium violaceum ATCC 12472
MQWIDLRSDTVTHPTPAMRRAMAEAEVGDDVYGDDPTVLKLEALAADRLGKEAALLVPSGTFGNQLALFTHCRRGDEVIVEDNSHIVWHEAGAAAVIAGAHLRTIEGDNGLMAVDAIERRIRVGDDIHEPRTGLICLENAHGNGRVLPLSAMADTAALAREHGVPVHLDGARVFNAAAHLGCDVREVTRHVDSVMACLSKGLAAPIGSILAGSADFIDQARRKRKLLGGGLRQAGVIAAPGILALTEMAARLDEDHRNARYLAEGLAKLPCVDLNPADVHINLVWFRFNADIDAAELMAALKQAGFLANPPHQGAMRLVTHWQVGRADIDRLLEVMQRVLCD

SEQ ID NO: 7792 - DNA, 1035 bp, Gloeobacter violaceus PCC 7421
  CDS (1)..(1035): transl_table=11
atgcccgacccggttgtcgatctgcgcagcgacacggtgacccgaccgacccgggcgatgcgcgccgccatgttcgaagccgaagtcggggacgatgtctacggcgaagatccgaccgtcaaccgcctccaggagcgtgtcgcccacctgctcggcaaagaaaaggggctattttttccgagcggcacgatgtgcaaccaggtggccatcgccacccatacccgccccggccaagaaatcatctgtgatcgcgactgccatgtgttcaattacgagcgggccggggcaagccacctgggcggcgtgcaactccatcccctcgacggccgccacggggtcctgagtgcccagcaggtgcgctccgccgtccgccccatcgagttgcacgaaccgcccacgggcttgattctgctcgagaatacccacaaccgcggcggcggcacggtctatccccaggacgtcatcgaacaaatcgccgccgtcgccggcgccgcgggcatccccatgcacctcgacggtgcccggctattgaacgccagcgtcgccggttcccacagtccggcgacgctggcggcaccctttgattcggtctacttttgtctttccaagggcctcgggtgtccggcgggctcggtgctcgccggcaaagccgatttcatcgcccaggcgacacgcctgcgtaaggcctttggcggaggcatgcgccaggtgggttttctggcggctgccggtctgtacgccctcgatcaccacatcgagcgcctcgcggacgatcatcgccgggcacggcagttggccgtccacctaaaagatctcaacgccttcgatgtcgagctcgacgctgtgcacaccaacatcgtgatggtggatgtgcacgcggattgcacggcggcggcggtggcggcggatctgaccgcccacggcgtgcgggtgagtgtctttggtccccggcgtctgcggttggtcacccaccttgatatcgatgacgcgggagtggagcggaccgtcgccgtcttcaagcggctctacggctag

SEQ ID NO: 7793 - protein, 344 aa, Gloeobacter violaceus PCC 7421
MPDPVVDLRSDTVTRPTRAMRAAMFEAEVGDDVYGEDPTVNRLQERVAHLLGKEKGLFFPSGTMCNQVAIATHTRPGQEIICDRDCHVFNYERAGASHLGGVQLHPLDGRHGVLSAQQVRSAVRPIELHEPPTGLILLENTHNRGGGTVYPQDVIEQIAAVAGAAGIPMHLDGARLLNASVAGSHSPATLAAPFDSVYFCLSKGLGCPAGSVLAGKADFIAQATRLRKAFGGGMRQVGFLAAAGLYALDHHIERLADDHRRARQLAVHLKDLNAFDVELDAVHTNIVMVDVHADCTAAAVAADLTAHGVRVSVFGPRRLRLVTHLDIDDAGVERTVAVFKRLYG

SEQ ID NO: 7794 - DNA, 1101 bp, Rhodopseudomonas palustris CGA009
  CDS (1)..(1101): transl_table=11
gtgatctacgcccccgcccctgacgatccgcgactgccgccggtgcggatcaatttgctgtcggacacccagactcagcccagtgcggcgatgcgggaggcgatggcgcgggcgccggtgggagacgaacagatcggtgccgatccgaccgtgaacgcgctgtgcgcccgtgtcgccgatctgctcggcaaggaggcggcggtgttcatggcgtccggcacgatctgcaacattgcggcgacgttggcgcattgccgagccggcgacgaaattctcgcgcacgagacgtcccatgtcgtctcgctggagggctgcacacacgcggctctcggcggctttcagatccacccgctgccgggcgcaggcggtcagttctccgctgaaacgctgcgatcggcgctgcatcggccagaccggcatcaggcgaggcagagcctggtgtgcgtcgagcagaccaccaatctcggcggcggcacggtgtggaacgctttgacgctccggcagatcgcggaattggctcgcgccaatggattagccacccatatggacggtgctcgcctgatgaacgccagcgtcgccagcggcatctcgccccggcagatcgccgccggctgggactcggtgtggatcgacttcagcaagggcctcggcgcgccactcggtgccgtgcttgcgggatcgcgcgatttcatcgacgaggtctggctgtggaagcagcggctcggcgggtcgctgcgtcaggccggcatttgcgccgccgcctgcctgtatgcgctcgaccacaatgtcgggcgcctcgctgaggatcacgccaatgcccgattgctcgcggcaggcttgtcgcagatcgacggcgtgagcgctgcaccgccggagaccaacctggtctatttcgacgtctccggcgccgcgtggtcaaagcaggcaattgtcgacgcgctgcgggcccgtggtgtgctgatctcgatcctcagcgaccggctacgcgcctgcacgcatctcgacgtcacgcccgcgatgatccaagaggcgctcgcagtgatccgcaacgtggtcgaaggcgatacgacggcccggatcggccgcagcgcacagatctga

SEQ ID NO: 7795 - protein, 366 aa, Rhodopseudomonas palustris CGA009
MIYAPAPDDPRLPPVRINLLSDTQTQPSAAMREAMARAPVGDEQIGADPTVNALCARVADLLGKEAAVFMASGTICNIAATLAHCRAGDEILAHETSHVVSLEGCTHAALGGFQIHPLPGAGGQFSAETLRSALHRPDRHQARQSLVCVEQTTNLGGGTVWNALTLRQIAELARANGLATHMDGARLMNASVASGISPRQIAAGWDSVWIDFSKGLGAPLGAVLAGSRDFIDEVWLWKQRLGGSLRQAGICAAACLYALDHNVGRLAEDHANARLLAAGLSQIDGVSAAPPETNLVYFDVSGAAWSKQAIVDALRARGVLISILSDRLRACTHLDVTPAMIQEALAVIRNVVEGDTTARIGRSAQI

SEQ ID NO: 7796 - DNA, 1047 bp, Geobacter sulfurreducens PCA
  CDS (1)..(1047): transl_table=11
atgaacatcattgacctgcgcagcgacaccgttacccggccgagccctgccatgcgcgccgccatggcgggagccgaggtaggggacgacgtctatggcgaagacccgaccgtgaaccggctggaggaactgggcgccgccacgctcggcacggaagcggccctgttcaccgccagcggtacccaggccaatcttctggctctcctggcccactgccggcgtggtgacgaatacattgccggccagaccgcccactgctatcgctacgaagggggcggtgccgccgctttggggggcatccagccccagcccctggaggtggaacccgacgggaccctcgatctctcagccgtggccgccgccatcaagccggacgacctccacttcgcccgcacccggctcctctgcctggaaaacacccatgccgggcgggttcttcccctggactacctggcacgcgccagacggctctgcaacgagcagagccttggcctgcacatggacggtgcccgcatcttcaatgccgccgtaaagctcggcgtaccggtccgcgagatcgccggtcacgtggattcggtgtcggtctgcctctccaaggggctcggcgccccggtggggtcgctgctctgcgggggaagggagttcgtcgccacggcccgccggtggcgcaaggcggtcggaggaggcatgcgccaggccggcatcctggcggccgccggcatcctggcgctgaccgaaaacgttgaccggctcgccgaggaccatgccaacgcccgccgcttggccgaggggttggccgccatcccggggctgggccttgacccgtcccaggtccagaccaacatggtattcctgtgcctccctctccggacggcggaccggctcgcctcatttctcaacgaacagggaattctcatctccggccgggaaagtatccgtctcgtcacccaccttgacgtaacctcttcggacgtggaacgggttatcgcggcattcggcgcattcttcgccggccacggcgagatgcaaccgggagcatcgtcatga

SEQ ID NO: 7797 - protein, 348 aa, Geobacter sulfurreducens PCA
MNIIDLRSDTVTRPSPAMRAAMAGAEVGDDVYGEDPTVNRLEELGAATLGTEAALFTASGTQANLLALLAHCRRGDEYIAGQTAHCYRYEGGGAAALGGIQPQPLEVEPDGTLDLSAVAAAIKPDDLHFARTRLLCLENTHAGRVLPLDYLARARRLCNEQSLGLHMDGARIFNAAVKLGVPVREIAGHVDSVSVCLSKGLGAPVGSLLCGGREFVATARRWRKAVGGGMRQAGILAAAGILALTENVDRLAEDHANARRLAEGLAAIPGLGLDPSQVQTNMVFLCLPLRTADRLASFLNEQGILISGRESIRLVTHLDVTSSDVERVIAAFGAFFAGHGEMQPGASS

SEQ ID NO: 7798 - DNA, 1053 bp, Wolbachia endosymbiont of Drosophila melanogaster
  CDS (1)..(1053): transl_table=11
atgagagtaaaaatagatttctttagcgattcaaacactgacccttcagctaaaatgagggaagcgatggctaaagcaaaagttggaaacgaagctgcatgtgaagatccaactgtgaacgaattagtggcaaccgcatgtaaaatattaggtaaacctgcaggaatctttttgatttcaggaacgatgtccaatgtaattgcttataaagtacacattcaaagacctggtgattacttgctgcttgatgaaacttcacatccactcatagtacaatctggcttgatcgcagcccaggcacatgctactcctttgcccatcaaaggtacaagaggaatatttactggagaacaaattgttgagtttattactcgtcctagtttaagaaatattccgagagttgggcttgtttctatcgaacaaacgacaaattttggtggtggagctgtgtggcctttagaatatattcaagagatctcaagtctctgcaaagagaatgacgtattcactcatttagatggagcaagactgttcaacgcttgtgctcatactaaaatatctccaaaggagtatgcaagttattttgattcggtattcattgattttagtaaaggattaggtgctccaatgggtgcaatattgcttggaagtgaagattttattgaaaaagcttggtactataagtttcaaattggcggaggtatgcaccaagctggcattatttcagctgcatgtttatatgctctacgtaataatgtaaattctttagaagaagatcataaaaaaatgcagcaccttatagaaggcctagactccatagatcaagttataattgatatcgacctgtataaaactaatatagcgtatttttcattacgtactaattgtatatctactcaagaattaataaacgtactaatgacaaattatggaattagaatggctaacatcaaaggtaaaatcagagctataacacatagagatataagctatgaagatattaatactactgtatctgctataagaaagatactaagtaattttctgcactaa

SEQ ID NO: 7799 - protein, 350 aa, Wolbachia endosymbiont of Drosophila melanogaster
MRVKIDFFSDSNTDPSAKMREAMAKAKVGNEAACEDPTVNELVATACKILGKPAGIFLISGTMSNVIAYKVHIQRPGDYLLLDETSHPLIVQSGLIAAQAHATPLPIKGTRGIFTGEQIVEFITRPSLRNIPRVGLVSIEQTTNFGGGAVWPLEYIQEISSLCKENDVFTHLDGARLFNACAHTKISPKEYASYFDSVFIDFSKGLGAPMGAILLGSEDFIEKAWYYKFQIGGGMHQAGIISAACLYALRNNVNSLEEDHKKMQHLIEGLDSIDQVIIDIDLYKTNIAYFSLRTNCISTQELINVLMTNYGIRMANIKGKIRAITHRDISYEDINTTVSAIRKILSNFLH

SEQ ID NO: 7800 - DNA, 1056 bp, Yersinia pestis biovar Microtus str. 91001
  CDS (1)..(1056): transl_table=11
atgatgaaatctatttttctagccaatgagaagacgatgctgatcgatttacgcagtgacacagtaacgcaaccctgtgccgccatgcgcgccgcgatggcgaatgccgaggtcggtgatgatgtgtatggcgatgacccaaccgtcaatgcgcttgaagccaaagccgccagtttatccggtaaagaagccgcgctgtttctgccaacaggcactcaggcaaatttggtggcgctattgacccattgtcagcgtggtgaagagtatattgtcggccaaaaagcccataactatttgtatgaagccgggggtgccgccgttttgggcagtatccaaccacaacctattgatgccaacgatgacggcacactaccactggataacgttctggccgccatcaaacccgatgacattcactttgcccccacccggctgttaagtttggaaaatactcacaatggcaaagtcttgcctttgcgttatttacagcaagcctgggcgttgacccgcgaaaaaaaactggcgttacatattgatggcgcacgtgtttttaatgctgcggtggcgctgaatgtgccactgaacgatattagccagtattgcgataccctgacaatttgtctgtcaaaaggattagggacgcctgttggttccctgctctgtggcagcgcagaattcattcatcgcgcccggcgctggcgaaaaatgaccggtggtggtatgcgtcaggccggtattttagcggcagccgggttgtatgcgctgcaacataatgtggcgagactcaaagatgatcacgataacgcccagtggttggaacagcaattacgtgacttaggcattgagatagccgcccccggcgcgcaaacaaacgtgctgtacattacgcaatctgccgaatcagcgttgaaacttggcccctggatgcgtgaacgtggtgtgctgatcagtgccgggccgctcacccgcctgattactcaccttaacgtgagccgaaaagatctggaaaaagtcgtcgcgctgtggcgtgaatttattgccgagcaacattcatga

SEQ ID NO: 7801 - protein, 351 aa, Yersinia pestis biovar Microtus str. 91001
MMKSIFLANEKTMLIDLRSDTVTQPCAAMRAAMANAEVGDDVYGDDPTVNALEAKAASLSGKEAALFLPTGTQANLVALLTHCQRGEEYIVGQKAHNYLYEAGGAAVLGSIQPQPIDANDDGTLPLDNVLAAIKPDDIHFAPTRLLSLENTHNGKVLPLRYLQQAWALTREKKLALHIDGARVFNAAVALNVPLNDISQYCDTLTICLSKGLGTPVGSLLCGSAEFIHRARRWRKMTGGGMRQAGILAAAGLYALQHNVARLKDDHDNAQWLEQQLRDLGIEIAAPGAQTNVLYITQSAESALKLGPWMRERGVLISAGPLTRLITHLNVSRKDLEKVVALWREFIAEQHS

SEQ ID NO: 7802 - DNA, 1143 bp, Strongylocentrotus purpuratus
  CDS (1)..(1143)
atgtattcatctgcgacaaagaagcaaaagacggatcagggctatgtggttgacttccgtagtgacaccatcaccaagcccaccgatgccatgcgtaaggccatgagcgaggccgtggtaggtgacgatgtctttggagaagaccccacagtcaatgaacttcagcgaaaggtggccaagttgctgaagaaggatgctgccctctttgtaccgacagggacaatgtccaacttgatcgcattgatgagtcatactaccgggcgtggtgaggaggtgttgctaggagaccagtgtcacatcttcgactgggaacaaggtggaatggcacagtttgctggtgtgtgcccacacgtggtcaagaccttgcccgatggaactctggacttggatgagctcgagtccaagatacgacccagcgacattcacatggccagcaccaggctcatctgcatagaaaacacccataattcatcgggaggcaaagtgctccctctagagttcttacagaaggtgagagcaatagcagacaagaacaatctcaaggttcacttagatggggctcgtctcctcaacgcagcggttgctatggacgtaaccccagatgtcatcacgcagtacgtcgattccatcagcatctgtttctcaaagggattgggatgtccagttggatcggctctcgtaggatccaatgacttcattgcaagagctttgaggcacaggaaagccttaggtggaggcatgagacagtgtggcatactagcagctgcagctctggtaggcctagaccaggggtacgcaagactgcatgtggatcatgaaaatgctcagaaattcgccaaaggcatgaaagagctgaacaacccagtcttcacagccaagccagagaatacacagaccaacatggtgcacatcctagtacgagaagacattccttccatgcaagctgcctcgctgctgggcaacgtcgccgatgatgagatcagtacactaggacagagcattcaggtgaaactgtttcccgagaccgaccacacgatgcgagccgttatgaaccaccatatcacagagaaagacgttcaaatggctctcaagaaattcaagttcatcggggaaaagctggacaagaatggtcttggtaaatag

SEQ ID NO: 7803 - protein, 380 aa, Strongylocentrotus purpuratus
MYSSATKKQKTDQGYVVDFRSDTITKPTDAMRKAMSEAVVGDDVFGEDPTVNELQRKVAKLLKKDAALFVPTGTMSNLIALMSHTTGRGEEVLLGDQCHIFDWEQGGMAQFAGVCPHVVKTLPDGTLDLDELESKIRPSDIHMASTRLICIENTHNSSGGKVLPLEFLQKVRAIADKNNLKVHLDGARLLNAAVAMDVTPDVITQYVDSISICFSKGLGCPVGSALVGSNDFIARALRHRKALGGGMRQCGILAAAALVGLDQGYARLHVDHENAQKFAKGMKELNNPVFTAKPENTQTNMVHILVREDIPSMQAASLLGNVADDEISTLGQSIQVKLFPETDHTMRAVMNHHITEKDVQMALKKFKFIGEKLDKNGLGK

SEQ ID NO: 7804 - DNA, 1146 bp, Nasonia vitripennis
  CDS (1)..(1146)
atggcgtacggcgtcaagtctaccgtggatttggtgaaatacgcgaaggaaaagaacgcgtcgatagtcgacctgaggagcgacacgatctcgcgattatcgccgggtatgaggaaggccatgttcgaggcggaggttggagacgacgtgtttggcgacgatcccactgtcaagttgctggaggagaagatcgccaagatgctgggcaaggaagccgcgattttcgtgacttccggaacgatgagcaacttgattgccgtactgaaccactgcgaggagcgcggcagcgaggcctactgcggcgaaagttcgcacatcgtattgcacgagcaaggcggcgccgctcagctcggcggggtgagcctctgcccgatacccaacgagcccgacggcacctactccctgcgcaagctcgagagcaagctcaagagcaactggctgcacgagcccgtctccaagctggtctgcgccgagaacaccatcacgggccgcgtcttaccccaagcctgggtcgatcagctgatcgcgctggcccgtcggcacggactgaagcttcacctggacggcgccaggatctggaacgcagcggctgcctcgggtaggagcgtccaggaactggcccagggcttcgactcggtgagcgtgtgtctgagcaagggtctgggagcaccggtgggctcgttgctctgcgccagccgggagttcatccacaaggcccggaggacaaggaaggtgctgggcggtggcatgcgtcaggttggcgttctcgccgcggctggactgcaggcgctggtggaggtgcttccggttctgcatctggatcatcgtcgggctcgggagatagccgaggctgtcaacgccatcggctcggagaacttcgaggtcgacatggggatctcgacgacgaacatggtgctggtgcagtcgaagaccggcatggttacgagactcgtcacgaggctgcaggaggtgtggcgggacgaggaacccgacgacaggatcatcgttcggggtatggctctgactgactgcttggccagattcgtcatctactacgaggtcacagacgacatggtgcgcgatgctgtgaaaaagatcaacctggttattcgggagatcgatgccgaggttcaaagggaatcctga

SEQ ID NO: 7805 - protein, 381 aa, Nasonia vitripennis
MAYGVKSTVDLVKYAKEKNASIVDLRSDTISRLSPGMRKAMFEAEVGDDVFGDDPTVKLLEEKIAKMLGKEAAIFVTSGTMSNLIAVLNHCEERGSEAYCGESSHIVLHEQGGAAQLGGVSLCPIPNEPDGTYSLRKLESKLKSNWLHEPVSKLVCAENTITGRVLPQAWVDQLIALARRHGLKLHLDGARIWNAAAASGRSVQELAQGFDSVSVCLSKGLGAPVGSLLCASREFIHKARRTRKVLGGGMRQVGVLAAAGLQALVEVLPVLHLDHRRAREIAEAVNAIGSENFEVDMGISTTNMVLVQSKTGMVTRLVTRLQEVWRDEEPDDRIIVRGMALTDCLARFVIYYEVTDDMVRDAVKKINLVIREIDAEVQRES

SEQ ID NO: 7806 - DNA, 1296 bp, Gibberella zeae PH-1
  CDS (1)..(1296)
atgagtcgatcatctcgacttgtcgcacttcgcaatctgtcctttattagttctcgttcggtaccaatctttcgtacacctgtccagactcattcagtcatccctctacaacgcacctttgcctcttctgctatcaagatgggagacgctatctctgagaaacctcacaatgcgtggctcggtgccaagggaccagcttctcttgatcttcgaagcgatgtcgtgacaactcctaccccagccatgcttgaggctgtctcatcatgctccttactggatgatgtctttcaagaagaccctgctaccaatggccttgaggcttatgtagcagagcgcacaggcaaagaagctggtctttttgttctctcgggcacaatgggcaaccaacttgccctgagatctcttcttacgcagccaccctactccgtactctgcgactatcgtgcccacatattcacatctgaagctggcggcacctcaaatcttacaggagctcagattcagactgttgtccccaagaatgggagatatatgacgctagaggaaatccaggagaacgtgaccctagacgatgatgttcatggctgccccacgcgagtgatcagtcttgaaaatacccttcacggcatggtcatgcccctgagtgaggtcaagcgtatctccgagtttgccaaggagcacgatatcaagcttcacttggacggcgcgcgattatgggaagctgtcgtatccggagctgggtctctgactgaatactgctctcactttgacaccatcaccctgtgcctttccaagggtcttggtgcacctgctggaagtgtgctcgtgggtcccaaggccacgctgaagcacgctcgctgggttcgcaagtccatcggtggtggccttcgtcaatccggtgttcttacctctgcaggtcgcgttgccgtggagcaaacttttggcaaatcgcccaacggtgaagacggaccccttaaagcctcccatgaaatggcccgcaaggtcgatgacctctggaccagcatgggcggtatgattgatgagccgactgagactaacatggtatggttgaatctcaaggctacagggtgtagcgagaagcggttcattgagattggagctgaagctgggctcaagtttatgtgtaataggttggtgacacattaccaggtcgcacagaatggagacgaggtgttgcgacgcctaaaggtggtttttgaaaaggttcttggagagagccaagactcgagtgctcagcaaaagattggaaagggaagtgtatatgtgcctcaatag

SEQ ID NO: 7807 - protein, 431 aa, Gibberella zeae PH-1
MSRSSRLVALRNLSFISSRSVPIFRTPVQTHSVIPLQRTFASSAIKMGDAISEKPHNAWLGAKGPASLDLRSDVVTTPTPAMLEAVSSCSLLDDVFQEDPATNGLEAYVAERTGKEAGLFVLSGTMGNQLALRSLLTQPPYSVLCDYRAHIFTSEAGGTSNLTGAQIQTVVPKNGRYMTLEEIQENVTLDDDVHGCPTRVISLENTLHGMVMPLSEVKRISEFAKEHDIKLHLDGARLWEAVVSGAGSLTEYCSHFDTITLCLSKGLGAPAGSVLVGPKATLKHARWVRKSIGGGLRQSGVLTSAGRVAVEQTFGKSPNGEDGPLKASHEMARKVDDLWTSMGGMIDEPTETNMVWLNLKATGCSEKRFIEIGAEAGLKFMCNRLVTHYQVAQNGDEVLRRLKVVFEKVLGESQDSSAQQKIGKGSVYVPQ

SEQ ID NO: 7808 - DNA, 1161 bp, Candida glabrata CBS 138
  CDS (1)..(1161)
atgactactgaactaccaccacaatataccagtgcttccaatgacctgcgttccgacactttcaccactcctaccaggaagatgaaggaggctgctctggaggcttctattggtgacgctgtctacaacgaggacgtcgacaccatccgtctcgagcagcacgtcgcaaagctggccggtatggaggccggtctgttctgtgtctccggtacgctgtccaaccaaatcgctctgagagcgcacttgtaccagccaccttactccatcctgtgcgactacagagcgcacgtctacacacacgaggcagctggtctggccatcctgtcccaagccatggtcgtcccagtgatcccatccaatggcaactacatgaccctcgaggacatcaagagccactatgtcccagacgatggtgacatccacggtgccccaaccaaggtcatctccctggagaacaccttgcatggtatcatctacccgctagaagaactggtccgcatcaaggcctggtgtatggagaacggcctcaagctgcactgtgacggtgcccgtatctggaacgcagccgctgagtccggtgtcccactgaaacagttcggtgaactcttcgactccatctccatctgcctgtcaaagtccatgggtgccccaatgggctccatcctggtcggtaacaccaagttcatcaagaagtgtaaccacttcagaaagcagcaaggtggtggtgtaagacaatcaggtatgctatccagaatggccctctgcaacatcgacgccgactggaagtcaaacctactgtactcccacagactagcccacaacttggcagacttctgtaaagaaaagggtatccctctcgagtccccagccgacactaacttcgtcttcgtcgacttgagagcagcaaagatgaaccctgacgtcctggttaagaaaggtctgaaatacggtgtaaagctgatgggtggtagaatctccttccactaccaagtctcagaagaatccttggaaaaggtaaaactggctttgctcgaagccttcgaatactctaaggaacacccattcgatgaaaacggagctactaagatctaccgtagtgcctccaccgaagtcgacatcgaaggtaacgctatccaagagatcaagacttacaagtactaa

SEQ ID NO: 7809 - protein, 386 aa, Candida glabrata CBS 138
MTTELPPQYTSASNDLRSDTFTTPTRKMKEAALEASIGDAVYNEDVDTIRLEQHVAKLAGMEAGLFCVSGTLSNQIALRAHLYQPPYSILCDYRAHVYTHEAAGLAILSQAMVVPVIPSNGNYMTLEDIKSHYVPDDGDIHGAPTKVISLENTLHGIIYPLEELVRIKAWCMENGLKLHCDGARIWNAAAESGVPLKQFGELFDSISICLSKSMGAPMGSILVGNTKFIKKCNHFRKQQGGGVRQSGMLSRMALCNIDADWKSNLLYSHRLAHNLADFCKEKGIPLESPADTNFVFVDLRAAKMNPDVLVKKGLKYGVKLMGGRISFHYQVSEESLEKVKLALLEAFEYSKEHPFDENGATKIYRSASTEVDIEGNAIQEIKTYKY

SEQ ID NO: 7810 - DNA, 1188 bp, Kluyveromyces lactis NRRL Y-1140
  CDS (1)..(1188)
atgactgcttctgataagaaatctactgctgctgctccttcagagccagcttacacctcagctgccaatgaccttcggtctgatactttcaccactccaactaaggaaatgttggaagctgctttcaatgcttccatcggtgatgcagtctataacgaagacgtcgacaccattgagctagaaaccgtcgtagctcgtttagctggtaaagaagccgggttattctgtgtctctggtactttatcgaaccaaattggtttgagaacgcatctattccaacctccatactctatcttgtgtgattacagagctcatgtttatactcatgaagcagctgggttggcaatcttgtctcaagcgatggtcactccggtgatcccatctaacggtgattatatgactttggaagatatcaaggctcattacatcccggacgacggggatattcacggtgcgccaacaagagtgttatcgttggaaaacactttgcacggtatcgtttacccattggaagaattgatccgtatcaaagggtggtgtttggaaaacgatatcaaattacactgtgacggtgctagaatttggaacgcagttgtcgaatccggtgtctctttgaaacagtacggtgaaattttcgactctatctccatttgtctatctaagtccatgggtgctccaatggggtctgttcttgttggtagcaacaagtttgtcaagaaatgtaaccatttcagaaaacaacaaggtggtggtgttagacaatcaggtattatgtgcagaatggcactttgcgctgtgaacggtgactggaagactaagatgggatactctcaccagttggcccacgaattggctaaattctgtaaagataacggtattccattggagtctccagctgacaccaacttcgtcttcttggacttgcaaaaggcaaagatgaacccagacgttcttgtcaagaaaggtttgaaatatggggtcaaattgatgggtggtagagtttctttccactaccaagtcaccagagaaactttggaaaatgttaagtctgctgtcttggaaactttccaatacgcaaaggaaaacccattcgacactaacggtccaacaaaaatctaccgtagtgaatctactgattttgatatccatggtaaccctatcagtgatatcaagacttacaagtactga

SEQ ID NO: 7811 - protein, 395 aa, Kluyveromyces lactis NRRL Y-1140
MTASDKKSTAAAPSEPAYTSAANDLRSDTFTTPTKEMLEAAFNASIGDAVYNEDVDTIELETVVARLAGKEAGLFCVSGTLSNQIGLRTHLFQPPYSILCDYRAHVYTHEAAGLAILSQAMVTPVIPSNGDYMTLEDIKAHYIPDDGDIHGAPTRVLSLENTLHGIVYPLEELIRIKGWCLENDIKLHCDGARIWNAVVESGVSLKQYGEIFDSISICLSKSMGAPMGSVLVGSNKFVKKCNHFRKQQGGGVRQSGIMCRMALCAVNGDWKTKMGYSHQLAHELAKFCKDNGIPLESPADTNFVFLDLQKAKMNPDVLVKKGLKYGVKLMGGRVSFHYQVTRETLENVKSAVLETFQYAKENPFDTNGPTKIYRSESTDFDIHGNPISDIKTYKY

SEQ ID NO: 7812 - DNA, 1128 bp, Debaryomyces hansenii CBS767
  CDS (1)..(1128)
atgacagtagaaattgcaccagaatattctactcataatgaattcagaagtgatactttcaccgtgccaaccaagaccatgttggagtccatccgaaacagcacatttggagactccgtgtataacgaggataaaactacgttgatgttagagaagaagatgtgcgagttgacaggaaagccagccgctttattctgtgttagtggaacgttatccaaccaaattggattgagagccaacttgttccagccaccatattcgattttatgtgactatagagcacatgtattcattcacgaagccggtggattggctaccttgtcacaagccatggtacacccggtacatccttctaacggagtatacttgacgttggaagacattgctgaaaatatcactccagacgatggagacatccatgcggcacctactaagctcatctcattagaaaacaccttacacggaactatcatgcctatagaagagattgccaggatcagtgcttttgctaaggagaataatattaaattgcatttagatggggccagattgtggaattctgccgcggaaacgggtatttcgatcgagaaatattgctcatacttcgattcggtttcgttatgtctttcgaagtcgatcggagctccagtcggttctatcttggttggagagcctaccctcattgccaaggcaaaccatttcaagaaacaaaacggtggtggtatcagacaagccggtattttggcgtcgatggctatggtggctattgatgagaatttcgcaaaattgccttactcgcattccctcgctaaagatgtcgcgagcttctgcgaaggtcacggaatcgccttggaaagtccggctcataccaattttgttttcattgatctcgtcaaaaacaagatggacgactcattactcattgaattaggtaaaaagtacaatgttaagttgatgggtggtagaatcgcattccactaccagttatcggaagaaagtgtcgaaaatgtcaaaagggctatattggaatgttaccaagatgcattcaaaaacccatacaccaaaaccaagtgtaacaagaagatgtataattttgatgccatcaagaattcattagtttctaattaa

SEQ ID NO: 7813 - protein, 375 aa, Debaryomyces hansenii CBS767
MTVEIAPEYSTHNEFRSDTFTVPTKTMLESIRNSTFGDSVYNEDKTTLMLEKKMCELTGKPAALFCVSGTLSNQIGLRANLFQPPYSILCDYRAHVFIHEAGGLATLSQAMVHPVHPSNGVYLTLEDIAENITPDDGDIHAAPTKLISLENTLHGTIMPIEEIARISAFAKENNIKLHLDGARLWNSAAETGISIEKYCSYFDSVSLCLSKSIGAPVGSILVGEPTLIAKANHFKKQNGGGIRQAGILASMAMVAIDENFAKLPYSHSLAKDVASFCEGHGIALESPAHTNFVFIDLVKNKMDDSLLIELGKKYNVKLMGGRIAFHYQLSEESVENVKRAILECYQDAFKNPYTKTKCNKKMYNFDAIKNSLVSN

SEQ ID NO: 7814 - DNA, 1137 bp, Aspergillus nidulans FGSC A4
  CDS (1)..(1137)
atggcgacctcaaatgcggctaatggcaagcagacaacatggcatggggcgggcgcagccgagttcgatctgcgaagtgatactatgaccaagcccacgccgtccatgcttgaagcgatctgtcagacaacactcctagacgatgttttcgaggaggaccccgtcacgaacgaactgcaaaactatgttgctaagcggaccaaccacgaggctgcgctattggttatgtcgggtacaatgggcaaccaggtcgccattcgcacacacctgaccgagcctccatactctgtcgtttgcgattaccgttcccacattatctgctatgaagcggggggtgtcagcgcatggactggggctacggtgatcccggtcattcccaagaataacacctatcttacactcgaggatgttcaaaagaaagtggtaatcagcaaagatgtccacacgtgccccacaaagttgatcagcctcgaaaacacattagacggaatgatcatgccgttagaggaagctcgcaggattacagaatgggcgcacgaaaatgggatcaaggtacacctcgacggtgctaggttgtgggaagccgttgtttccggggcaggcagcttgcccgaatacagcagcctcttcgacagtatcagtctatgcttttcgaaaggcttaggcgctcccattggtagcatcatagtcggctcggaacttttcataaagaaggcgcgttggttccgcaagtcaattggaggaggcgcccgccaaaccggtgtgctagctgcagccgcaagggttgcccttgatgagacttttgggttagatccctccggcaaggatgggaagctgcgagagacccatatcaaggcgaagcgcgtcgcggacatgtggacgaagcgtggaggaaaactagcctatccggtccaaactaatatggtatggttggatactgaggcatccggccttggaccgaatgacctagcagaaaccggaaaagagaaaggattgaagctcctgggccacaggattgttatccattatcaggtatcagaagatgcaatcgaccgccttgagcaggtgtttgacttggtattgacaggccagcaccaacaaagtactgacaccagcaagccttatggtagccgataa

SEQ ID NO: 7815 - protein, 378 aa, Aspergillus nidulans FGSC A4
MATSNAANGKQTTWHGAGAAEFDLRSDTMTKPTPSMLEAICQTTLLDDVFEEDPVTNELQNYVAKRTNHEAALLVMSGTMGNQVAIRTHLTEPPYSVVCDYRSHIICYEAGGVSAWTGATVIPVIPKNNTYLTLEDVQKKVVISKDVHTCPTKLISLENTLDGMIMPLEEARRITEWAHENGIKVHLDGARLWEAVVSGAGSLPEYSSLFDSISLCFSKGLGAPIGSIIVGSELFIKKARWFRKSIGGGARQTGVLAAAARVALDETFGLDPSGKDGKLRETHIKAKRVADMWTKRGGKLAYPVQTNMVWLDTEASGLGPNDLAETGKEKGLKLLGHRIVIHYQVSEDAIDRLEQVFDLVLTGQHQQSTDTSKPYGSR

SEQ ID NO: 7816 - DNA, 1122 bp, Candida albicans SC5314
  CDS (1)..(1122): transl_table=12
atgacagcagacgaagaagaaacttttaccacttttaatgagttcagaagcgatacatttactgttccaactagggccatggttgaagatggatttatgaatgccacatttggtgattccgtataccaagaagacgaaaccacattacgtttggaaagtaaaatgtgtgagataactgggaaaccagcagctttattttgtgttagtggaaccatgtcaaatcaaattggattaagagctaatcttgttcaacctccatatagtatattatgtgactaccgtgctcatgtgtttttacatgaagctggtggattggctacattgagtcaagctatggtacatccagttcgaccatcaaatggaaattacttgacctttgaagatgttttggcaaatgtaacttatgatgatggagatattcatgctgctccaaccaaagtaatctcgttggaaaataccttacacgggattataattccaatagaagaaatacgtaaaatcagtgaattttgtcgtgaaaatgatatcagattgcatttagacggggccagattatggaatgctagtgtggccaccggaattagtattaaagaatactgttcatattttgacagtgtttcattgtgtttatccaagtcattgggagcaccaattggttcagtattggttggagatgaaaaattcattcgtaaagctaaccatttcaaaaaacaaagtggtggaggaataaggcaggccggtataatgtctgctatggccatacatgctattgattataatctttcaaaacttgaattatcacacaattatgctaaacaaattggcgacttttgccaagaacacggaatcaaattggaatcaccagtggataccagtcttgtgtttctcgatttgaaggccaataaaatggatccgaatagattagttgaattgggaagaacaaagtataacgtcaagcttatgggacaaagaatagcatgtcatttccaattgagtcaagaaagtgttgataatgtgaagaaatgtattttagagtgttttgaatatcatcaaaaacatcctcataaagatgatggtaggaataataagaagatgtatagttttgacgccattaaaaaataa

SEQ ID NO: 7817 - protein, 373 aa, Candida albicans SC5314
MTADEEETFTTFNEFRSDTFTVPTRAMVEDGFMNATFGDSVYQEDETTLRLESKMCEITGKPAALFCVSGTMSNQIGLRANLVQPPYSILCDYRAHVFLHEAGGLATLSQAMVHPVRPSNGNYLTFEDVLANVTYDDGDIHAAPTKVISLENTLHGIIIPIEEIRKISEFCRENDIRLHLDGARLWNASVATGISIKEYCSYFDSVSLCLSKSLGAPIGSVLVGDEKFIRKANHFKKQSGGGIRQAGIMSAMAIHAIDYNLSKLELSHNYAKQIGDFCQEHGIKLESPVDTSLVFLDLKANKMDPNRLVELGRTKYNVKLMGQRIACHFQLSQESVDNVKKCILECFEYHQKHPHKDDGRNNKKMYSFDAIKK

SEQ ID NO: 7818 - DNA, 1566 bp, Strongylocentrotus purpuratus
  CDS (1)..(1566)
atggcgtttgcacattcaaggataatcatagttgttttcattgcggttctggtgatatctgtggaaatacgaccaggacaagcaatcgagacccgaccacaccctaccagtcttgtgtactcacgggatgagctgctaaagttacgggacacttcagcggaaactcgaccgaccggctttgacgacttcccgaaggaatgtaaaccacggaagagaggaattcgcctctgcgttccccgcactaggcgggaacgctttagacgctcatttgtaccagattcaactcacatgttcaacagtatggttggcagctctgcctttgccttgactacagtgacgaacgagttaaaacgtgaagatgtgatccaacaacgagattgctacggcgaaagctcgtatagtccgatgggctggacacggtacaggattgactcagctgccgtcgagttcagaggggatcagggctatgtggttgacttccgtagtgacaccatcaccaagcccaccgatgccatgcgtaaggccatgagcgaggccgtggtaggtgacgatgtctttggagaagaccccacagtcaatgaacttcagcgaaaggtggccaagttgctgaagaaggatgctgccctctttgtaccgacagggacaatgtccaacttgatcgcattgatgagtcatactaccgggcgtggtgaggaggtgttgctaggagaccagtgtcacatcttcgactgggaacaaggtggaatggcacagtttgctggtgtgtgcccacacgtggtcaagaccttgcccgatggaactctggacttggatgagctcgagtccaagatacgacccagcgacattcacatggccagcaccaggctcatctgcatagaaaacacccataattcatcgggaggcaaagtgctccctctagagttcttacagaaggtgagagcaatagcagacaagaacaatctcaaggttcacttagatggggctcgtctcctcaacgcagcggttgctatggacgtaaccccagatgtcatcacgcagtacgtcgattccatcagcatctgtttctcaaagggattgggatgtccagttggatcggctctcgtaggatccaatgacttcattgcaagagctttgaggcacaggaaagccttaggtggaggcatgagacagtgtggcatactagcagctgcagctctggtaggcctagaccaggggtacgcaagactgcatgtggatcatgaaaatgctcagaaattcgccaaaggcatgaaagagctgaacaacccagtcttcacagccaagccagagaatacacagaccaacatggtgcacatcctagtacgagaagacattccttccatgcaagctgcctcgctgctgggcaacgtcgccgatgatgagatcagtacactaggacagagcattcaggtgaaactgtttcccgagaccgaccacacgatgcgagccgttatgaaccaccatatcacagagaaagacgttcaaatggctctcaagaaattcaagttcatcggggaaaagctggacaagaatggtcttggtaaatag

SEQ ID NO: 7819 - protein, 521 aa, Strongylocentrotus purpuratus
MAFAHSRIIIVVFIAVLVISVEIRPGQAIETRPHPTSLVYSRDELLKLRDTSAETRPTGFDDFPKECKPRKRGIRLCVPRTRRERFRRSFVPDSTHMFNSMVGSSAFALTTVTNELKREDVIQQRDCYGESSYSPMGWTRYRIDSAAVEFRGDQGYVVDFRSDTITKPTDAMRKAMSEAVVGDDVFGEDPTVNELQRKVAKLLKKDAALFVPTGTMSNLIALMSHTTGRGEEVLLGDQCHIFDWEQGGMAQFAGVCPHVVKTLPDGTLDLDELESKIRPSDIHMASTRLICIENTHNSSGGKVLPLEFLQKVRAIADKNNLKVHLDGARLLNAAVAMDVTPDVITQYVDSISICFSKGLGCPVGSALVGSNDFIARALRHRKALGGGMRQCGILAAAALVGLDQGYARLHVDHENAQKFAKGMKELNNPVFTAKPENTQTNMVHILVREDIPSMQAASLLGNVADDEISTLGQSIQVKLFPETDHTMRAVMNHHITEKDVQMALKKFKFIGEKLDKNGLGK

SEQ ID NO: 7820 - DNA, 1143 bp, Tribolium castaneum
  CDS (1)..(1143)
atgtacgaaaaagtcaacggtgaaataaacacttcagcggtccacgtggtggacctgcggagcgacaccataagcaagcccacccccgagatgagggaggccatggcgacggcggtcgtcggcgacgacgtcttcggggaagaccccaccgtggccgagcttgagcgccgctcggccgagcttttgggcaaggaggacgccgtcttcgtggccagcggcaccatggccaatttaatcgcaattatggtccactgcagccagcgggggagcgagataatttcaggcgataatgggcacacattcagatttgaacaagggggccccgcccaaattgccggcgtccaagcctcccttatccgcaataacagtgacgggacgttcagtttggacgaactcagagacagaatccggaaaaacccggactgtcatgagccctacaccactctagtcattattgaaaacacccacaacatgtgtggcggaaaagtattaccgttagattggatcgaaaaagtgaaaaacatttcaaaagagtacaacattccggtccatatggacggggctcgcgtcatgaacgccgccgtctacctcaaagtacctgtcgaacgcgtcgtccgggacgtggacaccgtttgcttctgcctgagtaaggggctaggcgcccccattgggtcgattctcgccggcagcaagacttttgtcgacaaggctaggaggacgaggaaggtcctggggggcggctggcggcaggctgggattatcgcagccgcggggctcgtggcccttgacaagatgatcgaccggttgcaggaggaccacgaccacatcttgcaaattgccagagctatcgatagcttaagatcggacatcttcaaagttgacttgccctcaattcacacaaatattttgatgatgtatattgatcggagcaaagtggccgtcaaagaagtcatctatcggttggccaaagtgtttaagaatgatatagtgaaagttagtgttagggcttcctccattcggcccgattgtgtcaggtttgtgacgtactggcagatcaccgatgatgatatcagagatacgatcgacagagttacgtttgttttgaaagaattcgatgaccaattcaagtcgatcaaagcttaa

SEQ ID NO: 7821 - protein, 380 aa, Tribolium castaneum
MYEKVNGEINTSAVHVVDLRSDTISKPTPEMREAMATAVVGDDVFGEDPTVAELERRSAELLGKEDAVFVASGTMANLIAIMVHCSQRGSEIISGDNGHTFRFEQGGPAQIAGVQASLIRNNSDGTFSLDELRDRIRKNPDCHEPYTTLVIIENTHNMCGGKVLPLDWIEKVKNISKEYNIPVHMDGARVMNAAVYLKVPVERVVRDVDTVCFCLSKGLGAPIGSILAGSKTFVDKARRTRKVLGGGWRQAGIIAAAGLVALDKMIDRLQEDHDHILQIARAIDSLRSDIFKVDLPSIHTNILMMYIDRSKVAVKEVIYRLAKVFKNDIVKVSVRASSIRPDCVRFVTYWQITDDDIRDTIDRVTFVLKEFDDQFKSIKA

SEQ ID NO: 7822 - DNA, 1035 bp, Clostridium difficile 630
  CDS (1)..(1035): transl_table=11
atgagatttatcgatttaagaagtgatactgttactatgcctactgacgaaatgagagaagctatggcaaaggctcctgttggagattcaatctttagagatgaccctactgtaaataaacttgaagaattagcagcagctaaagttggaaaagaagatgctattttccttccaagtggaacttttgggaatcaattagctctatttactcattgcctaagagggcaagaaataattattggtaaaggttatcacattgtgactcatgaggttggggcacctgctgtaatagctggagttcagcttagaactatagatgaagacgaaagtggagctctaaatcctgaacttgttgaaaaggcaattagaagagatgacatacatgaaccacagacagggcttatatgtgtagaaaatgcatattcaggtggaacagttgtgagtcttgataatttaagagaaattaaaaaaatagctgagaaacataacttaccagtacatttagatggagcaagattatttaacgcagcattaactttgggtgtagaagctaaagaaatagcaaagtgttgtgatagtgttatgttctgtgtgtcaaaaggtttagctgcaccaatgggttctatacttgctggaagtaaagaatttatagcaaaagctagaagaaagcaaaaagttatgggtgggggaatgagacaagtaggtatagttgcagcagctggtataattgccattgaaaaaatgactttaagattgaatgaagaccatgaaaatgcaaaatatttagcttgtgaattaaataaaattgatggcattgaagtaaataatgttaatccagatataagtatggtattttttaagatgagtgaagatattataaaagaggatgttttaataaaagaattttttgaaagaaatataaaaattaataaaatggaaaatggtgaatatagatttgtaactcatgtagatattactaaggaagatttagactatgttttaaaaacacttaaagaattaataggtgtatcttaa

SEQ ID NO: 7823 - protein, 344 aa, Clostridium difficile 630
MRFIDLRSDTVTMPTDEMREAMAKAPVGDSIFRDDPTVNKLEELAAAKVGKEDAIFLPSGTFGNQLALFTHCLRGQEIIIGKGYHIVTHEVGAPAVIAGVQLRTIDEDESGALNPELVEKAIRRDDIHEPQTGLICVENAYSGGTVVSLDNLREIKKIAEKHNLPVHLDGARLFNAALTLGVEAKEIAKCCDSVMFCVSKGLAAPMGSILAGSKEFIAKARRKQKVMGGGMRQVGIVAAAGIIAIEKMTLRLNEDHENAKYLACELNKIDGIEVNNVNPDISMVFFKMSEDIIKEDVLIKEFFERNIKINKMENGEYRFVTHVDITKEDLDYVLKTLKELIGVS

SEQ ID NO: 7824 - DNA, 1023 bp, Thermus thermophilus HB27
  CDS (1)..(1023): transl_table=11
atgcgcctcgtggacctgaggagcgacaccctcacccgccccaccccggccatgcgcaaggccatggcggaggcggaggtgggggacgacgtctacggcgaagaccccacggtgaaccgcctcgaggccctggcggcggaaaggctcgggtttgaacgggccctcttcctgccctcgggcaccatggccaaccaggtggccctcctcctccacctgccccggggcggcgaggtcctggcccccgagggggcccacctctacgagtacgagctcggcgccccggccctcctcgccggggccctggtccgccccgtgcccgccccaggggggaggccggacctgaaggccctggaggaggccctaaggcggggccccttccaggcccccatcgggctactcgccctggagaacacccacaacctggccggggggcgggtggtgcccctggaggtccaaaggcgggtccaagacctggcccgcgcccggggcctccccacccacctggacggggcccgcctccacaacgccgccgtcttcttgggggtggaggcccgggaggtggcccggggcttcaccaccgccatggtctccctctccaaggggctcggggccccggtgggaagcctcctcctcctgcccaaggagctggaggccgaggcccggcgttaccgcaagctcctcgggggcgggtggcggcaggcgggggtcttggccgcggcggggatcctggccctagaggaaggccccaagcacctccggcgcgaccacgagatggcccgcgccctggcggaggggctttttcgcctggggctcgccgtggacctgggggcggtggagaccaacatggtctacctggaggtggaggaccccgagggctttctccagggtctaagggcccggggggtgctcgcggggcgcgtggggggaagggtgcggttcgtgacccaccgggacctcatggacgaggacatcccccttaccctggagagggtccaagacctccttcactccaggcccaggtag

SEQ ID NO: 7825 - protein, 340 aa, Thermus thermophilus HB27
MRLVDLRSDTLTRPTPAMRKAMAEAEVGDDVYGEDPTVNRLEALAAERLGFERALFLPSGTMANQVALLLHLPRGGEVLAPEGAHLYEYELGAPALLAGALVRPVPAPGGRPDLKALEEALRRGPFQAPIGLLALENTHNLAGGRVVPLEVQRRVQDLARARGLPTHLDGARLHNAAVFLGVEAREVARGFTTAMVSLSKGLGAPVGSLLLLPKELEAEARRYRKLLGGGWRQAGVLAAAGILALEEGPKHLRRDHEMARALAEGLFRLGLAVDLGAVETNMVYLEVEDPEGFLQGLRARGVLAGRVGGRVRFVTHRDLMDEDIPLTLERVQDLLHSRPR

SEQ ID NO: 7826 - DNA, 1065 bp, Desulfotalea psychrophila LSv54
  CDS (1)..(1065): transl_table=11
atgcaggtgaagagcatacaaaatcaacctctcagtcacgatggaacaactatgaagacaatagacttaagaagcgacacggtaacaaaacccactcctaagatgcaagaggccatgtttagagccgaagtaggcgatgatgtctatggcgatgaccccagcatcaacatgctggaggattatgcagcagaacgctttggcttcgaagccgctctcttcacccccagtggcacggcagcaaaccttattgcccttatgtcgcactgcggacgaggcgacgaatatctggtggggcaagatgcccacacctatagatacgagggcggtggcgctgccatactgggaagtatccaaccccagcccattgagtttgcaaaggacggtagcctcgatctcgacaggattgaagaagaaatcaaacccgatgattttcactatgcccgaacccgcctgctctgccttgaaaacacccagggcggcaaggttttacccatggaataccttgagcgagcacgctacttcagcctgcagaagggcctcgccctgcatctcgacggagcccgggccttcaacgccgccgttgcccttgatatcgatatcaagaaaatcaccggtctctttgactcggcgtccatctgcctttcaaaaggtttaggcgcaccggtgggttctcttctctgtggaagtgtgccccttattaaccaggccagaagatggagaaaggtaacaggaggagcgatgcgtcaggcagggtctcttgccgccgctggcctctatgccttggaaaaccatgtagaaagactcagcctggatcatgacaacgccaaacgactccaggagggattgaaaaagtatcccactttttgccaaattagcgaagatgtccaaaccaatatggtctttgttcaatttcaggagagcagacggctggcagagttccttaagacaaaaaatatcctgatctcagaggataagaccacccgccttgtcacccacctcgatatcagtggtgaggatatagactatgtgatcaaacagataggactttttgcaggggccctatag

SEQ ID NO: 7827 - protein, 354 aa, Desulfotalea psychrophila LSv54
MQVKSIQNQPLSHDGTTMKTIDLRSDTVTKPTPKMQEAMFRAEVGDDVYGDDPSINMLEDYAAERFGFEAALFTPSGTAANLIALMSHCGRGDEYLVGQDAHTYRYEGGGAAILGSIQPQPIEFAKDGSLDLDRIEEEIKPDDFHYARTRLLCLENTQGGKVLPMEYLERARYFSLQKGLALHLDGARAFNAAVALDIDIKKITGLFDSASICLSKGLGAPVGSLLCGSVPLINQARRWRKVTGGAMRQAGSLAAAGLYALENHVERLSLDHDNAKRLQEGLKKYPTFCQISEDVQTNMVFVQFQESRRLAEFLKTKNILISEDKTTRLVTHLDISGEDIDYVIKQIGLFAGAL

SEQ ID NO: 7828 - DNA, 1041 bp, Symbiobacterium thermophilum IAM 14863
  CDS (1)..(1041): transl_table=11
atgcgggcaatcgacctgcgaagcgacaccgtaaccaagcccacgccggagatgcggcgggcgatgtacgaggcggaagtcggcgacgatgtgtacggcgaggacccgacgatcaaccggctggaggagcgggccgcggagctcctggggaaggaggcggcgctgttcgtgcccagcggcacgatgggcaaccaggtggcggtgctcacccatacgcgccggggccaggaggtcatcgtcgaggccgagagccacgtctacctgtacgaggtcggcgggatcgccgccctgtcgagctgccaggtgaagaccatccccggcgtgcggggcgcgatggacccggccgcggtggaggcggccatccgggcggacaacgtccacttcccccgcaccgggctggtctgcgtcgagaacacccacaaccgctcgggcggttgtgtgcttccccccgagaacgtggcggccgtcgccgcggtcgcccaccggcacggcatcccggtgcacatggacggcgcccgcatcttcaacgcggccgtggccctggggcggcccgcggccgagctggtcgccccggtggattcggtgatgttctgtctctccaaggggctcgcggccccggtgggctcgctgctcgtgggcagcagggagttcatcgccgaggcccgccgctaccggaagctcctgggcggcggcatgcgccaggccggtgtcctggcggcggccgggctggtcgcgctggagatgatgatcgaccggctggccgacgaccacgccaacgcccgccggctggccgaggggatcgccgggatccccggcctgcgggtggacctggagacggtgcagaccaacatggtcgtggtggagatcgtcgacgaacgctggaccgcgggcgccttcgtgcaggcgctgcggacgcagggcgtgctgtgcaacgacaccgggccgcgcagcgtccggctggtcacccacaaggacgtgactgcggctgacgtggagctggccctcgacgccatcgcccgcacggtgaaggcggggccctag

SEQ ID NO: 7829 - protein, 346 aa, Symbiobacterium thermophilum IAM 14863
MRAIDLRSDTVTKPTPEMRRAMYEAEVGDDVYGEDPTINRLEERAAELLGKEAALFVPSGTMGNQVAVLTHTRRGQEVIVEAESHVYLYEVGGIAALSSCQVKTIPGVRGAMDPAAVEAAIRADNVHFPRTGLVCVENTHNRSGGCVLPPENVAAVAAVAHRHGIPVHMDGARIFNAAVALGRPAAELVAPVDSVMFCLSKGLAAPVGSLLVGSREFIAEARRYRKLLGGGMRQAGVLAAAGLVALEMMIDRLADDHANARRLAEGIAGIPGLRVDLETVQTNMVVVEIVDERWTAGAFVQALRTQGVLCNDTGPRSVRLVTHKDVTAADVELALDAIARTVKAGP

SEQ ID NO: 7830 - DNA, 1005 bp, Pseudomonas fluorescens PfO-1
  CDS (1)..(1005): transl_table=11
atgagcgttatcgatcttcgcagcgacaccgtcactcaaccgactcccgccatgctcgacgcgatgacccgcgccgacaccggtgacgacgtgtatggcgaagatccgacggtcaatcgtctggaagccgaactggcaaaacggctcggttttgctgccgcgctgttcgtcccgaccggcaccatgagcaacctgctgggcttgatggcgcactgcgagcgcggtgacgagtacatcgtcggtcaacaggcacacacctataaatacgaaggcggcggcgcagcggtgctcggctcgattcagccacagccgctggaagtgcaggccgacggctcgctggacctggatcaggtggccgcggcgatcaagcccgacgatttccacttcgcccgcacccgcctgctggcgctggaaaacaccatgcagggcaaagtgttgccgctggactatctggcccgggcccgccagttcactcgggacaacggcctgcaactgcatctggacggcgcgcggctgtacaacgcggcggtcaagctgggggtcgatgcccgggaaatcacccaatatttcgattcggtctcggtgtgcctgtccaaaggcctcggcgcgccggtcggttcggtgctgtgcggttcgtcggcgttgattgcaaaggcccggcgcctgcgcaaaatggtcggtggcggcatgcgtcaggccggactgctggcggcggcggggctgtatgcgctggatcacaacgtggagcgtcttgccgatgaccatgccaacgcacagttgctggccgaaggcttgcgcgaggccggtttcagtgtcgagccggtgcagaccaacatggtttacgtgcagatgggcgaccgtgccgaggcgatcaaggcatttgccgccgaacgcgggatcaagttgagcgctgccgcccgtctgcggatggtcacgcacatggacgtcaatcgctcgcaaatcgagcaagtgatcgcgacattcgtcgagttttcgcgcaagtga

SEQ ID NO: 7831 - protein, 334 aa, Pseudomonas fluorescens PfO-1
MSVIDLRSDTVTQPTPAMLDAMTRADTGDDVYGEDPTVNRLEAELAKRLGFAAALFVPTGTMSNLLGLMAHCERGDEYIVGQQAHTYKYEGGGAAVLGSIQPQPLEVQADGSLDLDQVAAAIKPDDFHFARTRLLALENTMQGKVLPLDYLARARQFTRDNGLQLHLDGARLYNAAVKLGVDAREITQYFDSVSVCLSKGLGAPVGSVLCGSSALIAKARRLRKMVGGGMRQAGLLAAAGLYALDHNVERLADDHANAQLLAEGLREAGFSVEPVQTNMVYVQMGDRAEAIKAFAAERGIKLSAAARLRMVTHMDVNRSQIEQVIATFVEFSRK

SEQ ID NO: 7832 - DNA, 1035 bp, Carboxydothermus hydrogenoformans Z-2901
  CDS (1)..(1035): transl_table=11
gtgaaatttattgatcttcgcagtgatacggtaacaactcctactccaaagatgcgtgaggccatgttttctgccgaggtaggggatgatgtttacggcgatgaccctacggtgcgggaattagaagaacttgctgctcaacgaattggcaaggaagcggccctttttgttcccagtgggaccatggggaatcaactggctcttatgacccatacccagcggggggacgaagtgattctgggggaagattgccatatttttaaatatgaagttggggcaccggcagtattatccggggtgcagctccggggacttaagacaaatggtggcatgatggatttagaggaagtaaaagctgcgatacgacccaacgatattcacatgccgaggacttcccttatttgcctggagaatgcttacagtagcggagaagtagtgccccttcactacctggaaaaaatccgggaaattgctgaaagccacggtcttaaaatccacctggacggggcaagaatttttaatgccgctatttacctgggggttgatgcccgggaaattgccaggtatgccgattcggtcatgttttgtctctccaaaggtttatcggctccggtagggtcaattctcgccggaagtagagagtttgtggaaaaagccaggaaataccggaaattattaggtggaggcatgcggcaggcgggaattttagcggcagcgggaatggtagctttgaaagaaatggtggataggctttgtgaagaccacgaaaatgcattatatcttgcccaaaagttaattaaccttggctttgaagtggatttaaaaaaggtgcagattaacatggtgtgggccagggctaaatcgcatcttaatatagaagatttaccagaaaagcttttagcagaaggaataaaaataaatcctcccattaatgggctgtttcgtttcgtaacccataaagatgttacgaaaggtgatattgataaatttgtcgaaattttagctaaaactatgcaggtaggggaacaggtatga

SEQ ID NO: 7833 - protein, 344 aa, Carboxydothermus hydrogenoformans Z-2901
MKFIDLRSDTVTTPTPKMREAMFSAEVGDDVYGDDPTVRELEELAAQRIGKEAALFVPSGTMGNQLALMTHTQRGDEVILGEDCHIFKYEVGAPAVLSGVQLRGLKTNGGMMDLEEVKAAIRPNDIHMPRTSLICLENAYSSGEVVPLHYLEKIREIAESHGLKIHLDGARIFNAAIYLGVDAREIARYADSVMFCLSKGLSAPVGSILAGSREFVEKARKYRKLLGGGMRQAGILAAAGMVALKEMVDRLCEDHENALYLAQKLINLGFEVDLKKVQINMVWARAKSHLNIEDLPEKLLAEGIKINPPINGLFRFVTHKDVTKGDIDKFVEILAKTMQVGEQV

SEQ ID NO: 7834 - DNA, 1014 bp, Burkholderia sp. 383
  CDS (1)..(1014): transl_table=11
atgatcgatttacgcagcgataccgtgacacgtccgagccaggcaatgctggccgcgatgactgccgccgaaaccggcgacgacgtatggggtgacgacccgaccgtgctgcgcctgcaggcggtgatggccgagcgggccggcaaggaagccggcctgttctttccgagcggcacgcagagcaacctggccgcgctgatggcccattgcgagcgcggcgacgagtacatcgtcggccagctcgcacacacctacaagtacgaaggcggcggcgcggccgtgctgggcagcatccagccgcagccgatcgagaacgcgccggacggcacgctgccgctcgcgaagatcgccgcggcgatcaagccgatcgacaatcacttcgcccgcacgcgcctgctcgcactcgaaaacacgatcggcggccaggtcttgcccgaaggctatgtgcaggaagccactgcgttcgcgcgcagccgcggcttgtccctgcatctggacggcgcacgcgtgtgcaacgcggccgtcgcgtcgggccgttcgatcgccgagctgagcgcgccgttcgacagcgtgtcgatctgcttctcgaaagggctcggtgcgccggtcggctcggtgctggtcggcaaccgcgcgctgatcgagcgcgcacagcgctggcgcaaggtgctcggcggcgcgatgcggcagtcgggcattctcgccgcggcctgcctgtatgcgctcgaccacaatgtcgagcggctcgcggacgatcacgcgaacgccgcgcatctcgccgcaggcctcgcgcgcatcgacaccgtgaaggtgctgtcgcatgcgacgaacatggtgttcgcgcaattccccgaagccgattgcgcgccgctcgaggcgtggctcaaggaacgcggaatcctcacgcagatgctgtacgcgtcgcgcttcgtcacgcactgcgacgtgtcgcgcgcggatatcgatacgttcatcgacgcggtcggtgcgtatttcgcgcagcgccgcgcgtaa

SEQ ID NO: 7835 - protein, 337 aa, Burkholderia sp. 383
MIDLRSDTVTRPSQAMLAAMTAAETGDDVWGDDPTVLRLQAVMAERAGKEAGLFFPSGTQSNLAALMAHCERGDEYIVGQLAHTYKYEGGGAAVLGSIQPQPIENAPDGTLPLAKIAAAIKPIDNHFARTRLLALENTIGGQVLPEGYVQEATAFARSRGLSLHLDGARVCNAAVASGRSIAELSAPFDSVSICFSKGLGAPVGSVLVGNRALIERAQRWRKVLGGAMRQSGILAAACLYALDHNVERLADDHANAAHLAAGLARIDTVKVLSHATNMVFAQFPEADCAPLEAWLKERGILTQMLYASRFVTHCDVSRADIDTFIDAVGAYFAQRRA

SEQ ID NO: 7836 - DNA, 1020 bp, Geobacter metallireducens GS-15
  CDS (1)..(1020): transl_table=11
atgaagatcatcgacctgcggagcgataccgtcaccaggccctgcccggccatgcgggccgctatggctgtagccgaggtgggtgacgacgtctatggcgaggaccccaccgtgaaccgcctcgaagccctggccgccgggatgctcggcaccgaggcggccctcttcgtgacgagcggcacccagtccaacctccttgccatcatgacccactgcgggcggggtgacgagtacatcgccggccagacggcccactgctaccgtttcgaggggggcggcgccgcggtcctcggcggggtccagccccagcccgtggacgtggaacccgacggaacccttgacctcgtgaaagtggccgcggccatcaagcccaacgatccccactttgcccggacacggctcctctgtctggagaacacccaggcggggagggttctccccctcgattacctggctcgcgcccgtacccttgcccgggagcgtggcctcgccctccacctggacggggcgcggctcttcaatgccgccgtggccctcgacgtggaagcccgggagataacggatcatttcgaatcggtgtcggtctgtctctccaaggggctcggcgcgccggtggggtcgcttttgtgcgggagtcgggggtttgtggccgaggcccgacgctggcgcaaggtcctcggcggcggcatgcgccaggcaggtgtcctggccgccgcgggaattgtggccctcacggagaacgtggcgcgcctcgccgaggaccacgccaatgcgcggcgtctggccgaggggctggctgccgtcggcggtctcgatggtgactccgtctcggttcagacgaacatggtgttcctctcgcttccccctgatcatgccgaggcactggcaacctttctctgcgacaggggagttctcatctccggtcgggagcgcatccgccttgtcacccatcgggatgtgacctctgccgacatcgatcgggtagtgggagcctgcggggagtttttcaggcgaccctga

SEQ ID NO: 7837 - protein, 339 aa, Geobacter metallireducens GS-15
MKIIDLRSDTVTRPCPAMRAAMAVAEVGDDVYGEDPTVNRLEALAAGMLGTEAALFVTSGTQSNLLAIMTHCGRGDEYIAGQTAHCYRFEGGGAAVLGGVQPQPVDVEPDGTLDLVKVAAAIKPNDPHFARTRLLCLENTQAGRVLPLDYLARARTLARERGLALHLDGARLFNAAVALDVEAREITDHFESVSVCLSKGLGAPVGSLLCGSRGFVAEARRWRKVLGGGMRQAGVLAAAGIVALTENVARLAEDHANARRLAEGLAAVGGLDGDSVSVQTNMVFLSLPPDHAEALATFLCDRGVLISGRERIRLVTHRDVTSADIDRVVGACGEFFRRP

SEQ ID NO: 7838 - DNA, 1386 bp, Burkholderia thailandensis E264
  CDS (1)..(1386): transl_table=11
gtgacgcgcctgcggcaattcaccgcgctgcggcaacgcgggcgcgggcgcgatgcggcgcgcgcggcgccggccggacgagcgccgggtgcgacgcgggcgacgaatcgagcgccggatcgatggcgaatccacagccggatcgcggcggattcgtcgccggatcgccggcaagttgccgccgatgcgctcgcgagccgctcaccgtatcggcacgcgcgcgccgcatcgcacctgcgcccgcgccgcgtcggccgcgccaagcggcgcgacgccgaattgcgtacactcgaagcctccgcttcgccgcgcgagcgcgcgctcgcgcacggtggaatcctcctcttcgacgagactccgacgagaacccagatgatcgatttacgcagcgataccgtgacgcgcccgagcgcgccgatgctggccgcgatgacggccgcggaagtgggcgacgacgtatggggcgacgatcccaccgtcgcgcgcctgcaggccgtggtcgccgagcgcgcgggcaaggaggcggcgctgttctttccgagcggcacgcagagcaacctcgcggcgctgatgtcgcattgcgagcgcggcgacgaatacatcgtcggccaggccgcgcacacgtacaagtacgagggcggcggcgcggcggtgctcggcagcatccagccgcaaccgatcgagaacgccgccgacggcacgctgccgctcgagaagatcgcggccgcgatcaagccgatcgacgatcacttcgcccgctcgcgcctgttcgcgctcgagaacacgatcggcggcaaggtgctgccggcggattacgtcgacgaggcggtcgcgctcgcgcgcagccgcgggctcgcgacgcatctcgacggcgcgcgcgtgtgtaacgcggccgtcgcatcgggccgcacgctcgcgcagatgtgcgcgccgttcgattcgatctcgatctgcttttcgaaggggctcggcgcgccggtcggctcggtgctcgtcggcagccgcgcgctcatcgaccgcgcgcatcgctggcgcaaggtgctgggcggcggcatgcgccaggcgggggtgctcgcggccgcgtgcctgtatgcgctcgagcacaacgtcgagcgcctcgccgacgatcacgcgaacgccgagcgccttgcgcaagggctcgcgcgaatcgagccggtgaaagtgttgtcgcaggcgacgaacatggtgttcgcgcagattcccgaagccgattgcgcgccgctcgaagcgtggctcgaggagcgcggcattctcacgcagatgctgtatgcgtcgcgcttcgtcacgcactgcgacgtgtcgcgcgacgacatcgacacggccgtcgccgcgatcagcgcgtatttcgcgcgttcgcgcgcttga

SEQ ID NO: 7839 - protein, 461 aa, Burkholderia thailandensis E264
MTRLRQFTALRQRGRGRDAARAAPAGRAPGATRATNRAPDRWRIHSRIAADSSPDRRQVAADALASRSPYRHARAASHLRPRRVGRAKRRDAELRTLEASASPRERALAHGGILLFDETPTRTQMIDLRSDTVTRPSAPMLAAMTAAEVGDDVWGDDPTVARLQAVVAERAGKEAALFFPSGTQSNLAALMSHCERGDEYIVGQAAHTYKYEGGGAAVLGSIQPQPIENAADGTLPLEKIAAAIKPIDDHFARSRLFALENTIGGKVLPADYVDEAVALARSRGLATHLDGARVCNAAVASGRTLAQMCAPFDSISICFSKGLGAPVGSVLVGSRALIDRAHRWRKVLGGGMRQAGVLAAACLYALEHNVERLADDHANAERLAQGLARIEPVKVLSQATNMVFAQIPEADCAPLEAWLEERGILTQMLYASRFVTHCDVSRDDIDTAVAAISAYFARSRA

SEQ ID NO: 7840 - DNA, 1080 bp, Acidobacteria bacterium Ellin345
  CDS (1)..(1080): transl_table=11
atgagcagcactgatacgaagacacactcccctgaagctgtgaagcgcgcatcggttgttgatctgcgctccgacacggtaaccaaaccgtcccccgaaatgcgtcgcgcgatgatggaagccgaagttggcgacgacgtttacggcgaagacccgactatcaatcgacttgaacatcgtgccgccgaaatcttcggacgcgaagcagcgatcctcgttccgaccggaaccatgggaaaccagatcgcaatcaagatccacacccgccccgggcaggaaattatttgcgaagaacgcgcgcacatcaaagactacgagatggcgatgctggcgcaattctccggatgtttgccacggaccgtggccggtgaaaaaggcattccaacctggaagcagatccagcgaaagatccagccaccgacgtattacatcgcgcagactgggttgatcgcgctggaaaacacgcacaacatggcgggcggcaccgtgatccccatcgaaacaatcaatgacatctgcgacggagctcacagcgtcaagctgccggtccacatggacggcgcacgcgtgtttaatgcgtccgcggcgctgggcaagcccgtttcagaaattacgaagaacgtggactcggtgatgttctgcctgtcgaagggactcggcgcgccagttggttccctgctggtaggctcgaaggaattcatccgaatggcgcgcatctaccgcaagtcactcggaggaggtatgcggcaggccggcatcctggctgctgcgggattgatcgcgctggagcaaggaccgaagcgcctgcacgatgaccacgggaacgccaagcacgtggcggagcggctcgcagacattcgcggaatcaacattgacgctgccactgtccagaccaacatcgtgatcttcgacgtgagcggcaccggcatggatacagcggatttcgcgcgcaagcttgccgagaagaacgtgctcgccagcgggatcagcccggagttgatgcgcattgttacgcatctcgacgtagaccgcgcggcatgtgaccatgccgtcaacatgattgaagaaatctgcgcctag

SEQ ID NO: 7841 - protein, 359 aa, Acidobacteria bacterium Ellin345
MSSTDTKTHSPEAVKRASVVDLRSDTVTKPSPEMRRAMMEAEVGDDVYGEDPTINRLEHRAAEIFGREAAILVPTGTMGNQIAIKIHTRPGQEIICEERAHIKDYEMAMLAQFSGCLPRTVAGEKGIPTWKQIQRKIQPPTYYIAQTGLIALENTHNMAGGTVIPIETINDICDGAHSVKLPVHMDGARVFNASAALGKPVSEITKNVDSVMFCLSKGLGAPVGSLLVGSKEFIRMARIYRKSLGGGMRQAGILAAAGLIALEQGPKRLHDDHGNAKHVAERLADIRGINIDAATVQTNIVIFDVSGTGMDTADFARKLAEKNVLASGISPELMRIVTHLDVDRAACDHAVNMIEEICA

SEQ ID NO: 7842 - DNA, 1104 bp, Silicibacter sp. TM1040
  CDS (1)..(1104): transl_table=11
atgccgcgacatcgagacgacacagcgccccggcggcagaaaaggacagcgatcatgagccagtacactcagacacccggagctcgaccgcagcaggtgctatgcgatctgcgcagcgataccgttacgcgtcctgatgccggcatgcgcgctgtgatggccgacgcggaggtcggggatgatgtctatggcgaagatccaagcatcaaccgcctcgagtccgccttggcggagcgcgcaggaaaagaggcggctctgttcctgcccactggcacccagagcaatcttgtcgccatgctggcccattgtggtcgcggcgaggaggtgatcaccgggcgggactaccacgtctacaaatacgaggcgggcggcgcctcggcactgggcggcgttgttctggacgctctgcgcgtctcagaggatggcggattggagcctgcagagattgcagccgccatcaaggaagatgactcgcaccatccgatctcgcggctgctgtcactggagaatacccacaacggtaaggtcgtgtcgctggcgcgattggacaagagcatcgcggtcgcgcgcgacgccgggctcgcagtgcatctggatggggcgcgggttttcaacgcggtgactgcgctgggctgcgagttgaccgacattgctgggcgctttgacagcgtctcgatatgtctctcaaaagggcttggcgcgccggttggctctgttctggttggccccacagaaatcatcgtgcgggcgcgacgtctgcgcaagatggtaggcggcggcatgcgtcaggctggtgttctggcggcagcggggctctatgcgctggagcataacgtgacgcggctcgcagaagatcatgctcgggcagccgagcttgctgagacattgcgcgggctcggggccggcatggtcgcgcacaacaccaatatggtgtttttcacacccgaagcggggaataacgcggcgctcggtgcagcgctagccgaagctggagtggtcatctccgccggtggcaccggcgccattcgaatggtgctccacaaggatgttaccagtgaggggttcgaagcgacattggcggctttgcgatcccattacggataa

SEQ ID NO: 7843 - protein, 367 aa, Silicibacter sp. TM1040
MPRHRDDTAPRRQKRTAIMSQYTQTPGARPQQVLCDLRSDTVTRPDAGMRAVMADAEVGDDVYGEDPSINRLESALAERAGKEAALFLPTGTQSNLVAMLAHCGRGEEVITGRDYHVYKYEAGGASALGGVVLDALRVSEDGGLEPAEIAAAIKEDDSHHPISRLLSLENTHNGKVVSLARLDKSIAVARDAGLAVHLDGARVFNAVTALGCELTDIAGRFDSVSICLSKGLGAPVGSVLVGPTEIIVRARRLRKMVGGGMRQAGVLAAAGLYALEHNVTRLAEDHARAAELAETLRGLGAGMVAHNTNMVFFTPEAGNNAALGAALAEAGVVISAGGTGAIRMVLHKDVTSEGFEATLAALRSHYG

SEQ ID NO: 7844 - DNA, 1026 bp, Myxococcus xanthus DK 1622
  CDS (1)..(1026): transl_table=11
atgaagcgcatcgacttccgttccgacaccgtcacccagcccacggccgccatgcggcgcgccatcgccgaagccgaagtaggggatgacgtttatggcgaagaccccaccgtgctccgtctggaggcacgggtggccgagcggctcggcctggaggccgccgtcttcgtgccctcggggacgcaggccaaccagttggccatcggcgcgcattgccgggcgggcgacgaggtgctcaccgaagcaggcagccacatcctccactacgaagggggcgcggtgcccgccttgtggggcgtgcagccgcagccactgccagggcagcgcggtctgctgtcgccggaggatgtgagcgcggccgtgcgcgaggacaacatccacaacccgcgcacgcgcctgctgtcgctggagaacacgcacaaccggggtggtggttcggtatggccggtggagcgcttccgggccgtcgtggaagcggcgcgcaaggcggggttggccgtccacctggatggagccaggctcttcaacgccggtgtcgccctgggcgtgccggtgtccgcctgggccgcgctgacggacacgacgtccgtgtgtttctcgaagggcctgggcgctccggtgggctcggccctggcggggcgcgcggacgtcattcgcgaggcgcgccggctgcgcaagcggctgggcggtggcatgcggcaggcaggcatcctggcggcggccgcgctgcatgcactggagcaccatgtagagcggctggcggatgaccatgcgaacgcccgcaggctggccgcggggctggcggagctgcccggcgtggaggtggacgcttcgcgggtggagaccaacatggtcttcgcggagttctcccggtccgctctggagatggtggcacgactggagcagcacggggtcctgacgaaccccgcgggtgctcctcggacgctgcgcctcgtcacccacctggatgtgtccgctgccgacatcgacgaagccctgcagcgcatccgccgcgccgtgggctga

SEQ ID NO: 7845 - protein, 341 aa, Myxococcus xanthus DK 1622
MKRIDFRSDTVTQPTAAMRRAIAEAEVGDDVYGEDPTVLRLEARVAERLGLEAAVFVPSGTQANQLAIGAHCRAGDEVLTEAGSHILHYEGGAVPALWGVQPQPLPGQRGLLSPEDVSAAVREDNIHNPRTRLLSLENTHNRGGGSVWPVERFRAVVEAARKAGLAVHLDGARLFNAGVALGVPVSAWAALTDTTSVCFSKGLGAPVGSALAGRADVIREARRLRKRLGGGMRQAGILAAAALHALEHHVERLADDHANARRLAAGLAELPGVEVDASRVETNMVFAEFSRSALEMVARLEQHGVLTNPAGAPRTLRLVTHLDVSAADIDEALQRIRRAVG

SEQ ID NO: 7846 - DNA, 1023 bp, Rubrobacter xylanophilus DSM 9941
  CDS (1)..(1023): transl_table=11
atgatcgatcttcgcagcgacacggtgacccggccctcggaggagatgcgccgggcgatgtacgaggcgccggtcggcgacgacgtgttcggggaggaccccaccgtgaaccggctggaggagtacgtggcggagctgctcggcaaggaggccgccctctacgcgccctccggcacgatgaccaaccagatcgggatccacgtaagcacctcgcggggagacgagatcctggtccacgagggggcgcacgtctacaactacgaggccggggcgcccgccctgctctcgggggtccaggtccggccgctccccggcagggacggcgtgatctctccggagaccgtgcgggacgcgatccggcccgaggacgaccacttcccccgccagcggctgctctgcctggagaacacccacaacgcggcgggcgggaaggtctacccgctggaggagttcgccgccgccgctgccgaggcccggcgccacggcctcagggtgcacctcgacggcgcccgtctcttcaacgcgcaggtggccaccggcatccccgcccgcgagtgggccgcgcacgccgacacggtctccgtctgctcctccaagggcctcggggcgccggtcggctccctgctcgccggggacgcggagaccatccgccgggcccggcgggcgcgcaaggcgttcggcggcgggatgcgccaggccggcgtgatagcggccgcggccctctacgccttccggaacaacgtcgagcggctggcggaggaccacgagcgcgcccggcgcctggcggagggactcgccgccgccggctacgaggtggagcccccggagaccaacatggtgctggtgcgggtggaggacgtgcccggctttctgcgcaagctcgcggagaggggcgtcctcgccaccccggggcgcccggggtacgtccggttctgcacccacctcgacgtcggggacgaggagatcgaacgggctgtggagcgcgccgccggcctcgtctccgcggccgccggccgccgttga

SEQ ID NO: 7847 - protein, 340 aa, Rubrobacter xylanophilus DSM 9941
MIDLRSDTVTRPSEEMRRAMYEAPVGDDVFGEDPTVNRLEEYVAELLGKEAALYAPSGTMTNQIGIHVSTSRGDEILVHEGAHVYNYEAGAPALLSGVQVRPLPGRDGVISPETVRDAIRPEDDHFPRQRLLCLENTHNAAGGKVYPLEEFAAAAAEARRHGLRVHLDGARLFNAQVATGIPAREWAAHADTVSVCSSKGLGAPVGSLLAGDAETIRRARRARKAFGGGMRQAGVIAAAALYAFRNNVERLAEDHERARRLAEGLAAAGYEVEPPETNMVLVRVEDVPGFLRKLAERGVLATPGRPGYVRFCTHLDVGDEEIERAVERAAGLVSAAAGRR

SEQ ID NO: 7848 - DNA, 1014 bp, Shewanella sp. MR-4
  CDS (1)..(1014): transl_table=11
atgatagatttacgcagtgataccgtgacccagccaacagaggcgatgcgcttagccatgtcgagggctgaagtaggtgatgatgtttatggtgatgatccgaccgtcaacagcttgcaagatatggccgccgagatgtttggctttgagagtgcgctgtttaccgcatctggcactcaggccaatttgctcgcgctgatggcacattgtgaacgtggagatgaatatctgtgcggccagcaggcccataactataaattcgagggcggtggtgcggcggtactcgggagcattcagccgcaaccgctgaccaatcagctggatggcaccattgccctgaccgatattgaagcggcgattaaacccgatgatattcacttcgcgcgcacgcgcttattgagcctagaaaacactatcggtggcaaggtattaccccaatcctatcttgctaatgcgcaggcgctggcatttcagcgtggtttaaaaattcacttagatggcgctcgggttgctaatgccgccgtggcccaggggattgggattgccgatattgcggggcattttgattctgtctccatctgtttatccaaggggttgtgtgcgcctgttggctcactgctcctaggtgatgagcgcctaattaaaaaggccacgcgctggcgtaaaatgctgggcggcggtatgcgccaggcggggatattagcggctgcgggtaaattagccctcaccgaacaagttgagcgattaggggaagatcatgagaatgctgcgtattttgctcagcaattaagtttgttgagtgagtttgaaatcgatttggccgccgtacaaaccaatatggtgtttgcaaacctcgcgccccatgtcgatgagcaagccctagcgaaacgttgctgtgaggcggggatcctcatcagccctagccgtactctgcgctttgtgacccataaagatgtctcgcgtcaggacattgataaagtgctgcaagtgtttaaattacatttgcaggtataa

SEQ ID NO: 7849 - protein, 337 aa, Shewanella sp. MR-4
MIDLRSDTVTQPTEAMRLAMSRAEVGDDVYGDDPTVNSLQDMAAEMFGFESALFTASGTQANLLALMAHCERGDEYLCGQQAHNYKFEGGGAAVLGSIQPQPLTNQLDGTIALTDIEAAIKPDDIHFARTRLLSLENTIGGKVLPQSYLANAQALAFQRGLKIHLDGARVANAAVAQGIGIADIAGHFDSVSICLSKGLCAPVGSLLLGDERLIKKATRWRKMLGGGMRQAGILAAAGKLALTEQVERLGEDHENAAYFAQQLSLLSEFEIDLAAVQTNMVFANLAPHVDEQALAKRCCEAGILISPSRTLRFVTHKDVSRQDIDKVLQVFKLHLQV

SEQ ID NO: 7850 - DNA, 1014 bp, Shewanella sp. MR-7
  CDS (1)..(1014): transl_table=11
atgatagatttacgcagtgataccgtgacccagccaacagaggcgatgcgcttagccatgtcgagggctgaagtaggtgatgatgtttatggtgatgatccgaccgtcaacagcttgcaagatatggccgccgagatgtttggctttgagagtgcgctgtttaccgcatctggcactcaggccaatttgctcgcgctgatggcacattgtgaacgtggagatgaatatctgtgcggccagcaggcccataactataaattcgagggcggtggtgcggcggtactcgggagcattcagccgcaaccgctgaccaatcagctggatggcaccattgtcctgaccgatattgaagcggcgattaaacccgatgatattcacttcgcgcgcacgcgcttattgagcctagaaaacactatcggtggcaaggtattaccccaatcctatcttgctaatgcgcaggcgctggcatttcagcgtggtttaaaaattcacttagatggcgctcgggttgctaatgccgccgtggcccaggggattgggattgccgatattgcggggcattttgattctgtctccatctgtttatccaaggggttgtgtgcgcctgttggctcactgctcttaggtgatgagcgcctaattaaaaaggccacgcgctggcgtaaaatgctgggcggcggtatgcgccaggcggggatattagcggctgcgggtaaattagccctcatcgaacaagttgagcgattaggggaagatcatgagaatgctgcgtattttgctcagcaattaagtttgttgagtgagtttgaaatcgatttggccgccgttcaaaccaatatggtgtttgctaacttagcgccccatgtcgatgagcaagccctagcgaaacgttgccgtgaggcggggatcctcatcagccctagccgtaccctgcgttttgtgacccataaagatgtctcgcgtcaggacattgataaagtgctgcaagtgtttaaattacatttgcaggtataa

SEQ ID NO: 7851 - protein, 337 aa, Shewanella sp. MR-7
MIDLRSDTVTQPTEAMRLAMSRAEVGDDVYGDDPTVNSLQDMAAEMFGFESALFTASGTQANLLALMAHCERGDEYLCGQQAHNYKFEGGGAAVLGSIQPQPLTNQLDGTIVLTDIEAAIKPDDIHFARTRLLSLENTIGGKVLPQSYLANAQALAFQRGLKIHLDGARVANAAVAQGIGIADIAGHFDSVSICLSKGLCAPVGSLLLGDERLIKKATRWRKMLGGGMRQAGILAAAGKLALIEQVERLGEDHENAAYFAQQLSLLSEFEIDLAAVQTNMVFANLAPHVDEQALAKRCREAGILISPSRTLRFVTHKDVSRQDIDKVLQVFKLHLQV

SEQ ID NO: 7852 - DNA, 1005 bp, Pseudomonas aeruginosa UCBPP-PA14
  CDS (1)..(1005): transl_table=11
gtgcctgtcatcgacctgcgcagcgacaccgtcacccagcccaccgccggcatgcgcgaagccatggccgcggccgaactgggcgacgacgtctatggcgaggaccccacggtcaaccgcctggaggccgaactggcggcgcgcctgggcttcgccgcggcgctcttcgtaccgaccgggaccatgagcaacctgctcggattgatggcccactgcgagcgcggcgacgaatacatcgtcggccagcaggcgcatacctacaaatacgagggcggcggtgccgcggtgctgggctcgatccagccgcagccgatcgacggcgaggccgacggatcgctcgacctggacaaggtcgcggcggcgatcaaggccgacgacttccatttcgccaggacccgcctgctggccctggaaaacaccatgcagggcaaggtgctgccgctcgactacctggccgcggcgcgcgccttcactcgcgcgcgtggcctggccctgcacctggatggcgcgcgcctgtacaacgcggcggtgaagctgggcgtagacgccagcgagatcacccggcacttcgactcggtgtcggtgtgcctgtccaagggcctcggtgcgccggtgggctcggtgctttgcggcagcgtcgaactgatcggcaaggcccgtcgctggcgcaagatggtcggcggcgggatgcgccaggccggcctgctggcggctgccggcctgtacgccctcgaccaccaggtggcacgcctggccgacgaccacgccaacgccgcgcgcctgggcgacgggctgcgcgaactgggctatgcggtggagccggtgcagaccaacatggtctacgtcgatgtcggcgagcgggcggtcgcgctgcgcgacttcctcgccgagcgcgaggtgcggatcagcgcggcggcgcgtttgcgcctggtcacccacctggacgtttccgccgagtccataggacaagtactggatgccttcgcggcctttcgtcgctcataa

SEQ ID NO: 7853 - protein, 334 aa, Pseudomonas aeruginosa UCBPP-PA14
MPVIDLRSDTVTQPTAGMREAMAAAELGDDVYGEDPTVNRLEAELAARLGFAAALFVPTGTMSNLLGLMAHCERGDEYIVGQQAHTYKYEGGGAAVLGSIQPQPIDGEADGSLDLDKVAAAIKADDFHFARTRLLALENTMQGKVLPLDYLAAARAFTRARGLALHLDGARLYNAAVKLGVDASEITRHFDSVSVCLSKGLGAPVGSVLCGSVELIGKARRWRKMVGGGMRQAGLLAAAGLYALDHQVARLADDHANAARLGDGLRELGYAVEPVQTNMVYVDVGERAVALRDFLAEREVRISAAARLRLVTHLDVSAESIGQVLDAFAAFRRS

SEQ ID NO: 7854 - DNA, 1077 bp, Solibacter usitatus Ellin6076
  CDS (1)..(1077): transl_table=11
atgatcgatctgcgcagcgataccgtcaccaggcccacgcccgccatgcgccaggccatgttcgaagccgaggtcggcgacgacgtttatcgcgaagaccccaccgtcaatcgcctcgaagcccgtgccgctgaaatcgccggcaaagaggcagccctcttcgtccccaccgggaccatggggaacaccatcgccatcaagctgctcaccgagcacggccaggaagtgatctgcgattcgcgcgcccatctgctggattatgagctctccatgatcgcctggttcagcggctgcctcatccgcgccattcccaccgagcgcggcctgctttcctgggacgaagtgcggtgccagatacgccccgtgaacccgtacggcgcgcccaccggcgcggtcgctgtcgaacagacccacaatatggccggcggcaccgtgtaccccatgagcacactgtgcgagatttgcgacggcgcgcacgagcgcggggtccgcgtacatatggatggagcgcgtatattcaatgcctccgccgctctgggcattcccgtgcatgagattgcttctcgcgcggatacattaatgttctgtctctccaaaggactgggtgcgccctccggctccatactcgccggacccgcgcagctcatcgataagggccgcctctatcgcaagcgtctcggcggcggcatgcgccagtccgggatactcgccgcggccggtctcatcgccctggagcaatcgcccgcgaagttgcccgccgaccacgccaacgcgcgattcctggccgagggcctggcgcgcatccctggaattcaaatcgaccccgcgaaggtcgaaaccaatatcgtcgtcttcgatgtctcggccaccggccacgcgcccgccgatatcagcgccggtctgcgccgccgcggcgtcctcatgaacgccatcaacgaacgctgcgtccgtgccgtaacccattgcgatgtggaccgcgcccagtgcgcgcaggcactcgacgccatcgccgaaatcttatcggaaaccccaatcggaacccaggctgccaccactgcctccgctaaaacgtcataa

SEQ ID NO: 7855 - protein, 358 aa, Solibacter usitatus Ellin6076
MIDLRSDTVTRPTPAMRQAMFEAEVGDDVYREDPTVNRLEARAAEIAGKEAALFVPTGTMGNTIAIKLLTEHGQEVICDSRAHLLDYELSMIAWFSGCLIRAIPTERGLLSWDEVRCQIRPVNPYGAPTGAVAVEQTHNMAGGTVYPMSTLCEICDGAHERGVRVHMDGARIFNASAALGIPVHEIASRADTLMFCLSKGLGAPSGSILAGPAQLIDKGRLYRKRLGGGMRQSGILAAAGLIALEQSPAKLPADHANARFLAEGLARIPGIQIDPAKVETNIVVFDVSATGHAPADISAGLRRRGVLMNAINERCVRAVTHCDVDRAQCAQALDAIAEILSETPIGTQAATTASAKTS

SEQ ID NO: 7856 - DNA, 1017 bp, Mycobacterium smegmatis str. MC2 155
  CDS (1)..(1017): transl_table=11
gtgccgtcctccgccttcgcctccgacaatgccgctcccgcccaccccaacgtcctcgacgcgatcaccgccgccaacaccggcgcggctccttcctacggtgctgatcccatcacgcagcgtgccgtcgccgccctacgcaccgcgttcgactcccccgacgccgaggtgctgttcgccctgaccggcaccggcgccaacgtgatcgccctggcggcctccgtgcgcccctggcagtcgatcctgtgcagcgacatcgcacattcactggtcgacgaggccggcgggccggtgcgcctctcgggcgcgcaactcaccgtgctccccagcgacgacggcctgatcgacgccgcggtcctggacgacgccgtcgtccggcgcggtgacgtgcacgcgtcgcaaccggccgtcgtgaccatcacccagagcaccgagaacggccgcgtgtggaccccgcagaccatcaaggacttcatcgaccacgcccatgacctcgggttgctcgtgcacgtcgacggggcacgggtcgccaacgcggtcgcggccctcgacgtcgccccacgcgaggccgtcggtgacgccgacatcgtgactgtcggcggcaccaagaacggcctgctgatgggcgatgcgctcctggtccgccgccccgagctgttcgagggaatccacttcgcgcagaagcagatcggccatctgagcagcaagcagcgcttcatcgcggcgcagttcgaggccatgttgcgcgacgacctgtggctgcgcaacgccgcgcacgccaacgcgatggccgcccggctcagcagcggcatgaccgagcgcggtctcaccctggcctccccgaccgacgccaacgaggtcttcgtcaaccttccggccgccacgttcgcggcggtctccgagcgttacgccgtgcaccgcctcgacccgcgtcaccccgcggtgcggttcgtctgctcgtgggccaccaccgatcaggaagtcgacgatgtgctggcgctcctcggacagttatga

SEQ ID NO: 7857 - protein, 338 aa, Mycobacterium smegmatis str. MC2 155
MPSSAFASDNAAPAHPNVLDAITAANTGAAPSYGADPITQRAVAALRTAFDSPDAEVLFALTGTGANVIALAASVRPWQSILCSDIAHSLVDEAGGPVRLSGAQLTVLPSDDGLIDAAVLDDAVVRRGDVHASQPAVVTITQSTENGRVWTPQTIKDFIDHAHDLGLLVHVDGARVANAVAALDVAPREAVGDADIVTVGGTKNGLLMGDALLVRRPELFEGIHFAQKQIGHLSSKQRFIAAQFEAMLRDDLWLRNAAHANAMAARLSSGMTERGLTLASPTDANEVFVNLPAATFAAVSERYAVHRLDPRHPAVRFVCSWATTDQEVDDVLALLGQL

SEQ ID NO: 7858 - DNA, 996 bp, Nocardioides sp. JS614
  CDS (1)..(996): transl_table=11
gtgatcgacctgcgcagcgacaccctgaccaggccgaccgacgcgatgcgccaggcgatggcgcgcgccgaggtcggtgacgacgtgtacggcgaggacccgacggtcgcgcgcctcgaggagcgggtcgccggcctgctcggccacgaggccgcgctgttcaccccgaccgggtcgatggccaacgtgctggccgtgcgctcgctggtcgggccgggccaggaggtgctctgcgaggccagcgcgcacatcgcccgcgccgagctcggcgcgcacggtgcctacacgggcctgaccatgcgcacctggatccacccgcgcggccaggtcgacctggcggcgatccgcacgatcttcgcccccgacatgggcccgttcttcgtgccgaccgcggccatctcggtcgagaacacccacaacttcgccgggggagcggtgctgccgctcgacgacctgcgcgacctgcgcgagtacgccaccgcagccggcgtcggcgtgcacgtcgacggcgcccggatctggaacgcgcacgtggcgaccggcacgccgctcgcggagtacggcgcgatcgccgacgtgctgtccgtgtgcctctccaagggcctcggcgccccggtcggctccctgatggtgggcagcagcgacgcgatcgccgaggctcgggtgtggcgcaagcggatgggcggcgggatgcgccaggtgggcatcctggccgcggccgggctgcacgcgctcgaccaccacctcgagcggctggccgacgaccacgagcacgcccggctcctggccgaggcctgcggcatcgacccggcggaggtcgacaccaacatcgtggtcgtccaccgcgccgacgccgccgacttcgtcgccgccgcccgggacgaaggggtgctcgtctccgcggtcggccccaccgccgtacgcctggtcacgcacctcgacgtgacccgcgaggacgccgagaaggccgcggcggtgctggcccgcctggcgtga

SEQ ID NO: 7859 - protein, 331 aa, Nocardioides sp. JS614
MIDLRSDTLTRPTDAMRQAMARAEVGDDVYGEDPTVARLEERVAGLLGHEAALFTPTGSMANVLAVRSLVGPGQEVLCEASAHIARAELGAHGAYTGLTMRTWIHPRGQVDLAAIRTIFAPDMGPFFVPTAAISVENTHNFAGGAVLPLDDLRDLREYATAAGVGVHVDGARIWNAHVATGTPLAEYGAIADVLSVCLSKGLGAPVGSLMVGSSDAIAEARVWRKRMGGGMRQVGILAAAGLHALDHHLERLADDHEHARLLAEACGIDPAEVDTNIVVVHRADAADFVAAARDEGVLVSAVGPTAVRLVTHLDVTREDAEKAAAVLARLA

SEQ ID NO: 7860 - DNA, 1023 bp, Croceibacter atlanticus HTCC2559
  CDS (1)..(1023): transl_table=11
atgatagatttaaaaagtgacacgattacaaaacctactaaagggatgcttcaagctatgtttagcgcaaaagttggagacgatgtctataaagaagatcctacggtaaatgagttagaagcccgcttagcagatatgtttggaaagaagaatgcattattttttcctagtggtagtatggctaatcaggcagcaattaaattacacactcagccaggagaacaattaatttgtgacaaatgggctcatgtgtttaattacgaaggtggtggtgtatcgtttaacagtggtgtttcctgtaaattaatagatggtaatagaggcaaaataacagcaaagcaagttgaggagaacattaatgctccagatttttatcatagccctaaaagcagtttggtatgtattgaaaacacaacaaataaaggtggtggtgcttgttatgatttaagtgaattacaagctataaagaaagtaactacagcgcataatttaggttaccacttagatggtgctcgtttgtttaatgcgttggtgcataaaaaacaaaatgctatggattatggaaacttgtttcaaacaatatctgtatgcttatctaaagggttaggtgcgcctgttggttctgtattaataggagatgaagatattatggaaaacgcaatgcgtgttagaaaagtgcttggtggtggtatgaggcaagttgggtatcttgctgctgcaggactttatgcgctggataatcatatagaaagattagaagaagatcaccaaagagcaaaggagatagaaaatgtcctattagatcttagttatataaaaagtgttgagcctgttgaaactaatattgtaatcttttatttagacactaaaatttctggagaaaatttcctaaaccacttaacagataaaggtataattataagtgcaatgggtgaaggtaagtggcgtgttgtaacccatttagattatacagaagagcaacaccaaacatttataaaaacactacaagattttaaaaaataa

SEQ ID NO: 7861 - protein, 340 aa, Croceibacter atlanticus HTCC2559
MIDLKSDTITKPTKGMLQAMFSAKVGDDVYKEDPTVNELEARLADMFGKKNALFFPSGSMANQAAIKLHTQPGEQLICDKWAHVFNYEGGGVSFNSGVSCKLIDGNRGKITAKQVEENINAPDFYHSPKSSLVCIENTTNKGGGACYDLSELQAIKKVTTAHNLGYHLDGARLFNALVHKKQNAMDYGNLFQTISVCLSKGLGAPVGSVLIGDEDIMENAMRVRKVLGGGMRQVGYLAAAGLYALDNHIERLEEDHQRAKEIENVLLDLSYIKSVEPVETNIVIFYLDTKISGENFLNHLTDKGIIISAMGEGKWRVVTHLDYTEEQHQTFIKTLQDFKK

SEQ ID NO: 7862 - DNA, 1014 bp, Pseudoalteromonas tunicata D2
  CDS (1)..(1014): transl_table=11
atgatagattttcgttcagataccgttacacgccccagtgaaaaaatgcgaactgccatagcctctgcattggttggtgacgatgtgtatggagatgaccctaccgttaatcatcttgaacaatttgccgcacagcgacacggttttgccgccgcattattttgtagttctggcactcaagccaacctactggctttaatggcgcattgtgagcgcggcgacgaatatttatgtggtcaacaagctcataactataaatttgaaggcggtggtgccgcggtgcttggttcaattcagcctcaacccattgaaaacgaaaaagatggcacgctcgattttgcaaaacttgcagcggcaatcaaaccaaacgacccacatttcgcccgcacaaaattattaagcctagaaaataccatcaatggtaaagtactgccgctcagttatttagccaaagcacgagaatttgttaaccaacataaccttaagctgcaccttgatggtgcccgtgtttataatgccgcggtagcacaaaatgttgatataaccgaaatcacccagcattttgattcggtcagcatttgtttatcaaaaggccttggcgctcctattggttctttattgttaggtgatgaacagctgatagcgaaagcccggcgctggcgtaaagtgctcggtggcggtatgcgtcaggccggtctactggcggctgctgggcacattgcattgacagaaaacgttgcacgcttagccgatgaccatgctaatgcccgctacttaggtgaatgtttaaacgaactatcaggctttgaagttaatatcaatcacaccgaaaccaatatggtgtttgtcaaaatcgacccaagtatcgatgtgcatgcccttgcctcagcacttaaacaacgcgacattctagtcagcccaagcaacctaatgcgtttagtaatgcatttagatattaatagaagtgatattgaactgtttatccaatgcttaaaatatagtttaaaaggctaa

SEQ ID NO: 7863 - protein, 337 aa, Pseudoalteromonas tunicata D2
MIDFRSDTVTRPSEKMRTAIASALVGDDVYGDDPTVNHLEQFAAQRHGFAAALFCSSGTQANLLALMAHCERGDEYLCGQQAHNYKFEGGGAAVLGSIQPQPIENEKDGTLDFAKLAAAIKPNDPHFARTKLLSLENTINGKVLPLSYLAKAREFVNQHNLKLHLDGARVYNAAVAQNVDITEITQHFDSVSICLSKGLGAPIGSLLLGDEQLIAKARRWRKVLGGGMRQAGLLAAAGHIALTENVARLADDHANARYLGECLNELSGFEVNINHTETNMVFVKIDPSIDVHALASALKQRDILVSPSNLMRLVMHLDINRSDIELFIQCLKYSLKG

SEQ ID NO: 7864 - DNA, 1008 bp, Photobacterium sp. SKA34
  CDS (1)..(1008): transl_table=11
atgatagattttcgttcagatacggtaactcgcccttctccctcaatgcgtcaagctatggcccatgcagttgttggtgacgatgtttatagtgacgatccaaccgttaatgatttagagctttttgcagctgaacgccatggatttgaagctgcacttttttgtagttctggcactcaagctaatttactggcattaatggcgcattgtgagcgtggagatgaatatttatgtggtcaacaggcacataattataaattcgaaggcggtggtgcagctgtattaggttcgatccaacctcaaccgatagaaaataccgctgacggcacacttccctttgaaaaattgacggccgcaattaaacctgacgatcctcattttgccaggacaacacttttaagcctcgagaacacaatcaatggtaaagtgttaccgctaacctaccttcaacaagcgcgtaaatttgttgatcagcataacctaaaacttcaccttgatggtgcgcgtgtttataacgcagccaccgcactcaatgtcgatatcacagaaattgttaaatactttgattctttcaccatttgtttatcaaaaggtttaggtgcaccaattgggtcgctattacttggtgataaagcactaatagccagagcgcgtcgatggcgtaaggttcttggtggcggcatgcgccaagcaggaatcattgcagctgctggtaaaattgcactgactgaaaatacaggccgtttagttgatgaccattccaatgctaagtacttagctgaacaattaaatacagtgaatggttttgaagtaaacacgagtcacgtacaaacaaatatcttattcgcaaaagtcgatagcaaaatagatcaaacccaattagcgacaacattaaaagcacaaaatattttggtctcaacaggaaacccattgcgatttgtcactcatttagacattacaaaagacgatattgattttttcataaccgcattaaaagccgcagtctga

SEQ ID NO: 7865 - protein, 335 aa, Photobacterium sp. SKA34
MIDFRSDTVTRPSPSMRQAMAHAVVGDDVYSDDPTVNDLELFAAERHGFEAALFCSSGTQANLLALMAHCERGDEYLCGQQAHNYKFEGGGAAVLGSIQPQPIENTADGTLPFEKLTAAIKPDDPHFARTTLLSLENTINGKVLPLTYLQQARKFVDQHNLKLHLDGARVYNAATALNVDITEIVKYFDSFTICLSKGLGAPIGSLLLGDKALIARARRWRKVLGGGMRQAGIIAAAGKIALTENTGRLVDDHSNAKYLAEQLNTVNGFEVNTSHVQTNILFAKVDSKIDQTQLATTLKAQNILVSTGNPLRFVTHLDITKDDIDFFITALKAAV

SEQ ID NO: 7866 - DNA, 1023 bp, Flavobacteria bacterium BBFL7
  CDS (1)..(1023): transl_table=11
atgaaaacaaatatgataatagatttaagaagtgatacagtaactaaacctactgcagcaatgatgcaagcaattttaaatgctgaggtaggagatgacgtctataaagaagatccaacggtaaatttattagaacagcgcattgccaatatgttcggtatggaaacagcattgtattttccaacaggaagtatggcaaatcaagcggctataaaattgcatactcaaccaggtgaacagttaatttgtgataaatatgcgcatgtatataactatgaaggtggtggagtatcttttaatagtggtgtgtcttgtaaactagtagatggtgatcgtggaatgattaccgctcaacaggtagaggaaaatataaatccgcctgatttttatcatagtccattaacaacattagtatgtttagaaaacacgactaataaaggtggcggtgcttgctatagcctagatacatttaaagaaattaagtctatcaccgatgaacatcaattaggtttgcatctagatggagcacgattgtggaatgcactagtagccacaggtcagaaccctaaagaatatggggaaatatttgacaccatatctgtttgtttatctaaaggactaggtgcacctatggggactgtattggtaggtaataatgatataatgaaaaatgctataagagtacgtaaagtgctaggtggcggaatgagacaagtaggctttatggctgctgctggattatatgcattagatcatcattttccactgttacaagaggatcataaaagggcacaagaactggctgttgctttatcccagatggctattgttactcatgtagaacctgtagagacgaatatcgtaatatttaatgttagcgatgtaaattcatttataaagtatttaaataatcatcaaataatttatagcgatatggggcaaggaaaattgagattggttacccattatgactatacagcaaaaatgcatgaacaaatgttggcggttttaagaaaattttaa

SEQ ID NO: 7867 - protein, 340 aa, Flavobacteria bacterium BBFL7
MKTNMIIDLRSDTVTKPTAAMMQAILNAEVGDDVYKEDPTVNLLEQRIANMFGMETALYFPTGSMANQAAIKLHTQPGEQLICDKYAHVYNYEGGGVSFNSGVSCKLVDGDRGMITAQQVEENINPPDFYHSPLTTLVCLENTTNKGGGACYSLDTFKEIKSITDEHQLGLHLDGARLWNALVATGQNPKEYGEIFDTISVCLSKGLGAPMGTVLVGNNDIMKNAIRVRKVLGGGMRQVGFMAAAGLYALDHHFPLLQEDHKRAQELAVALSQMAIVTHVEPVETNIVIFNVSDVNSFIKYLNNHQIIYSDMGQGKLRLVTHYDYTAKMHEQMLAVLRKF

SEQ ID NO: 7868 - DNA, 1005 bp, Vibrio sp. Ex25
  CDS (1)..(1005): transl_table=11
atggattttcgatcagataccgttacacagcctacccaagccatgcgagaggccatgtttaaggcccccgttggggatgatgtttatggtgatgaccctacggtcaatgagcttgaggagtttgccgcagagcttgcaggattcgaagcggctttgtttaccacttcaggcacgcaagccaatctgctcggcctaatggcgcattgtgaacgcggagatgaatatctatgtgggcagcaagcacataactacaagtacgaagctggcggcgcagcagtacttgggtcaattcaacctcaaccagtcgaaaataacccagatggcacactcccatttgataaactggcagcggcgattaagccagatgattgtcactttgctcgtaccaagctgctcagcttagaaaatacgattaatggtaaagtattacctctgtcttatttagcagaagcacgtgacttcgtgaataaacataacttgcagatgcatctagatggcgctcgcgtttttaatgcagccgctgcgcttgatgttccggtaaaagaaatcggtcagtattttgattcaatgacgatttgtctgtcgaaaggtttgactgcccctgttggttcgttactgcttggtagcaaagagtacatcgcaaaagcacgtcgcttaagaaagatggtcggcggtggtatgcgtcaagcgggtattcttgccgcagcaggcaaactcgcccttaccgaacaagtggaacagctaaaacaagatcatatcaacgcaaaaaccttagcggaaggtttagctgaactgcctggtttttcagtcaaccctgaatttgttcaaacgaatatcgtattcgcgaagcttgatcctcaagtggacatagtaaatatcgctgcgaaactaaaggaacaaaatatcacgataacacctggaaaccccattcgtttcgtgactcataaagacatttcagcgcaagatatcgacaatttcttatcaagcattaaatctctgctttag

SEQ ID NO: 7869 - protein, 334 aa, Vibrio sp. Ex25
MDFRSDTVTQPTQAMREAMFKAPVGDDVYGDDPTVNELEEFAAELAGFEAALFTTSGTQANLLGLMAHCERGDEYLCGQQAHNYKYEAGGAAVLGSIQPQPVENNPDGTLPFDKLAAAIKPDDCHFARTKLLSLENTINGKVLPLSYLAEARDFVNKHNLQMHLDGARVFNAAAALDVPVKEIGQYFDSMTICLSKGLTAPVGSLLLGSKEYIAKARRLRKMVGGGMRQAGILAAAGKLALTEQVEQLKQDHINAKTLAEGLAELPGFSVNPEFVQTNIVFAKLDPQVDIVNIAAKLKEQNITITPGNPIRFVTHKDISAQDIDNFLSSIKSLL

SEQ ID NO: 7870 - DNA, 1005 bp, Alteromonadales bacterium TW-7
  CDS (1)..(1005): transl_table=11
atgatagattttcgttcagatacggtcaccaagccaacaaaagaaatgcgcgatatcatgtactgtgcaccagtcggtgatgatgtttatggcgacgatgaaagtgtaaataacctagaaaacttcgcttctactcgttttaattttgaagccgcacttttttgtagctctggaacacaagcaaatttacttggtttaatggcacactgtgaacgtggggacgaatatatttgtggccaaaatgcgcataattataaatttgaaggtggtggtgcagcagttctaggctctatacagccacaaccgatagaaaacgaacaaaacggttccattaatttcaataaaatagccgctgcaattaaaccagacgatagccactttgcaaaaacgcgattactaagcctagaaaataccattggcggtaaagtacttagcctagagtaccttgcccaagcacgggactttgttaatgagcataatttagctctgcatttagatggcgcacgtgcgtttaatgcatcagttgagttagaagttgatattaaacaaataacgaaacattttgactctgtgtctatttgcttatctaaagggttaggtgcaccggttggatcattattattggggtcgtcttcgttggtaaataaagctaggcgctggcgtaaagtacttggtggtggtatgcgacaagccggaatgctcgctgctgcggggcaatatgcgcttgaaaataacataagtcgcttaaaagacgatcatgctaatgcgcgctacctagctgaatgtttaagctcacttgaaggctttaacgtagatatgagtaatacgaccaatatggtgtatgcatcttgtgatgaagattttaatattgtagatatagctgcgaaactaaaacagcaaggtgttctaataagcccaagtaaacaactcaggctagttacgcatttaggggtaactcgaaaagatatagacacctttcttaacgcgttatcggcccatatttaa

SEQ ID NO: 7871 - protein, 334 aa, Alteromonadales bacterium TW-7
MIDFRSDTVTKPTKEMRDIMYCAPVGDDVYGDDESVNNLENFASTRFNFEAALFCSSGTQANLLGLMAHCERGDEYICGQNAHNYKFEGGGAAVLGSIQPQPIENEQNGSINFNKIAAAIKPDDSHFAKTRLLSLENTIGGKVLSLEYLAQARDFVNEHNLALHLDGARAFNASVELEVDIKQITKHFDSVSICLSKGLGAPVGSLLLGSSSLVNKARRWRKVLGGGMRQAGMLAAAGQYALENNISRLKDDHANARYLAECLSSLEGFNVDMSNTTNMVYASCDEDFNIVDIAAKLKQQGVLISPSKQLRLVTHLGVTRKDIDTFLNALSAHI

SEQ ID NO: 7872 - DNA, 1017 bp, Marinobacter sp. ELB17
  CDS (1)..(1017): transl_table=11
atgattgattttcgcagtgacaccgttacccgccctacccgggaaatgcgcgaggccatggcctacgcggaggttggtgacgatgtttacggtgaagacccaacagtgaacaacctgcaagcctgtgcagccgagcggctgggcttcgaatctgccctgtttacggccagcggcacccaggccaacctgctggctattatgagccactgcggtcgtggcgacgaatacctgtgtggccagtcagcgcacaactaccgctacgaaggcggtggcgctgccgtgcttggaagcgtgcaacctcagcccatcgagaatgagcccgacggcagcatcaacctcgacaaggcccgcgcagcgataaagcccggtgactttcatttcgccataacgcgcctgctatcgctggaaaacaccatcggcggcaaagtgctatcactggactatcaacgccaggctcgcgccttttgcgatgaccaccggttgcagcttcatctagacggagcccgggtatttaacgcagcggtaaaatcagactgtgatgtaacggacataaccaaacactacgattccgtcagcgtttgcctgtcgaagggattgggcgccccagtggggtcactgttgttgggttcaacagcttttattgagcgcgcaacacgcctgcgcaaaatgctcggcggcggcatgcgccaggcaggaatactggcagcggccgggcgcatcgccctggagcaagggccgctgcgactgcaaaaagaccatgaaaacgcccgctacctaagtaccgggcttgccgcaatttcagagctggaaattgacccgagccgcacccagaccaacatcgtttacgcccgctgccgctctggcaaagccgcggcgctgcgcgattatctggcgagccagggcattcttatcaccgccggtgagcctattcgcttcgtgacccaccaggacgttgataacaacgatgtaaaacagctagtaaccgctattcagcgtttttatcggcagcagccttaa

SEQ ID NO: 7873 - protein, 338 aa, Marinobacter sp. ELB17
MIDFRSDTVTRPTREMREAMAYAEVGDDVYGEDPTVNNLQACAAERLGFESALFTASGTQANLLAIMSHCGRGDEYLCGQSAHNYRYEGGGAAVLGSVQPQPIENEPDGSINLDKARAAIKPGDFHFAITRLLSLENTIGGKVLSLDYQRQARAFCDDHRLQLHLDGARVFNAAVKSDCDVTDITKHYDSVSVCLSKGLGAPVGSLLLGSTAFIERATRLRKMLGGGMRQAGILAAAGRIALEQGPLRLQKDHENARYLSTGLAAISELEIDPSRTQTNIVYARCRSGKAAALRDYLASQGILITAGEPIRFVTHQDVDNNDVKQLVTAIQRFYRQQP

SEQ ID NO: 7874 - DNA, 1239 bp, Ostreococcus tauri
  CDS (1)..(1239)
atgagaaccaagaagaaattccaattctctcatcgcctgcgtcgctcgcgcccgatcgctctctggagtgcgcactgtgcacgcaatcggctcgatgcgtcaccgtgcgacgccgcaaagatgatgaaaacactgagcgatggcgtcgtcgacgctcggagcgacacggtgaccaagccgaccgcgaatatgcgccgagcgatggcggacgcggtggtcggggacgacgtcttgggcgacgacgcgacggtgaaggcgctggagcgagcgatggcgaagcgtttcggattcgagtccgcggtgtacacgccgagcgggacgatggcgaacttactcgcggtcgcgacgcattgcgacgagcgtgggagcgagtgcatttgtggggataagtcgcacgtgcatctgtacgaacagggtgggatgtcatcgctgatgggggtgcactcaagaacgttggcgaatcgagacgatgggacgatcgcaatcgaggacattaagggcgcgattcgggccgtgggagacgatcactttccggtgacgaaggttgtttgtctggagaatacgcagaataagtgcggggggaaggttttgagtcgagagtacgttcgcgaggtgtcggcgctgtgcaagtcgagaggggtcaggttgcacatggatggcgcgcgaatttggaacgcaatcgtgtcgtctggcatcccgacggaagaaatcctcgagggatgtgactctgcgagcgtgtgcctgagcaaagccatcggggcgccggtcggaagcgtgttgctcggtgaaaccgagttcgtgcgaaaggcgaagcgtttgcgcaaagcgctgggaggatcgatgcgacaagtcggtgttttagccgccgccgcgctcgaagccatgactgaagtatttcccatgctcaaggatgatcatgcgcgggcgcgaaaattcgcgagtgcgctcacggggttgaacggattggaagtcatgacgccagactcaaacatggttttcgtgcgcatcaccgcgccgggtgtcacctgcgaaacattcgtggctgaactcgaggataatcacggcatactggtgttaccgacgagtgcggacaccattcgcgtcgtgttccatcatcaaatcacggacagggccgtggagcgcctcatctccggctttcgtgagagccttagtgaacttgcgagaggctcgcacgtgctcgataagctcatgtcacgagtagacgcacttgagacgtaa

SEQ ID NO: 7875 - protein, 412 aa, Ostreococcus tauri
MRTKKKFQFSHRLRRSRPIALWSAHCARNRLDASPCDAAKMMKTLSDGVVDARSDTVTKPTANMRRAMADAVVGDDVLGDDATVKALERAMAKRFGFESAVYTPSGTMANLLAVATHCDERGSECICGDKSHVHLYEQGGMSSLMGVHSRTLANRDDGTIAIEDIKGAIRAVGDDHFPVTKVVCLENTQNKCGGKVLSREYVREVSALCKSRGVRLHMDGARIWNAIVSSGIPTEEILEGCDSASVCLSKAIGAPVGSVLLGETEFVRKAKRLRKALGGSMRQVGVLAAAALEAMTEVFPMLKDDHARARKFASALTGLNGLEVMTPDSNMVFVRITAPGVTCETFVAELEDNHGILVLPTSADTIRVVFHHQITDRAVERLISGFRESLSELARGSHVLDKLMSRVDALET

SEQ ID NO: 7876 - DNA, 1161 bp, Aedes aegypti
  CDS (1)..(1161)
atgtatgcaactagtaatggaacatcggatccaaccgtttcgtcggttcgcgtagtggacttccgatcggacaccgtaagtgttccgacggccaccatgcgcaaggccatgtacgaagccgccgtaggggatgatgtctacggcgaggaccccacggtgaacgaactcgaacggcgtgcggctgctctgcttggcaaggaggcagcgctgtttgtgccgagtggtaccatgggcaatctcctggccgtgatggttcactgcaaccgacgaggatcggaggcgatagtcggagatatggcacatgtgttcctctacgagcaaggaggatcggcccagctagccggtgtactgctgaacaacatcaagaacaaaccggatgggacattttgcctggatgaactgcgtaacaagttccgtggatttgatatccacgaaccgaatacggaactggtgttgatcgaaaacacccacaacatgtgcggtggaaaagtactgccgttgcagtggatggaagatctatcgaatatctgcaaggagaagtcaatcaaactgcacatggatggagcacgcgtattcaacgcagcggagcacttgaaggtaccggtttcccgtgtggtgcgcgatgtcgactcggtttgcttctgtctgagcaaaagtctggcctgcccagtcggatcaatgctggttggatcgaaggattttattaagcaagcccatcgtctgcgcaaagccctcggtggtggaatgaggcaggtgggattcctagcagcggcagcgttggtggctttggatgagattgtacccaagctagccttggaccacgaccgtacaaggaagatcgctgaagctattcacactatgaacagtccgttattcacggtcgatctgaagaacctccactcaaacattctgatggtacaaatactgacccctaaaatcaagtcgtgtgatcttgccaatcgactaaaggaagtaatgccggaggaaatcgagaaaggactcactgatgcctccggtaagggcataagcgtcaagctgagtgcacgcgactggtcatttgcacggattgtgatttacacaaatcttaccgacgaagatgtggacctggccattcagaagattaaatacgtaattgaagagtatcagacaacacttctctga

SEQ ID NO: 7877 - protein, 386 aa, Aedes aegypti
MYATSNGTSDPTVSSVRVVDFRSDTVSVPTATMRKAMYEAAVGDDVYGEDPTVNELERRAAALLGKEAALFVPSGTMGNLLAVMVHCNRRGSEAIVGDMAHVFLYEQGGSAQLAGVLLNNIKNKPDGTFCLDELRNKFRGFDIHEPNTELVLIENTHNMCGGKVLPLQWMEDLSNICKEKSIKLHMDGARVFNAAEHLKVPVSRVVRDVDSVCFCLSKSLACPVGSMLVGSKDFIKQAHRLRKALGGGMRQVGFLAAAALVALDEIVPKLALDHDRTRKIAEAIHTMNSPLFTVDLKNLHSNILMVQILTPKIKSCDLANRLKEVMPEEIEKGLTDASGKGISVKLSARDWSFARIVIYTNLTDEDVDLAIQKIKYVIEEYQTTLL

SEQ ID NO: 7878 - DNA, 1080 bp, Solanum tuberosum
  CDS (1)..(1080)
atggtggtaagaactgtggatcttcgctcagacacagtcactaaaccaactgaagccatgcggaacgcaatggcgaatgctgaagtggatgatgatgtcttaggttatgatccaacagcccaacgccttgaagcagagatggcaaggataacgggcaaagaagcaggattatttgttccttcaggcactatgggtaaccttatcagtgtgctgactcattgccaaatcaggggcagtgagattattctcggtgattattcccatatccatatttatgaaaatggaggcatttccacccttggaggtgttcatccaaggacagtgaagaacaatgaagatggtacaatggatcttgatctgattgaagctgcgattcgagatcctagctttgaaatatgttacccaaccactaggctgatatgcttggagaattcgcaagctcactcagggggcagatgcctttctgcggagtacacagacaaagtcggagagctagcaaagaagtatggtctgaagcttcacattgatggagctcgtatattcaatgcatcagttgcacttggagtgcctgttcataggcttgtacaggctgctgattcagtttcggtatgcttatcaaaaggtcttggtgctccagttggatctgttgttgttggttcgaagagtttcattgccagggccaaaatcctgaggaagactctaggcggtgggatgaggcaaattggtgtcctttgcgctgctgcttttaccgctttacaagagaatcttgttaagctggaaggagatcacagaaaggcaaagagtttggctgcggaacttaacaaaatcaaagggcttaaagttgatgttgctactgtagagactaacattgtatattgcgatatactgaaggggtcaaggatcagcgaaacagaattggtcaagactttggaacagtatggtttacttatactaccagaaggcccactgagagtcagatttgttctacaccaccagatttcagaaagtgatgtacactatgcagtgtcttgccttcagcgagctttagcaggagtggctgaagaaaatggtgacaagtaa

SEQ ID NO: 7879 - protein, 359 aa, Solanum tuberosum
MVVRTVDLRSDTVTKPTEAMRNAMANAEVDDDVLGYDPTAQRLEAEMARITGKEAGLFVPSGTMGNLISVLTHCQIRGSEIILGDYSHIHIYENGGISTLGGVHPRTVKNNEDGTMDLDLIEAAIRDPSFEICYPTTRLICLENSQAHSGGRCLSAEYTDKVGELAKKYGLKLHIDGARIFNASVALGVPVHRLVQAADSVSVCLSKGLGAPVGSVVVGSKSFIARAKILRKTLGGGMRQIGVLCAAAFTALQENLVKLEGDHRKAKSLAAELNKIKGLKVDVATVETNIVYCDILKGSRISETELVKTLEQYGLLILPEGPLRVRFVLHHQISESDVHYAVSCLQRALAGVAEENGDK

SEQ ID NO: 7880 - DNA, 1077 bp, Arabidopsis thaliana
  CDS (1)..(1077)
  misc_feature (1031)..(1031): s is g or c
atggtgatgagaagtgtggatctacgatcagataccgttactagaccgacagatgcgatgcgagaagcaatgtgtaacgcagaggtggatgatgacgtcctcggatatgacccaacggctagacgtcttgaagaggagatggctaagatgatggggaaagaggctgctctgttcgtgccatccgggacaatggggaatctgatcagcgtgatggttcactgcgacgtgagaggcagcgaggtgattcttggcgacaattgtcacatccatgtttacgagaatggagggatatcgactatcgggggagtgcatcctaagacagtcaagaatgaagaagacgggaccatggacttggaggccattgaagcagctattagagatcctaaaggaagcacgttttatccatcaacaaggttgatttgcttggagaacacacatgccaactctggtgggagatgtttgagcgtggaatacactgagaaagttggagagattgcgaagagacatggcgtgaagctccatatcgacggagcccgtcttttcaatgcttccattgcacttggagttccagtccataagcttgttaaggctgcggactccgttcaggtgtgtctctctaaaggtcttggagctccggtaggatctgtaatcgttggttcgcaaagcttcatagagaaggcgaaaacggttaggaaaacattaggtggaggaatgagacaaataggtgttctgtgcgcagccgctttggtcgcactccaagaaaacctcccaaagctacaacatgaccacaagaaggctaagttgttagctgaagggttgaatcaaatgaaagggattagagtaaatgttgcagccgtggagaccaacatgattttcatggatatggaggatggttcaagacttacggctgagaaactgcggaagaatctagaggagaatggcattctccttatccggggaaaatcatcccggatcagaatagttatacaccaccagataacaacaagtgatgtgcattacacattgtcttsctttcagcaagcaatgctaacgatgcaggaaccaagccgaacctaa

SEQ ID NO: 7881 - protein, 358 aa, Arabidopsis thaliana
  misc_feature (344)..(344): The Xaa at location 344 stands for Cys, or Ser.
MVMRSVDLRSDTVTRPTDAMREAMCNAEVDDDVLGYDPTARRLEEEMAKMMGKEAALFVPSGTMGNLISVMVHCDVRGSEVILGDNCHIHVYENGGISTIGGVHPKTVKNEEDGTMDLEAIEAAIRDPKGSTFYPSTRLICLENTHANSGGRCLSVEYTEKVGEIAKRHGVKLHIDGARLFNASIALGVPVHKLVKAADSVQVCLSKGLGAPVGSVIVGSQSFIEKAKTVRKTLGGGMRQIGVLCAAALVALQENLPKLQHDHKKAKLLAEGLNQMKGIRVNVAAVETNMIFMDMEDGSRLTAEKLRKNLEENGILLIRGKSSRIRIVIHHQITTSDVHYTLSXFQQAMLTMQEPSRT

SEQ ID NO: 7882 - DNA, 1059 bp, Arabidopsis thaliana
  CDS (1)..(1059)
atggtgatgagaagtgtggatctacgatcagataccgttactagaccgacagatgcgatgcgagaagcaatgtgtaacgcagaggtggatgatgacgtcctcggatatgacccaacggctagacgtcttgaagaggagatggctaagatgatggggaaagaggctgctctgttcgtgccatccgggacaatggggaatctgatcagcgtgatggttcactgcgacgtgagaggcagcgaggtgattcttggcgacaattgtcacatccatgtttacgagaatggagggatatcgactatcgggggagtgcatcctaagacagtcaagaatgaagaagacgggaccatggacttggaggccattgaagcagctattagagatcctaaaggaagcacgttttatccatcaacaaggttgatttgcttggagaacacacatgccaactctggtgggagatgtttgagcgtggaatacactgagaaagttggagagattgcgaagagacatggcgtgaagctccatatcgacggagcccgtcttttcaatgcttccattgcacttggagttccagtccataagcttgttaaggctgcggactccgttcaggtgtgtctctctaaaggtcttggagctccggtaggatctgtaatcgttggttcgcaaagcttcatagagaaggcgaaaacggttaggaaaacattaggtggaggaatgagacaaataggtgttctgtgcgcagccgctttggtcgcactccaagaaaacctcccaaagctacaacatgaccacaagaaggctaagttgttagctgaagggttgaatcaaatgaaagggattagagtaaatgttgcagccgtggagaccaacatggatggttcaagacttacggctgagaaactgcggaagaatctagaggagaatggcattctccttatccggggaaactcatcccggatcagaatagttatacaccaccagataacaacaagtgatgtgcattacacattgtcttgctttcagcaagcaatgctaacgatgcaggaaccaagccgaacctaa

SEQ ID NO: 7883 - protein, 352 aa, Arabidopsis thaliana
MVMRSVDLRSDTVTRPTDAMREAMCNAEVDDDVLGYDPTARRLEEEMAKMMGKEAALFVPSGTMGNLISVMVHCDVRGSEVILGDNCHIHVYENGGISTIGGVHPKTVKNEEDGTMDLEAIEAAIRDPKGSTFYPSTRLICLENTHANSGGRCLSVEYTEKVGEIAKRHGVKLHIDGARLFNASIALGVPVHKLVKAADSVQVCLSKGLGAPVGSVIVGSQSFIEKAKTVRKTLGGGMRQIGVLCAAALVALQENLPKLQHDHKKAKLLAEGLNQMKGIRVNVAAVETNMDGSRLTAEKLRKNLEENGILLIRGNSSRIRIVIHHQITTSDVHYTLSCFQQAMLTMQEPSRT

SEQ ID NO: 7884 - DNA, 1113 bp, Arabidopsis thaliana
  CDS (1)..(1113)
atggtgacgccaactacaattagaaccgtcgatctccgctccgacacggtgactaaaccaacagagtcaatgcgttcagcaatggcaaacgcggaagtagacgacgacgttttgggaaacgatccaacggctctgcgtttggagaaagaggtggctgagatcgctggaaaagaggcggcgatgtttgttccgtcagggacaatggggaatctgataagcgtgttggtccattgtgatgagagagggagtgaagtgattcttggagacgactctcacattcatatatatgaaaacggcggcgtttcaagcctcggtggtgtgcatccgaggacggtgaagaatgaggaagacggtacgatggagattggtgctattgaagctgccgtgaggagtcccaaaggagatctccatcatccggttactaagcttatatgtcttgagaatactcaagcaaattgtggaggtagatgccttcctatagaatatatagacaaagtcggagaattagccaagaaacatggtttgaagcttcacattgacggagctaggattttcaacgcttctgtggcacttggagttcccgtgaagaggattgttcaagcagctgattctgtctcgatctgtttgtcgaaaggtattggtgcaccggtcggttcggtaatcgtgggaagcaagaagttcattactaaagcaaggtggttaaggaaaacattaggcggaggaatgagacagatcggcgtgctctgcgccgccgcattggtggctctccatgaaaacgtcgccaagctcgaagatgaccataagaaagccagggttttggcagaaggactgaaccggattgaacggttaagagtgaacgttgcagctgtggaaaccaacatcgtaaatccaaaatttggagcagaagaggcatgtaagagcttggaagatgtcggtgtgcttgtcataccccaagctacattcagaatcaggattgttctacaccaccaaatctcagacgtcgacgtggaatatgtactctcttgctttgaggtatgtagtttgctttcatctactgatatgtgctttgatatttttaatttctttgctacgctttattcattcattgattaa

SEQ ID NO: 7885 - protein, 370 aa, Arabidopsis thaliana
MVTPTTIRTVDLRSDTVTKPTESMRSAMANAEVDDDVLGNDPTALRLEKEVAEIAGKEAAMFVPSGTMGNLISVLVHCDERGSEVILGDDSHIHIYENGGVSSLGGVHPRTVKNEEDGTMEIGAIEAAVRSPKGDLHHPVTKLICLENTQANCGGRCLPIEYIDKVGELAKKHGLKLHIDGARIFNASVALGVPVKRIVQAADSVSICLSKGIGAPVGSVIVGSKKFITKARWLRKTLGGGMRQIGVLCAAALVALHENVAKLEDDHKKARVLAEGLNRIERLRVNVAAVETNIVNPKFGAEEACKSLEDVGVLVIPQATFRIRIVLHHQISDVDVEYVLSCFEVCSLLSSTDMCFDIFNFFATLYSFID

SEQ ID NO: 7886 - DNA, 1125 bp, Candida albicans
  CDS (1)..(1125): transl_table=12
atgacagcagacgaagaagaaacttttaccacctttaatgagttcagaagcgatacattcactgttccaactagggccatggttgaagatggatttatgaatgccacatttggtgattccgtataccaagaagacgaaaccacattacgtttggaaagtaaaatgtgtgagataactgggaaaccagcagctttattttgtgttagtggaaccatgtcaaatcaaattggattaagagctaatcttgttcaacctccatatagtatattatgtgactaccgtgctcatgtgtttttacatgaagctggtggattggctacattgagtcaagctatggtacatccagttcgaccatcaaatggaaattacttgacctttgaagatgttttgggcaatgtaacttatgatgatgatggagatattcatgctgctccaaccaaagtaatctcattggaaaataccttacacggaatcataattccaatagaagaaatacgtaaaatcagtgaattttgtcgtgaaaatgatatcaggttgcatttagacggggccagattatggaatgctagtgtggcaaccggaattagtattaaagaatactgttcatattttgacagtgtttcattgtgtttatccaagtcattgggagcaccaattggttcagtattggttggagatgaaaaattcattcgtaaagctaaccatttcaaaaaacaaagtggtggaggaataaggcaggccggtataatgtctgctatggccatacatgctattgattataatctttcaaaacttgaattatcacacaattatgctaaacaaattggcgacttttgccaagaacacggaatcaaattggaatcaccagtggataccagtcttgtgtttctcgatttgaaggccaataaaatggatccgaatagattagttgaattgggaagaacaaagtataacgtcaagcttatgggacaaagaatagcatgtcatttccaattgagtcaagaaagtgttgataatgtgaagaaatgtattttagagtgtttggaatatcatcaaaaacatcctcataaagatgatggtaggaataataagaagatgtatagtttggacgccattaaaaaataa

SEQ ID NO: 7887 - protein, 374 aa, Candida albicans
MTADEEETFTTFNEFRSDTFTVPTRAMVEDGFMNATFGDSVYQEDETTLRLESKMCEITGKPAALFCVSGTMSNQIGLRANLVQPPYSILCDYRAHVFLHEAGGLATLSQAMVHPVRPSNGNYLTFEDVLGNVTYDDDGDIHAAPTKVISLENTLHGIIIPIEEIRKISEFCRENDIRLHLDGARLWNASVATGISIKEYCSYFDSVSLCLSKSLGAPIGSVLVGDEKFIRKANHFKKQSGGGIRQAGIMSAMAIHAIDYNLSKLELSHNYAKQIGDFCQEHGIKLESPVDTSLVFLDLKANKMDPNRLVELGRTKYNVKLMGQRIACHFQLSQESVDNVKKCILECLEYHQKHPHKDDGRNNKKMYSLDAIKK

SEQ ID NO: 7888 - DNA, 1131 bp, Schizosaccharomyces pombe
  CDS (1)..(1131)
atgagcggatccgttacttctacgactaccgaaacaagattatgcccttccaaccaagggagcgctaaaaagtatcgtccttggaatgatttccgtagtgacactttgactgttcctaccgatgaaatgcgtcgcatcatgtatgaggcctctgatggtgattgcgtttatgaggaagatgaggatactagaaagttggaagtttatgttgcaaagttgactggtaaggaagctgctttgttcgtaacatctggtactcaaggtaatcagttgtgtattcgtagtcatttgcatcaacctcctcatagtatcatttgtgatgatcgcgcccatatttataactgggaagcgggtgcaattggtttgtttacgcaagctattgttcgtcctatttctccaaaaaataatgtatatattactgccgaggaaattgagaacaagcttatcctgggaaatgatattcacttttcacccactgggttgatttgtttagaaaatactattaaaggtgctgtcgttccattggatgaagtggctcgtatatctggtttagctaaggctcacaagatccccctgcattgcgacggtgctcgcttatgggatgctgctgttgcttccaacgtttcaattaaggagtactgctcttactttgattccgttagtctttgcctaagcaaaggtcttgcggctcctgttggtagcattattgtgggaccacgagactttattgctaaagccaaatggttccgtaaggcttatggtggtggattgagacaatctggtatgcttgctgctgcaggattatactcaattcagcataactttcctttgttgaagcaggtccataaatatgctattgaagtcgccgaatacgcagaatctcttggaattgagcttgaagttcccactcaaagtaacatggtgacattggccaatatcaacgttgctattctttgcgatgaagccaaaaagtctggaatcattttaatgggacctcgtatcgtgtttcatattcagatcactcctgatgctgtcgagattttgaagaacgttttacgtcgcacagttgagcgtcaagcagttgaaacccatattgttgccaaacctggtgagttttgtgtcggctattaa

SEQ ID NO: 7889 - protein, 376 aa, Schizosaccharomyces pombe
MSGSVTSTTTETRLCPSNQGSAKKYRPWNDFRSDTLTVPTDEMRRIMYEASDGDCVYEEDEDTRKLEVYVAKLTGKEAALFVTSGTQGNQLCIRSHLHQPPHSIICDDRAHIYNWEAGAIGLFTQAIVRPISPKNNVYITAEEIENKLILGNDIHFSPTGLICLENTIKGAVVPLDEVARISGLAKAHKIPLHCDGARLWDAAVASNVSIKEYCSYFDSVSLCLSKGLAAPVGSIIVGPRDFIAKAKWFRKAYGGGLRQSGMLAAAGLYSIQHNFPLLKQVHKYAIEVAEYAESLGIELEVPTQSNMVTLANINVAILCDEAKKSGIILMGPRIVFHIQITPDAVEILKNVLRRTVERQAVETHIVAKPGEFCVGY

SEQ ID NO: 7890 - DNA, 1164 bp, Saccharomyces cerevisiae
  CDS (1)..(1164)
atgactgaattcgaattgcctccaaaatatatcaccgctgctaacgacttgcggtcagacacattcaccactccaactgcagagatgatggaggccgctttagaggcctctatcggtgacgctgtctacggtgaagatgttgacaccgttaggctcgaacagaccgttgcccgcatggctggcaaagaagcaggtttgttctgtgtctctgggactttgtccaaccagattgccatcagaactcacttgatgcaacctccatactctattctatgtgattacagggctcacgtttacactcacgaagccgctggactggcgatcttgtctcaagcgatggtggttcctgtggttccttccaacggtgactacttgaccttggaagacatcaagtcacactacgtcccagacgacggtgatattcacggtgcccccaccagattgatttctctggaaaacactttacacggtattgtttatccattggaagaactggtccgcatcaaagcttggtgtatggaaaatggtctcaaactacattgtgacggtgccagaatctggaatgccgctgcacaatctggcgtgccattaaagcaatatggggaaatcttcgactccatctccatctgtctatccaagtctatgggtgctcctattgggtccgtcttggttgggaaccttaagtttgtcaagaaggccacccatttcagaaaacaacaaggtggtggtattagacaatctggtatgatggctagaatagctcttgtaaacatcaacaacgattggaagtcccaattgctgtactcgcactctttggctcatgaattagccgaatattgtgaggcaaagggcatcccgctagagtctccagcagacaccaactttgtctttattaacctgaaggccgctagaatggacccagatgtccttgttaagaagggtttgaagtacaacgttaagctaatgggtggtagagtctcgttccactatcaagtcaccagagatactttggaaaaagtcaaattggccatctccgaggccttcgactatgctaaagaacatcctttcgactgtaacggacctacccagatttaccgtagtgaatccaccgaggtcgacgttgatggcaacgctatccgcgaaataaaaacctacaaatactga

SEQ ID NO: 7891 - protein, 387 aa, Saccharomyces cerevisiae
MTEFELPPKYITAANDLRSDTFTTPTAEMMEAALEASIGDAVYGEDVDTVRLEQTVARMAGKEAGLFCVSGTLSNQIAIRTHLMQPPYSILCDYRAHVYTHEAAGLAILSQAMVVPVVPSNGDYLTLEDIKSHYVPDDGDIHGAPTRLISLENTLHGIVYPLEELVRIKAWCMENGLKLHCDGARIWNAAAQSGVPLKQYGEIFDSISICLSKSMGAPIGSVLVGNLKFVKKATHFRKQQGGGIRQSGMMARIALVNINNDWKSQLLYSHSLAHELAEYCEAKGIPLESPADTNFVFINLKAARMDPDVLVKKGLKYNVKLMGGRVSFHYQVTRDTLEKVKLAISEAFDYAKEHPFDCNGPTQIYRSESTEVDVDGNAIREIKTYKY

SEQ ID NO: 7892 - DNA, 1017 bp, Aeromonas jandaei
  CDS (1)..(1017): transl_table=11
atgcgctatatcgatttacgaagtgatacggtcacccagcccacggatgccatgcgtcagtgcatgctccatgccgaggtcggggatgatgtttatggggaggatccgggcgtcaacgcgttggaagcctatggcgccgacctgctgggaaaagaggctgcgctgttcgtgccatccggcaccatgtccaacttgctggcggtgatgagccattgccagcgtggggaaggggctgtgctgggctcggcagcccacatctatcgctatgaggcgcagggttctgctgtgctggggtctgtggccctgcaacctgtgcccatgcaggctgatggctcgctggcgctggcggatgtgcgggcggccatcgcccctgacgatgtccattttaccccgactcgcctcgtctgcctcgaaaacacccataacggcaaggtgctgcccttgccttatctgcgcgagatgcgcgaactggtcgatgagcatggtttgcagttgcatctggacggtgctcgtctgttcaatgccgtggtggcgagtggccatacggtgcgcgaactggtcgcgccgtttgacagtgtctccatctgcctctccaaggggctgggcgcgccggtgggatcgctgctggtgggttctcatgcctttattgcccgtgccagaaggctgcgcaagatggtggggggcggtatgcgtcaggcggggatcctggctcaggctggcctgtttgcgttgcagcagcatgtggtacgcctcgcggacgatcatcgccgtgccagacagttggccgaggggctggctgcgctgcctggcatcaggctggatctggcgcaggttcagaccaacatggtgttcctgcaactgacgagtggcgagagtgcacccttgctggccttcatgaaggcgcgggggatcctcttctccggttatggtgagctgcggttggtgacccatctgcagatccacgatgatgacattgaagaggtgattgacgcctttaccgagtatctcggggcgtga

SEQ ID NO: 7893 - protein, 338 aa, Aeromonas jandaei
MRYIDLRSDTVTQPTDAMRQCMLHAEVGDDVYGEDPGVNALEAYGADLLGKEAALFVPSGTMSNLLAVMSHCQRGEGAVLGSAAHIYRYEAQGSAVLGSVALQPVPMQADGSLALADVRAAIAPDDVHFTPTRLVCLENTHNGKVLPLPYLREMRELVDEHGLQLHLDGARLFNAVVASGHTVRELVAPFDSVSICLSKGLGAPVGSLLVGSHAFIARARRLRKMVGGGMRQAGILAQAGLFALQQHVVRLADDHRRARQLAEGLAALPGIRLDLAQVQTNMVFLQLTSGESAPLLAFMKARGILFSGYGELRLVTHLQIHDDDIEEVIDAFTEYLGA

SEQ ID NO: 7894 - DNA, 972 bp, Oryza sativa
  CDS (1)..(972)
atggtgaccaacgtggtggacctacggtcggacacggtgacgaagccctccgacgcgatgcgcgccgccatggccgccgcggacgtggacgacgacgtccttggcgccgacccgaccgcgcaccgcttcgagatggagatggcgaggatcacgggcaaggaggccgcgctgttcgtgccgtccggcaccatggccaacctcatctccgtcctcgtccactgcgacaccaggggcagcgaggtcatcctcggcgacaactcccacatccatatctacgagaacggcgggatctccaccatcggcggcgtccaccccaagaccgtcaggaacaaccccgatggaaccatggacatcgacaagattgtcgtcgccatcaggcatccggatggggcgctgtattatccgaccacaaggctgatctgcctggagaatacccatgcaaactgtggtggaaagtgtctgtctgctgaatatactgacgaggttggtgaagttgccaagagtcatggtctgaagcttcacatagatggagctcgcatttttaatgcttctgtggcccttggagttcctgttcatcgacttgtgaaagctgcggattcagtctcggtgtgcatatctaaagggttaggcgctcctgttggatcagttattgttggttcgacggccttcatagaaaaggctaaaattcttaggaagacactaggtggtggaatgaggcaagtgggaattctttgtgcggctgcctatgttgccgttcgcgacactgtaggaaaacttgctgatgaccatagaagggctaaagttttagcagatggtctgaagaaaatcaagcattttagagttgatacaacttcagtggagaccaatatggtattctttgatattgtggattcacgcatatcacctgacaaactgtgtcaagtccttgaacaacgcaatgtgcttgccatgccagcaggctcgaagaggtga

SEQ ID NO: 7895 - protein, 323 aa, Oryza sativa
MVTNVVDLRSDTVTKPSDAMRAAMAAADVDDDVLGADPTAHRFEMEMARITGKEAALFVPSGTMANLISVLVHCDTRGSEVILGDNSHIHIYENGGISTIGGVHPKTVRNNPDGTMDIDKIVVAIRHPDGALYYPTTRLICLENTHANCGGKCLSAEYTDEVGEVAKSHGLKLHIDGARIFNASVALGVPVHRLVKAADSVSVCISKGLGAPVGSVIVGSTAFIEKAKILRKTLGGGMRQVGILCAAAYVAVRDTVGKLADDHRRAKVLADGLKKIKHFRVDTTSVETNMVFFDIVDSRISPDKLCQVLEQRNVLAMPAGSKR

SEQ ID NO: 7896 - DNA, 1077 bp, Brassica napus
  CDS (1)..(1077)
atggtgatgagaatcgtggatctacgttcagacaccgtgactaggcccactgatgcaatgcgcgaagcaatggctagtgcagaggtggacgatgacgtcctcggctacgatccaacggctcgaggtcttgaagaggagatggctaagatgatggggaaagaagcggctctgttcgtcccatctggtacgatggggaatctgatttgcgttatggttcactgcgacgtgagaggcagcgaggtgattcttggggacacttgtcacatccatgtgtacgagaacggagggatatcaacaataggtggcgtgcatcctaagacaatcaagaatgaagaagatgggacaatggacttggtggctatagaagcagctattagagatcctaaaggaagcacgttttatccatctacaaggttgatttgtttggagaacacacatgccaactctggtgggagatgtttgagtgcggagtacactgatagagttggagagattgctaagagacatggattgaagcttcatgtcgatggagctcgcatttttaatgcttccgttgcacttggagttccagtacataggcttgtgaaggctgctgactctgtttcggtgtgtctctctaaaggtcttggagctccgataggatctgtaatcgttggttcacagagtttcatagaaaaggccaaaacgttaaggaaaacattaggtggaggaatgagacagataggcgtcctgtgtgcagccgctttggtcgcactccaagagaacctcccaaagctacaatctgaccacaagaagacaaagttgttagctgaagggttgaacaaaatgaaagggattagagtgaacgttgcagccatggaaaccaacatgatattcatggatatggaggatggatcaagactgaccgctgaaaaactccgcaagagtctaaccgagcatggcattctagtcatccctgaaagctcttcacgaatcagaatggttatacaccaccagataacaacaagtgatgtgcattacacattgtcttgcttacaacaagcagtgcagacgattcaggaaccatgccagaactaa

SEQ ID NO: 7897 - protein, 358 aa, Brassica napus
MVMRIVDLRSDTVTRPTDAMREAMASAEVDDDVLGYDPTARGLEEEMAKMMGKEAALFVPSGTMGNLICVMVHCDVRGSEVILGDTCHIHVYENGGISTIGGVHPKTIKNEEDGTMDLVAIEAAIRDPKGSTFYPSTRLICLENTHANSGGRCLSAEYTDRVGEIAKRHGLKLHVDGARIFNASVALGVPVHRLVKAADSVSVCLSKGLGAPIGSVIVGSQSFIEKAKTLRKTLGGGMRQIGVLCAAALVALQENLPKLQSDHKKTKLLAEGLNKMKGIRVNVAAMETNMIFMDMEDGSRLTAEKLRKSLTEHGILVIPESSSRIRMVIHHQITTSDVHYTLSCLQQAVQTIQEPCQN

SEQ ID NO: 7898 - DNA, 1077 bp, Brassica napus
  CDS (1)..(1077)
atggtgatgagaatcgtggatctacgttcagacaccgtgacaagacccactgatgcaatgcgcgaagcaatggctagtgcagaggtggacgatgacgtcctcggctacgacccaacggctcgacgtcttgaagaggagatggctaagatgatggggaaagaagcggctctgttcgtgccatctggtacgatggggaatctgatatgcgttatggttcactgcgacgtgagaggcagcgaggtgattcttggggacacttgtcacatccatgtgtacgagaacggagggatatcaacaataggtggagtgcatcccaagacaatcaagaatgaagaagatgggacaatggacttggtggctatagaagcagctattagagatcctaaaggaagcacgttgtatccatcaacaaggttgatttgtttggagaacacacatgccaactctggtggaagatgtttgagtgcggagtacactgatagagttggagagattgccaagagacatggattgaagcttcatgtcgatggagctcgcatttttaatgcttccattgcacttggagttccagtccataggcttgtaaaggctgctgactctgtttcggtgtgtctctctaaaggtcttggagctccaataggatctgtaatcgttggttcacagagtttcatagaaaaggccaaaacgttaaggaaaacattaggtggaggaatgagacaaataggcgtcctgtgcgcagccgctttggtcgcactccaagagaatctcccaaagttacaatttgaccacaagaagacaaaattgttagctgaagggttgaatcaaatgaaagggattagagtgaacgttgcagccgtggagaccaacatgattttcatggatatggaggatggatcaaaacttaccgctgagaagctgcgcaagagtttaactgagtatggcattcttgtcatcccggaaaactcgtcccggatcagaatggttatacaccaccagataactacaagtgatgtgcactacacattgtcttgctttcaacaagcagtgcaaatgattcaggaaccaagccgaaactaa

SEQ ID NO: 7899 - protein, 358 aa, Brassica napus
MVMRIVDLRSDTVTRPTDAMREAMASAEVDDDVLGYDPTARRLEEEMAKMMGKEAALFVPSGTMGNLICVMVHCDVRGSEVILGDTCHIHVYENGGISTIGGVHPKTIKNEEDGTMDLVAIEAAIRDPKGSTLYPSTRLICLENTHANSGGRCLSAEYTDRVGEIAKRHGLKLHVDGARIFNASIALGVPVHRLVKAADSVSVCLSKGLGAPIGSVIVGSQSFIEKAKTLRKTLGGGMRQIGVLCAAALVALQENLPKLQFDHKKTKLLAEGLNQMKGIRVNVAAVETNMIFMDMEDGSKLTAEKLRKSLTEYGILVIPENSSRIRMVIHHQITTSDVHYTLSCFQQAVQMIQEPSRN

SEQ ID NO: 7900 - DNA, 1077 bp, Brassica napus
  CDS (1)..(1077)
atggtgatgagaatcgtggatctacgttcagacaccgtgacaagacccactgatgcaatgcgcgaagcaatggctagtgcagaggtggacgatgacgtcctcggctacgacccaacggctcgacgtcttgaagaggagatggctaagatgatggggaaagaagcggctctgttcgtgccatctggtacgatggggaacctgatatgcgttatggttcactgcgacgtaagaggcagcgaggtgattcttggtgacacttgtcacatccatgtgtacgagaacggagggatatcgacaataggtggagtgcatcccaagacaatcaggaatgaagaagatgggacaatggacttggtggctatagaagcagctattagagatcctaaaggaagcacgttgtatccatcaacaaggttgatttgtttggagaacacacatgccaactctggtggaagatgtttgagtgcggagtacactgatagagttggagagattgccaagagacatggattaaagcttcatatcgatggagctcgcctttttaatgcttccattgcacttggagttccagtccataggcttgtacaggctgctgactctgtttcggtgtgtctctctaaaggtcttggagctccaataggatctgtagtcgttggttcacagagtttcatagaaaaggcgaaaacgttaaggaaaacattaggtggaggaatgagacaaataggcgtcctgtgcgcagccgctttggtcgcacttcaagagaatctcccaaagttacaatttgaccacaagaagacaaaattgttagctgaagggttgaatcaaatgaaagggattagagtgaacgttgcagccgtggagaccaacatgattttcatggatatggaggatggatcaaaacttaccgctgagaagctgcgcaagagtttaactgagtatggcattcttgtcatcccggaaaactcgtcccggatcagaatggttatacaccaccagataactacaagtgatgtgcactacacattgtcttgctttcaacaagcagtgcaaatgattcaggaaccaagccgaaactaa

SEQ ID NO: 7901 - protein, 358 aa, Brassica napus
MVMRIVDLRSDTVTRPTDAMREAMASAEVDDDVLGYDPTARRLEEEMAKMMGKEAALFVPSGTMGNLICVMVHCDVRGSEVILGDTCHIHVYENGGISTIGGVHPKTIRNEEDGTMDLVAIEAAIRDPKGSTLYPSTRLICLENTHANSGGRCLSAEYTDRVGEIAKRHGLKLHIDGARLFNASIALGVPVHRLVQAADSVSVCLSKGLGAPIGSVVVGSQSFIEKAKTLRKTLGGGMRQIGVLCAAALVALQENLPKLQFDHKKTKLLAEGLNQMKGIRVNVAAVETNMIFMDMEDGSKLTAEKLRKSLTEYGILVIPENSSRIRMVIHHQITTSDVHYTLSCFQQAVQMIQEPSRN

SEQ ID NO: 7902 - DNA, 1134 bp, Zea mays
  CDS (1)..(1134)
atggcgaccaaggtggtggtggacctgcggtccgacacggtcaccaagccttccgaggccatgcgcgcgtccatggccgcggccgacgtcgtcgacgacgtccggggcgcggacccgaccgcgcgccgcttccaggaggagatggcggagctcatgggcaaggaggccgcgctcttcgtcccgtcggggaccatgggcaacctcgtgtccgtcctcgcgcactgcgacgtccgcggcagcgaggtcatcctcggcgacgactcgcacatccacctctacgagaacggcggcatctccaccctcggcggcgtgcaccctaagaccgtcagaaacaactccgacggcaccatggacatcgacagcatcgtcgctgcaatcaggcctcccggcgggggcctgtattatccgaccaccaggctcatctgcttggagaacacacatgggaattccggagggaagtgtttatccgcagaatacactgaaaaggttggcgaaattgccaagagtcatggcctgaagcttcatatcgatggagctcgcattttcaacgcctctgtggcacttggagttcctgtggacagacttgtgagagctgcagattcagtttcggtatgcatatctaaaggtttaggcgcccccgttggatcagttattgttggctcgaaggccttcatcgacaaggccaaaattctccggaagaccctaggtggtggaatgagacaggttggagttctctgtgctgctgctcatgttgccgttcatgacaatgtgggaaagcttgcagatgaccacagaaaggctaaagctttggcagacggactgaataaaatcgaacagttcagagtggattcagcatcagtccagaccaatatggtattcttggacattgtggattcacgcatatcatctaacaagctgtgccaggttctgggaacgcacaatgtgctcgcaagtccaaggagtccaaaaagtgtcaggcttgtccttcattaccaaatttcagatgatgatgttcaatatgcactgacgtgttttaagaaagctgctgaacagctactaatgggcagtacggaactcgagcatttggctgaacagctactgatgggcactaccaagaactcgtacggacaatag

SEQ ID NO: 7903 - protein, 377 aa, Zea mays
MATKVVVDLRSDTVTKPSEAMRASMAAADVVDDVRGADPTARRFQEEMAELMGKEAALFVPSGTMGNLVSVLAHCDVRGSEVILGDDSHIHLYENGGISTLGGVHPKTVRNNSDGTMDIDSIVAAIRPPGGGLYYPTTRLICLENTHGNSGGKCLSAEYTEKVGEIAKSHGLKLHIDGARIFNASVALGVPVDRLVRAADSVSVCISKGLGAPVGSVIVGSKAFIDKAKILRKTLGGGMRQVGVLCAAAHVAVHDNVGKLADDHRKAKALADGLNKIEQFRVDSASVQTNMVFLDIVDSRISSNKLCQVLGTHNVLASPRSPKSVRLVLHYQISDDDVQYALTCFKKAAEQLLMGSTELEHLAEQLLMGTTKNSYGQ

SEQ ID NO: 7904 - DNA, 1077 bp, Glycine max
  CDS (1)..(1077)
atggtacctaggatagtggatcttcggtcagatacagtaaccaagccaagtgaagcaatgcgagctgctatggcgagtgctgaggttgatgatgatgttcttggccgtgacccctcttgttttcggttagagacagagatggcaaagatattgggaaaggaaggtgcactttttgttccatcaggcactatggccaaccttatatcagtgcttgtgcattgtgacataaggggaagtgaagttattctgggagacaattcccacatacacatttatgagaatggcggcattgcaacccttggaggggtgcatccaacaacagttagaaacaatgaagatggaaccatggacattcatttgattgaggctgccatcagagatccaaagggggagctagtatatccaaccacaaggcttatttgcttggaaaatactcatggaaactctggtggtagatgtctttcagttgaatatacagacagagtaggagaggttgctaaaaaacatggattgaagcttcacattgatggagcccgaatatttaatgcatcagttgcactaggtgtccctgtggataggcttgttcaagcagctgattcagtatcggtatgtctatcaaaaggcctcggtgctccagttggatctgttattgttggttccaataactttatcaccaaggctagacggctaagaaaaacattaagtggtggaatgaggcaggttggcatcctttgtgctgcggcactcgttgctttgcaggaaaatgttggaaagctacaaagtgatcacaataaagctaaacttttggctgatggattaaacgaaattaaaggactgagagtggatatatcttctgtggaaaccaatatcatatatgttgaagttgaagagggctcacgagctacagcagcaaagctatgcaaggacttggaagactatggtatccttcttatgccaatgggctcatcaagattgagaattgtcttccaccaccaaatatcggctagtgacgtgcagtacgccttgtcgtgctttcagcaagctgtcaatggagttcgaaatgaaaatggcaactag

SEQ ID NO: 7905 - protein, 358 aa, Glycine max
MVPRIVDLRSDTVTKPSEAMRAAMASAEVDDDVLGRDPSCFRLETEMAKILGKEGALFVPSGTMANLISVLVHCDIRGSEVILGDNSHIHIYENGGIATLGGVHPTTVRNNEDGTMDIHLIEAAIRDPKGELVYPTTRLICLENTHGNSGGRCLSVEYTDRVGEVAKKHGLKLHIDGARIFNASVALGVPVDRLVQAADSVSVCLSKGLGAPVGSVIVGSNNFITKARRLRKTLSGGMRQVGILCAAALVALQENVGKLQSDHNKAKLLADGLNEIKGLRVDISSVETNIIYVEVEEGSRATAAKLCKDLEDYGILLMPMGSSRLRIVFHHQISASDVQYALSCFQQAVNGVRNENGN

SEQ ID NO: 7906 - DNA, 1119 bp, Zea mays
  CDS (1)..(1119)
atggtgaccaacgtggtggacctccggtcggacacggtcaccaagccgtccgacgccatgcgcgccgccatggccgcggccgacgtggacgacgacgtcctgggcgcggaccccaccgcgcgccgcttcgaggcggagatggccgcgctcctgggcaaggaggcggcgctgttcgtgccctcgggcaccatggccaacctcgtctccgtcctcgcgcactgcgacgtccgcggcagcgaggtcatcctcggcgacgcctcccacatccacgtctacgagaacggcggcatctccaccctcggcggcgtgcaccccaggaccgtgcccaacaaccccgacggcaccatggacctcgccaggatcgtcggcgccatcaggaaccccgacggggcgctgctgtacccgaccaccaggctcatctgcctggagaacacgcatgccaattctggtgggaaatgcttgtctgtagagtacacagacaaggttggcgaaattgccgtgaaccacggcttgaagcttcacatcgatggagctcgtattttcaatgcctctgtggcactgggagttcctgtacatagacttgtaaaagctgccgactcagtttcggtatgcctatctaaagggttaggcgcacccatcggatcagttgttgttggttcagaggccttcatcgacaaggctagaattcttaggaagaccctaggcggtgggatgaggcaggttggagttctttgtgccgctgcttatgttgctgttcgtgacaccgtgggaaagcttgcgaatgatcacaggaaggctaaagccttggcagagggcctgaagaaaattaaacagcttacggtggattcgtcttcagtcgagaccaatatggtgttcttcgatatcgtggatccacgcatttcaccgagcaagctatgccaagtcttggaacagcgcaatgttcttgcaatgccagcaagttcaaaaagtgtcaggttcgtcatccattaccagatttcagacagcgatgttcaatatgcattgacatgtgtcgagaaagctgttgaggagctattgaagggcggtacaaagttggagcatttgacgaatggtactgccaaaaactcatattggcactag

SEQ ID NO: 7907 - protein, 372 aa, Zea mays
MVTNVVDLRSDTVTKPSDAMRAAMAAADVDDDVLGADPTARRFEAEMAALLGKEAALFVPSGTMANLVSVLAHCDVRGSEVILGDASHIHVYENGGISTLGGVHPRTVPNNPDGTMDLARIVGAIRNPDGALLYPTTRLICLENTHANSGGKCLSVEYTDKVGEIAVNHGLKLHIDGARIFNASVALGVPVHRLVKAADSVSVCLSKGLGAPIGSVVVGSEAFIDKARILRKTLGGGMRQVGVLCAAAYVAVRDTVGKLANDHRKAKALAEGLKKIKQLTVDSSSVETNMVFFDIVDPRISPSKLCQVLEQRNVLAMPASSKSVRFVIHYQISDSDVQYALTCVEKAVEELLKGGTKLEHLTNGTAKNSYWH

SEQ ID NO: 7908 - DNA, 23 bp, Artificial sequence
  primer
atgattgatttacgcagtgatac

SEQ ID NO: 7909 - DNA, 22 bp, Artificial sequence
  primer
ttaacgcgccaggaatgcacgc

SEQ ID NO: 7910 - protein, 361 aa, Artificial sequence
  consensus sequence
  Variant (2)..(2): Xaa in position 2 is any amino acid
  Variant (7)..(7): Xaa in position 7 is any amino acid
  Variant (9)..(9): Xaa in position 9 is any amino acid
  Variant (11)..(13): Xaa in position 11 to 13 is any amino acid
  Variant (15)..(16): Xaa in position 15 to 16 is any amino acid
  Variant (18)..(18): Xaa in position 18 is any amino acid
  Variant (20)..(21): Xaa in position 20 to 21 is any amino acid
  Variant (23)..(23): Xaa in position 23 is any amino acid
  Variant (25)..(25): Xaa in position 25 is any amino acid
  Variant (29)..(29): Xaa in position 29 is any amino acid
  Variant (31)..(31): Xaa in position 31 is any amino acid
  Variant (35)..(37): Xaa in position 35 to 37 is any amino acid
  Variant (39)..(42): Xaa in position 39 to 42 is any amino acid
  Variant (44)..(46): Xaa in position 44 to 46 is any amino acid
  Variant (48)..(48): Xaa in position 48 is any amino acid
  Variant (49)..(50): Xaa in position 49 to 50 is any or no amino acid
  Variant (56)..(58): Xaa in position 56 to 58 is any amino acid
  Variant (61)..(62): Xaa in position 61 to 62 is any amino acid
  Variant (64)..(69): Xaa in position 64 to 69 is any amino acid
  Variant (71)..(73): Xaa in position 71 to 73 is any amino acid
  Variant (74)..(74): Xaa in position 74 is any or no amino acid
  Variant (76)..(76): Xaa in position 76 is any amino acid
  Variant (78)..(84): Xaa in position 78 to 84 is any amino acid
  Variant (86)..(89): Xaa in position 86 to 89 is any amino acid
  Variant (91)..(91): Xaa in position 91 is any amino acid
  Variant (94)..(109): Xaa in position 94 to 109 is any amino acid
  Variant (110)..(110): Xaa in position 110 is any or no amino acid
  Variant (112)..(127): Xaa in position 112 to 127 is any amino acid
  Variant (128)..(134): Xaa in position 128 to 134 is any or no amino acid
  Variant (136)..(136): Xaa in position 136 is any amino acid
  Variant (138)..(139): Xaa in position 138 to 139 is any amino acid
  Variant (144)..(145): Xaa in position 144 to 145 is any amino acid
  Variant (146)..(148): Xaa in position 146 to 148 is any or no amino acid
  Variant (150)..(171): Xaa in position 150 to 171 is any amino acid
  Variant (172)..(178): Xaa in position 172 to 178 is any or no amino acid
  Variant (180)..(180): Xaa in position 180 is any amino acid
  Variant (185)..(186): Xaa in position 185 to 186 is any amino acid
  Variant (189)..(203): Xaa in position 189 to 203 is any amino acid
  Variant (206)..(208): Xaa in position 206 to 208 is any amino acid
  Variant (218)..(218): Xaa in position 218 is any amino acid
  Variant (221)..(223): Xaa in position 221 to 223 is any amino acid
  Variant (225)..(228): Xaa in position 225 to 228 is any amino acid
  Variant (230)..(231): Xaa in position 230 to 231 is any amino acid
  Variant (233)..(235): Xaa in position 233 to 235 is any amino acid
  Variant (238)..(239): Xaa in position 238 to 239 is any amino acid
  Variant (246)..(246): Xaa in position 246 is any amino acid
  Variant (248)..(248): Xaa in position 248 is any amino acid
  Variant (250)..(250): Xaa in position 250 is any amino acid
  Variant (253)..(255): Xaa in position 253 to 255 is any amino acid
  Variant (257)..(262): Xaa in position 257 to 262 is any amino acid
  Variant (263)..(271): Xaa in position 263 to 271 is any or no amino acid
  Variant (273)..(274): Xaa in position 273 to 274 is any amino acid
  Variant (277)..(278): Xaa in position 277 to 278 is any amino acid
  Variant (280)..(282): Xaa in position 280 to 282 is any amino acid
  Variant (284)..(286): Xaa in position 284 to 286 is any amino acid
  Variant (287)..(302): Xaa in position 287 to 302 is any or no amino acid
  Variant (305)..(330): Xaa in position 305 to 330 is any amino acid
  Variant (331)..(356): Xaa in position 331 to 356 is any or no amino acid
  Variant (358)..(358): Xaa in position 358 is any amino acid
  Variant (360)..(360): Xaa in position 360 is any amino acid
DXRSDTXTXPXXXMXXAXMXXAXVXDDVXGXDPTXXXLXXXXAXXXGXXXEAALFXXXGTXXNXXXXXXHXXXXGXEXXXXXXXHXXXXEXGGXXXXXXXXXXXXXXXXXGXXXXXXXXXXXXXXXXXXXXXXXTXLXXLENTXXXXXGXXXXXXXXXXXXXXXXXXXXXXXXXXXXXHXDGARXXNAXXXXXXXXXXXXXXXDSXXXCLSKGLGAPXGSXXXGXXXXIXXAXXXRKXXGGGMRQXGXLXAAXXXAXXXXXXXXXXXXXXXLXXDHXXAXXXAXXXXXXXXXXXXXXXXXXXTNXXXXXXXXXXXXXXXXXXXXXXXXXXXXXXXXXXXXXXXXXXXXXXXXXXXXRXVXH

SEQ ID NO: 7911 - protein, 26 aa, Artificial sequence
  protein pattern
  Variant (2)..(2): Xaa in position 2 is Ala, Ile, Leu or Val
  Variant (3)..(3): Xaa in position 3 is Ile, Leu or Val
  Variant (4)..(4): Xaa in position 4 is any amino acid
  Variant (5)..(5): Xaa in position 5 is Ala, Gly or Leu
  Variant (6)..(12): Xaa in position 6 to 12 is any amino acid
  Variant (13)..(13): Xaa in position 13 is Ala, Cys or Gly
  Variant (14)..(16): Xaa in position 14 to 16 is any amino acid
  Variant (19)..(20): Xaa in position 19 to 20 is any amino acid
  Variant (24)..(24): Xaa in position 24 is any amino acid
SXXXXXXXXXXXXXXXRKXXGGGXRQ

SEQ ID NO: 7912 - protein, 21 aa, Artificial sequence
  protein pattern
  Variant (2)..(2): Xaa in position 2 is Phe or Leu
  Variant (7)..(7): Xaa in position 7 is Phe, Leu or Val
  Variant (9)..(9): Xaa in position 9 is any amino acid
  Variant (11)..(11): Xaa in position 11 is Cys, Asp, Gly, Ser or Thr
  Variant (12)..(13): Xaa in position 12 to 13 is any amino acid
  Variant (15)..(16): Xaa in position 15 to 16 is any amino acid
  Variant (17)..(20): Xaa in position 17 to 20 is any or no amino acid
DXRSDTXTXPXXXMXXXXXXA

SEQ ID NO: 7913 - protein, 18 aa, Artificial sequence
  protein pattern
  Variant (2)..(3): Xaa in position 2 to 3 is any or no amino acid
  Variant (5)..(5): Xaa in position 5 is any amino acid
  Variant (6)..(7): Xaa in position 6 to 7 is any or no amino acid
  Variant (9)..(9): Xaa in position 9 is Phe, Ile or Leu
  Variant (12)..(12): Xaa in position 12 is Gly or Ser
  Variant (13)..(13): Xaa in position 13 is Ile, Leu or Met
  Variant (14)..(14): Xaa in position 14 is Ala, Cys, Gly or Ser
  Variant (15)..(15): Xaa in position 15 is Ala, Cys or Thr
  Variant (17)..(17): Xaa in position 17 is any amino acid
DXXSXXXCXSKXXXXPXG

SEQ ID NO: 7914 - protein, 15 aa, Artificial sequence
  protein pattern
  Variant (2)..(2): Xaa in position 2 is Ala or Gly
  Variant (3)..(3): Xaa in position 3 is Ile, Leu, Met or Val
  Variant (4)..(4): Xaa in position 4 is Phe or Leu
  Variant (5)..(6): Xaa in position 5 to 6 is any amino acid
  Variant (7)..(7): Xaa in position 7 is Ser or Thr
  Variant (10)..(10): Xaa in position 10 is any amino acid
  Variant (11)..(11): Xaa in position 11 is Ala, Cys, Gly or Ser
  Variant (13)..(13): Xaa in position 13 is any amino acid
  Variant (14)..(14): Xaa in position 14 is Ala, Ile, Leu or Val
  Variant (15)..(15): Xaa in position 15 is Ala, Cys, Gly or Ser
AXXXXXXGTXXNXXX

SEQ ID NO: 7915 - protein, 18 aa, Artificial sequence
  protein pattern
  Variant (2)..(2): Xaa in position 2 is Ile, Leu, Met or Val
  Variant (7)..(7): Xaa in position 7 is Ile, Leu or Val
  Variant (8)..(8): Xaa in position 8 is any amino acid
  Variant (11)..(12): Xaa in position 11 to 12 is any or no amino acid
  Variant (14)..(17): Xaa in position 14 to 17 is any amino acid
  Variant (18)..(18): Xaa in position 18 is Ala, Ile, Leu, Pro or Val
HXDGARXXNAXXAXXXXX

SEQ ID NO: 7916 - protein, 18 aa, Artificial sequence
  protein pattern
  Variant (4)..(6): Xaa in position 4 to 6 is any amino acid
  Variant (9)..(9): Xaa in position 9 is Ala, Gly, Asn, Ser, Thr or Val
  Variant (10)..(12): Xaa in position 10 to 12 is any amino acid
  Variant (13)..(13): Xaa in position 13 is Phe or Leu
  Variant (14)..(14): Xaa in position 14 is Glu or Gln
  Variant (15)..(17): Xaa in position 15 to 17 is any amino acid
DDVXXXDPXXXXXXXXXA

SEQ ID NO: 7917 - DNA, 1149 bp, Escherichia coli
  CDS (1)..(1149): transl_table=11
atgtccacgtatacccagcctgtcatgcttttgctgtctggcctgcttttgttgactctggcgattgcggtgttaaatacactcgtgccgctttggctcgcccaggaacacatgtccacatggcaggtaggcgttgtcagctcatcctattttaccggcaaccttgtcggtacattgctgacagggtatgtcattaagcgcattggctttaaccgcagctattatctggcctccttcatttttgccgctggctgtgccggccttggcctgatgattggattctggagctggttggcttggcgttttgtcgcgggcgtcggctgtgccatgatttgggtggttgttgagagcgcgctgatgtgcagtgggacgtcacgtaaccgtgggcgtttgcttgctgcgtatatgatggtttattacgtgggaacgtttttaggccagttactggtcagcaaagtttcaaccgagctgatgtccgtattgccgtgggttacaggtttgacgttggcagggatcttaccgctgttgtttacgcgtgtgctgaatcagcaggctgaaaaccatgattcgacgtcaattacgtcaatgctaaaactccgtcaggcgcggcttggcgtgaatggctgcattatctcaggaatcgttctgggatctctatatggcctgatgccgctgtacctcaatcacaaaggggtgagcaatgccagcattggtttctggatggcggtactggtcagtgcgggtatccttggacaatggccgattggacgtctggcggataagtttggtcgactgctggtgttgcgtgttcaggtctttgtcgtcattctcggcagtatcgcgatgcttagccaggcggcgatggccccagcgttattcatcctcggtgccgctggctttacgctatatccggtggcgatggcatgggcttgcgagaaagttgaacatcatcaactggtggcgatgaaccaggccttactgttgagctatactgtgggaagtctgcttggcccgtcatttaccgctatgctaatgcagaatttctccgataatttattgtttatcatgatcgccagcgtatcgtttatctatttgctgatgctgctgcgcaacgccggtcatacgccgaaacccgttgctcacgtgtaa

SEQ ID NO: 7918 - protein, 382 aa, Escherichia coli
MSTYTQPVMLLLSGLLLLTLAIAVLNTLVPLWLAQEHMSTWQVGVVSSSYFTGNLVGTLLTGYVIKRIGFNRSYYLASFIFAAGCAGLGLMIGFWSWLAWRFVAGVGCAMIWVVVESALMCSGTSRNRGRLLAAYMMVYYVGTFLGQLLVSKVSTELMSVLPWVTGLTLAGILPLLFTRVLNQQAENHDSTSITSMLKLRQARLGVNGCIISGIVLGSLYGLMPLYLNHKGVSNASIGFWMAVLVSAGILGQWPIGRLADKFGRLLVLRVQVFVVILGSIAMLSQAAMAPALFILGAAGFTLYPVAMAWACEKVEHHQLVAMNQALLLSYTVGSLLGPSFTAMLMQNFSDNLLFIMIASVSFIYLLMLLRNAGHTPKPVAHV

SEQ ID NO: 7919 - DNA, 1155 bp, Erwinia carotovora subsp. atroseptica SCRI1043
  CDS (1)..(1155): transl_table=11
atgtctgcttattcccgcccagtgctgttattgctctgtggacttctgctgctgacggtttgtattgcggtattaaatacgttggtcccactttggctaagttatcagtctcttcctgtctggcaggttggcctcgttggttcttcctatttcggtggcaatctggttggaacgctattagccggtaaattaattaaactttatggctttaaccgcagctattattttgcggctttattatttggcatcgcgatcgttggcctcggtatttctgcggatatcggcagttggttattctggcgcttcttggcagggataggctgtgcattgatctgggttgtggttgaaagcgccttattatgtagtggaacgtcgacgcagagagggcaactgctggctgcttatatgattgcctattacctcggtagcgtgattggacagctattgcttggtgtgttgcctacgtcattattgagcgtgctgccgtggatggtcgcgttagttactttagctgtattacctctgctgtgtactcatcttcctactccgcccgaacagcacgaaaagcatgtcaatatgtggaaaatgctgaagtatcgcagtgcgcgtctaggaatacacggctgtattatttccggcgcaattttaggatcgctgtatggcctgatgccactgtacctctcccatcagggaatgaatgatgcgcaggttggatactggatggcgctgctgattagctcaggtattgtcgggcaatggcctgttgggcgtatggctgaccgttatggtcggttgttggttcttcgggtgttagtctttgtggtgattattggctgtgttgccatgctaagcattagtcactatgccatggcaccgtcgctatttttattgggatgcgcagggtttacgctatacccggtcgctatgtcgtgggcatgtgagaaggtgcgtcctgaagagttggtggcgatgaatcaggcgttactccttagctacacgcttggcagtctttgcgggccaagcgttgctgcggtgttgatgcagaattattctgatcgattactgttcgtactaattgccgcggtagcgatgatctacctgatgatattgctcagaaaagccgatcaccatccaacgccattagctgctgcctga

SEQ ID NO: 7920 - protein, 384 aa, Erwinia carotovora subsp. atroseptica SCRI1043
MSAYSRPVLLLLCGLLLLTVCIAVLNTLVPLWLSYQSLPVWQVGLVGSSYFGGNLVGTLLAGKLIKLYGFNRSYYFAALLFGIAIVGLGISADIGSWLFWRFLAGIGCALIWVVVESALLCSGTSTQRGQLLAAYMIAYYLGSVIGQLLLGVLPTSLLSVLPWMVALVTLAVLPLLCTHLPTPPEQHEKHVNMWKMLKYRSARLGIHGCIISGAILGSLYGLMPLYLSHQGMNDAQVGYWMALLISSGIVGQWPVGRMADRYGRLLVLRVLVFVVIIGCVAMLSISHYAMAPSLFLLGCAGFTLYPVAMSWACEKVRPEELVAMNQALLLSYTLGSLCGPSVAAVLMQNYSDRLLFVLIAAVAMIYLMILLRKADHHPTPLAAA

SEQ ID NO: 7921 - DNA, 1149 bp, Yersinia pestis
  CDS (1)..(1149): transl_table=11
atgtccgcatattctcgccccgtgctactcctgctttgtgggcttttgctgttcacgatctctatcgcggttttaaatacactggttcccttatggttatcacatcaacagttgccgacttggcaagtggggatggtgagctcatcttatttcaccggtaatctggtaggaacgttgattgcaggccgctttattcagcaactcggttttaatcgcagttatcattgctcctgtatattgtttgcactggcaacttgtgggctgatgctaacggttgatttttggagctggttgggttggcgctttttggcgggcattgcctgcgcgctgatttgggtcattgtcgaaagtgctttattacgcagtggtaccttaaccaaccgcggacaactactggcggcctacatgatggtttactatttagggaccgtcatcgggcaattattattgggtatagtctccacacaactgctcagtgttattccttgggtgggggcgctggtgattacggcaatgctgccgctactatttgcccagttctcacatcaaagtcgtcacgagtcaccgcctattgcggtttggcctatgttaaaacgccgcagcgcccgtttaggtattaatggatgtattatctctggtgtactcttggggtcactctatgggttactgccactgtatttatcccataaggggatgagtgacgccagcgtgggggggtggatggcgttgctggtcagttcagggattattgggcaatggcctatgggaagaatggctgaccgctatggccgcttactggtactgcggatccaagtgtttgtcgtcatcctcggtagtgtggcgatcttgggtaattacgcaatggcgccggcgttattcattttaggctgcgcgggtttcactttgtatccggttgctatggcctgggcgtgtgaaaaagccagcgctgatgaattggtcgcgatgaatcaggcgttactgatgagttatacccttgggagcctggccgggccgacgatgacgtcactgctgatgcagcgctattcagataatttattatttatcatgatagcaggtgtcgcattcgtgtatttgatgatgctgttgagaaagccagatcaccaacaaacgccttatgctgcggtataa

SEQ ID NO: 7922 - protein, 382 aa, Yersinia pestis
MSAYSRPVLLLLCGLLLFTISIAVLNTLVPLWLSHQQLPTWQVGMVSSSYFTGNLVGTLIAGRFIQQLGFNRSYHCSCILFALATCGLMLTVDFWSWLGWRFLAGIACALIWVIVESALLRSGTLTNRGQLLAAYMMVYYLGTVIGQLLLGIVSTQLLSVIPWVGALVITAMLPLLFAQFSHQSRHESPPIAVWPMLKRRSARLGINGCIISGVLLGSLYGLLPLYLSHKGMSDASVGGWMALLVSSGIIGQWPMGRMADRYGRLLVLRIQVFVVILGSVAILGNYAMAPALFILGCAGFTLYPVAMAWACEKASADELVAMNQALLMSYTLGSLAGPTMTSLLMQRYSDNLLFIMIAGVAFVYLMMLLRKPDHQQTPYAAV

SEQ ID NO: 7923 - DNA, 1149 bp, Salmonella typhi
  CDS (1)..(1149): transl_table=11
atgtccatctatacccgtcccgtcatgcttttgctgtgcgggctacttttgttgaccctggccattgcggtactgaatacgcttgtgccgctgtggcttgctcaggcaaaccttccgacctggcaggtggggatggtcagctcgtcttattttaccggcaatctggtcgggacgttatttaccgggtatttaattaaacgcattgggtttaaccgtagctattatcttgcctcgctgatcttcgccgcgggttgtgtcgggttgggggtgatggtggggttctggagctggatgagctggcgttttattgccggtatcggctgcgccatgatttgggtggttgtcgaaagcgcgttgatgtgcagcggaacctcgcataatcgcggacgcctgctggctgcctatatgatggtctattacatggggaccttccttggacaattattggtcagtaaagtatctggtgaattgctgcacgtccttccctgggtgaccggaatgattctggcgggaattctgccgctactctttacccgaattgtaaatcagcaaacgcaggcacgtcattcctcttctattagcgccatgctgaagctacgccaggcgcgtcttggcgtgaatggttgtattatttccggcattgttcttggttcattatatggcctgatgccgttatatctgaagcatcaggggatggctaacgccagcatcggtttctggatggcggtgctggtgagcgccggtattttggggcaatggccaatgggacgtctggcggacaaatttggtcgcttgctggtattacgcgtacaggtattcgttgtcatactcggcagtattgccatgttaacccaggcggcgatggcgccagctctgtttattctgggggcggcgggttttacgctttatcccgttgcaatggcctgggcctgtgaaaaagtcgaacaccaccagcttgtggcaatgaaccaggcgctgttgttaagttatacggtagggagcctgttggggccgtcttttgctgcgatgttaatgcagaattattcagataatctgctgtttattatgatcgccagcgtatcgtttatttatctgctgatgctgttacgtaacgtcggccagacgcctaatcctgtcgcccacatctaa

SEQ ID NO: 7924 - protein, 382 aa, Salmonella typhi
MSIYTRPVMLLLCGLLLLTLAIAVLNTLVPLWLAQANLPTWQVGMVSSSYFTGNLVGTLFTGYLIKRIGFNRSYYLASLIFAAGCVGLGVMVGFWSWMSWRFIAGIGCAMIWVVVESALMCSGTSHNRGRLLAAYMMVYYMGTFLGQLLVSKVSGELLHVLPWVTGMILAGILPLLFTRIVNQQTQARHSSSISAMLKLRQARLGVNGCIISGIVLGSLYGLMPLYLKHQGMANASIGFWMAVLVSAGILGQWPMGRLADKFGRLLVLRVQVFVVILGSIAMLTQAAMAPALFILGAAGFTLYPVAMAWACEKVEHHQLVAMNQALLLSYTVGSLLGPSFAAMLMQNYSDNLLFIMIASVSFIYLLMLLRNVGQTPNPVAHI

SEQ ID NO: 7925 - DNA, 1149 bp, Salmonella typhimurium
  CDS (1)..(1149): transl_table=11
atgtccacctatacccgtcccgtcatgcttttgctgtgcgggctacttttgttgactctggccattgcggtactgaatacgcttgtgccgctgtggcttgctcaggcaaaccttccgacctggcaggtggggatggtcagctcgtcttattttaccggcaatctggtcgggacgttatttaccgggtatttaattaaacgcattgggtttaaccgtagctattatcttgcctcgctgatcttcgccgcgggttgtgtcggattgggggtgatggtggggttctggagctggatgagctggcgttttattgccggtatcggctgcgccatgatttgggtggttgtcgagagcgcgttgatgtgcagcggaacctcgcataatcgcgggcgcctgctggctgcctatatgatggtctattatatggggaccttccttggacaattattggtcagtaaagtatctggtgaattgctgcacgttcttccctgggtgaccggaatgattctggcgggaattctgccgctactctttacccgaattgtaaatcagcaaacgcaggcacgtcattcctcttctattagcgccatgctgaagctacgccaggcgcgtcttggcgtgaatggttgtattatttccggcattgttcttggttcattatatggcctgatgccgttatatctgaagcatcaggggatggctaacgccagcatcggtttctggatggcggtgctggtgagtgccggtattttggggcaatggccaatgggacgtctggcggacaaatttggtcgcttgctggtgttacgcgtacaggtattcgttgtcatactcggcagtattgccatgttaacccaggcggcgatggcgccagctctgtttattctgggggcggcgggttttacgctttatcccgttgcaatggcctgggcctgtgaaaaagtcgaacaccaccagcttgtggcaatgaaccaggcgctgttgttaagttatacggtagggagcctgttggggccgtcttttgctgcgatgttaatgcagaattattcagataatctgctgtttattatgatcgccagcgtatcgtttatttatctgctgatgctgttacgtaacgccggccagacgcctaatcctgtcgcccacatctga

SEQ ID NO: 7926 - protein, 382 aa, Salmonella typhimurium
MSTYTRPVMLLLCGLLLLTLAIAVLNTLVPLWLAQANLPTWQVGMVSSSYFTGNLVGTLFTGYLIKRIGFNRSYYLASLIFAAGCVGLGVMVGFWSWMSWRFIAGIGCAMIWVVVESALMCSGTSHNRGRLLAAYMMVYYMGTFLGQLLVSKVSGELLHVLPWVTGMILAGILPLLFTRIVNQQTQARHSSSISAMLKLRQARLGVNGCIISGIVLGSLYGLMPLYLKHQGMANASIGFWMAVLVSAGILGQWPMGRLADKFGRLLVLRVQVFVVILGSIAMLTQAAMAPALFILGAAGFTLYPVAMAWACEKVEHHQLVAMNQALLLSYTVGSLLGPSFAAMLMQNYSDNLLFIMIASVSFIYLLMLLRNAGQTPNPVAHI

SEQ ID NO: 7927 - DNA, 1149 bp, Shigella flexneri
  CDS (1)..(1149): transl_table=11
atgtccacgtatacccggcctgtcatgcttttgctgtctggcctgcttttgttgactctggcgatcgcggtgttaaatacactcgtgccgctttggctcgcccaggaacacatgtccacatggcaggtaggcgttgtcagctcatcctattttaccggcaaccttgtcggtacattgctgacagggtatgtcattaaacgcattggctttaaccgcagctattatctgtcctccttcatttttgctgctggctgtgccggccttggcctgatgattggtttctggagctggttggcgtggcgttttgtcgcgggcgtcggctgtgccatgatttgggtggttgttgagagcgcgctgatgtgcagtgggacgtcacgtaaccgtgggcgtttgcttgctgcgtatatgatggtttattacgtgggaacgtttttaggccagttactggtcagcaaagtctcaaccgagctgatgagcgtattgccgtgggttacaggtttgacattggcagggatcttaccgctgttgtttacgcgtgtcctgaatcagcaggctgaaaaccatgattcgacgtcaattacggcaatgctaaaactccgtcaggcgcggcttggcgtgaatggctgcattatctcaggaatcgttctgggatctctatatggcctgatgcctctgtacctcaatcacaaaggggtgagcaatgccagtattggtttctggatggcggtactggtcagtgcgggtatcctcggacaatggccgattggacgtctggcggataagtttggtcgactgctggttttgcgtgttcaggtctttgtcgtcattctcggcagtattgcgatgcttagccaggcggcgatggccccagcgttattcatcctcggtgccgctggctttacgctatatccggtggcgatggcctgggcttgtgagaaagttgaacatcatcaactggtggcgatgaaccaagccttactgttgagctataccgtgggaagtctgcttggcccgtcatttagcgctatgctaatgcagaatttctccgataatttattgtttatcatgatcgccagcgtatcgtttatctatttgctgatgctgcttcgcaacgccggtcatacgccgaaacccgttgctcacgtgtaa

SEQ ID NO: 7928 - protein, 382 aa, Shigella flexneri
MSTYTRPVMLLLSGLLLLTLAIAVLNTLVPLWLAQEHMSTWQVGVVSSSYFTGNLVGTLLTGYVIKRIGFNRSYYLSSFIFAAGCAGLGLMIGFWSWLAWRFVAGVGCAMIWVVVESALMCSGTSRNRGRLLAAYMMVYYVGTFLGQLLVSKVSTELMSVLPWVTGLTLAGILPLLFTRVLNQQAENHDSTSITAMLKLRQARLGVNGCIISGIVLGSLYGLMPLYLNHKGVSNASIGFWMAVLVSAGILGQWPIGRLADKFGRLLVLRVQVFVVILGSIAMLSQAAMAPALFILGAAGFTLYPVAMAWACEKVEHHQLVAMNQALLLSYTVGSLLGPSFSAMLMQNFSDNLLFIMIASVSFIYLLMLLRNAGHTPKPVAHV

SEQ ID NO: 7929 - DNA, 21 bp, Artificial sequence
  primer
atgtccacgtatacccagcct

SEQ ID NO: 7930 - DNA, 23 bp, Artificial sequence
  primer
ttacacgtgagcaacgggtttcg

SEQ ID NO: 7931 - protein, 382 aa, Artificial sequence
  consensus sequence
  Variant (3)..(3): Xaa in position 3 is any amino acid
  Variant (5)..(5): Xaa in position 5 is any amino acid
  Variant (9)..(9): Xaa in position 9 is any amino acid
  Variant (13)..(13): Xaa in position 13 is any amino acid
  Variant (20)..(21): Xaa in position 20 to 21 is any amino acid
  Variant (34)..(39): Xaa in position 34 to 39 is any amino acid
  Variant (45)..(45): Xaa in position 45 is any amino acid
  Variant (60)..(61): Xaa in position 60 to 61 is any amino acid
  Variant (63)..(64): Xaa in position 63 to 64 is any amino acid
  Variant (67)..(68): Xaa in position 67 to 68 is any amino acid
  Variant (76)..(80): Xaa in position 76 to 80 is any amino acid
  Variant (83)..(86): Xaa in position 83 to 86 is any amino acid
  Variant (90)..(93): Xaa in position 90 to 93 is any amino acid
  Variant (98)..(99): Xaa in position 98 to 99 is any amino acid
  Variant (103)..(103): Xaa in position 103 is any amino acid
  Variant (106)..(106): Xaa in position 106 is any amino acid
  Variant (110)..(110): Xaa in position 110 is any amino acid
  Variant (120)..(120): Xaa in position 120 is any amino acid
  Variant (126)..(126): Xaa in position 126 is any amino acid
  Variant (130)..(130): Xaa in position 130 is any amino acid
  Variant (141)..(141): Xaa in position 141 is any amino acid
  Variant (144)..(145): Xaa in position 144 to 145 is any amino acid
  Variant (150)..(152): Xaa in position 150 to 152 is any amino acid
  Variant (155)..(156): Xaa in position 155 to 156 is any amino acid
  Variant (158)..(159): Xaa in position 158 to 159 is any amino acid
  Variant (165)..(172): Xaa in position 165 to 172 is any amino acid
  Variant (179)..(182): Xaa in position 179 to 182 is any amino acid
  Variant (184)..(195): Xaa in position 184 to 195 is any amino acid
  Variant (199)..(199): Xaa in position 199 is any amino acid
  Variant (201)..(201): Xaa in position 201 is any amino acid
  Variant (206)..(206): Xaa in position 206 is any amino acid
  Variant (214)..(215): Xaa in position 214 to 215 is any amino acid
  Variant (228)..(228): Xaa in position 228 is any amino acid
  Variant (230)..(230): Xaa in position 230 is any amino acid
  Variant (232)..(234): Xaa in position 232 to 234 is any amino acid
  Variant (237)..(237): Xaa in position 237 is any amino acid
  Variant (239)..(239): Xaa in position 239 is any amino acid
  Variant (243)..(243): Xaa in position 243 is any amino acid
  Variant (247)..(247): Xaa in position 247 is any amino acid
  Variant (250)..(250): Xaa in position 250 is any amino acid
  Variant (255)..(255): Xaa in position 255 is any amino acid
  Variant (258)..(258): Xaa in position 258 is any amino acid
  Variant (261)..(262): Xaa in position 261 to 262 is any amino acid
  Variant (280)..(280): Xaa in position 280 is any amino acid
  Variant (284)..(286): Xaa in position 284 to 286 is any amino acid
  Variant (287)..(288): Xaa in position 287 to 288 is any or no amino acid
  Variant (299)..(299): Xaa in position 299 is any amino acid
  Variant (317)..(320): Xaa in position 317 to 320 is any amino acid
  Variant (334)..(334): Xaa in position 334 is any amino acid
  Variant (338)..(338): Xaa in position 338 is any amino acid
  Variant (342)..(343): Xaa in position 342 to 343 is any amino acid
  Variant (345)..(345): Xaa in position 345 is any amino acid
  Variant (350)..(350): Xaa in position 350 is any amino acid
  Variant (361)..(361): Xaa in position 361 is any amino acid
  Variant (363)..(363): Xaa in position 363 is any amino acid
  Variant (368)..(368): Xaa in position 368 is any amino acid
  Variant (373)..(377): Xaa in position 373 to 377 is any amino acid
  Variant (379)..(379): Xaa in position 379 is any amino acid
  Variant (381)..(381): Xaa in position 381 is any amino acid
MSXYXRPVXLLLXGLLLLTXXIAVLNTLVPLWLXXXXXXTWQVGXVSSSYFTGNLVGTLXXGXXIKXXGFNRSYYXXXXXFAXXXXGLGXXXXFWSWXXWRFXAGXGCAXIWVVVESALXCSGTSXNRGXLLAAYMMVYYXGTXXGQLLXXXVSXXLXXVLPWVXXXXXXXXLPLLFTXXXXQXXXXXXXXXXXXMLKXRXARLGXNGCIISGXXLGSLYGLMPLYLXHXGXXXASXGXWMAXLVSXGIXGQWPXGRXADXXGRLLVLRVQVFVVILGSXAMLXXXXXAMAPALFILGXAGFTLYPVAMAWACEKVXXXXLVAMNQALLLSYTXGSLXGPSXXAXLMQNXSDNLLFIMIAXVXFIYLXMLLRXXXXXPXPXA

SEQ ID NO: 7932 - protein, 60 aa, Artificial sequence
  protein pattern
  Variant (17)..(17): Xaa in position 17 is Ala or Val
  Variant (18)..(18): Xaa in position 18 is Glu or Ser
  Variant (19)..(19): Xaa in position 19 is any amino acid
  Variant (20)..(20): Xaa in position 20 is Asp or His
  Variant (21)..(21): Xaa in position 21 is Glu or Gln
  Variant (31)..(31): Xaa in position 31 is Leu or Met
  Variant (35)..(35): Xaa in position 35 is Leu or Val
  Variant (39)..(39): Xaa in position 39 is Ala or Leu
  Variant (42)..(42): Xaa in position 42 is Ser or Thr
  Variant (43)..(43): Xaa in position 43 is Phe or Met
  Variant (44)..(44): Xaa in position 44 is Ala, Ser or Thr
  Variant (45)..(45): Xaa in position 45 is Ala or Ser
  Variant (46)..(46): Xaa in position 46 is Leu or Met
  Variant (50)..(50): Xaa in position 50 is Asn or Arg
  Variant (51)..(51): Xaa in position 51 is Phe or Tyr
AGFTLYPVAMAWACEKXXXXXLVAMNQALLXSYTXGSLXGPXXXXXLMQXXSDNLLFIMI

SEQ ID NO: 7933 - protein, 61 aa, Artificial sequence
  protein pattern
  Variant (2)..(2): Xaa in position 2 is Ile or Val
  Variant (10)..(10): Xaa in position 10 is any or no amino acid
  Variant (13)..(13): Xaa in position 13 is any or no amino acid
  Variant (20)..(20): Xaa in position 20 is Leu or Met
  Variant (25)..(25): Xaa in position 25 is any amino acid
  Variant (27)..(27): Xaa in position 27 is any amino acid
  Variant (29)..(29): Xaa in position 29 is Met or Val
  Variant (30)..(30): Xaa in position 30 is Ala or Ser
  Variant (31)..(31): Xaa in position 31 is Asp or Asn
  Variant (34)..(34): Xaa in position 34 is Ile or Val
  Variant (36)..(36): Xaa in position 36 is any amino acid
  Variant (40)..(40): Xaa in position 40 is Leu or Val
  Variant (44)..(44): Xaa in position 44 is Ala or Ser
  Variant (47)..(47): Xaa in position 47 is Ile or Leu
  Variant (52)..(52): Xaa in position 52 is Ile or Met
  Variant (55)..(55): Xaa in position 55 is Leu or Met
  Variant (58)..(58): Xaa in position 58 is Lys or Arg
  Variant (59)..(59): Xaa in position 59 is Phe or Tyr
GXNGCIISGXVLXGSLYGLXPLYLXHXGXXXASXGXWMAXLVSXGIXGQWPXGRXADXXGR

SEQ ID NO: 7934 - protein, 60 aa, Artificial sequence
  protein pattern
  Variant (2)..(3): Xaa in position 2 to 3 is any or no amino acid
  Variant (6)..(6): Xaa in position 6 is Leu or Met
  Variant (7)..(7): Xaa in position 7 is any amino acid
  Variant (11)..(11): Xaa in position 11 is Ile, Leu or Val
  Variant (14)..(14): Xaa in position 14 is Ile or Val
  Variant (18)..(18): Xaa in position 18 is Leu or Met
  Variant (28)..(28): Xaa in position 28 is Leu or Met
  Variant (34)..(34): Xaa in position 34 is any amino acid
  Variant (35)..(35): Xaa in position 35 is Asn or Gln
  Variant (38)..(38): Xaa in position 38 is Gln or Arg
  Variant (45)..(45): Xaa in position 45 is Ile or Met
  Variant (46)..(46): Xaa in position 46 is Ala or Val
  Variant (49)..(49): Xaa in position 49 is Leu, Met or Val
  Variant (51)..(51): Xaa in position 51 is Ser or Thr
  Variant (52)..(52): Xaa in position 52 is Phe or Val
  Variant (53)..(53): Xaa in position 53 is Ile or Leu
  Variant (58)..(59): Xaa in position 58 to 59 is any or no amino acid
GXXSWXXWRFXAGXGCAXIWVVVESALXCSGTSXXRGXLLAAYMXXYYXGXXXGQLLXXV

SEQ ID NO: 7935 - protein, 61 aa, Artificial sequence
  protein pattern
  Variant (13)..(13): Xaa in position 13 is any amino acid
  Variant (14)..(14): Xaa in position 14 is any or no amino acid
  Variant (16)..(18): Xaa in position 16 to 18 is any amino acid
  Variant (19)..(19): Xaa in position 19 is any or no amino acid
  Variant (25)..(25): Xaa in position 25 is Met or Val
  Variant (40)..(40): Xaa in position 40 is Phe, Ile or Leu
  Variant (41)..(41): Xaa in position 41 is Ala or Thr
  Variant (43)..(43): Xaa in position 43 is any amino acid
  Variant (44)..(44): Xaa in position 44 is Phe, Leu or Val
  Variant (46)..(46): Xaa in position 46 is any amino acid
  Variant (47)..(47): Xaa in position 47 is Gln or Arg
  Variant (48)..(48): Xaa in position 48 is Ile or Leu
  Variant (55)..(56): Xaa in position 55 to 56 is any amino acid
  Variant (57)..(57): Xaa in position 57 is any or no amino acid
  Variant (59)..(59): Xaa in position 59 is any amino acid
  Variant (61)..(61): Xaa in position 61 is Phe or Leu
IAVLNTLVPLWLXXQXXXXTWQVGXVSSSYFTGNLVGTLXXGXXIXXXGFNRSYXXXSXIX

SEQ ID NO: 7936 - protein, 18 aa, Artificial sequence
  protein pattern
  Variant (2)..(2): Xaa in position 2 is any or no amino acid
  Variant (5)..(5): Xaa in position 5 is any or no amino acid
  Variant (9)..(9): Xaa in position 9 is any amino acid
  Variant (10)..(10): Xaa in position 10 is Ala or Val
  Variant (11)..(11): Xaa in position 11 is Asp or Gly
  Variant (12)..(13): Xaa in position 12 to 13 is any amino acid
  Variant (15)..(15): Xaa in position 15 is any amino acid
  Variant (17)..(17): Xaa in position 17 is Leu or Val
YXLMXLLRXXXXXPXPXA

SEQ ID NO: 7937 - protein, 15 aa, Artificial sequence
  protein pattern
  Variant (4)..(4): Xaa in position 4 is any amino acid
  Variant (10)..(10): Xaa in position 10 is Ile or Leu
  Variant (12)..(12): Xaa in position 12 is Cys or Ser
  Variant (13)..(13): Xaa in position 13 is Ile or Val
LRVXVFVVIXGXXAM

SEQ ID NO: 7938 - protein, 13 aa, Artificial sequence
  protein pattern
  Variant (2)..(3): Xaa in position 2 to 3 is any amino acid
  Variant (4)..(5): Xaa in position 4 to 5 is any or no amino acid
  Variant (9)..(9): Xaa in position 9 is any amino acid
  Variant (11)..(11): Xaa in position 11 is Gln or Ser
IXXXXMLKXRXAR

SEQ ID NO: 7939 - protein, 24 aa, Artificial sequence
  protein pattern
  Variant (4)..(4): Xaa in position 4 is Gly or Thr
  Variant (5)..(5): Xaa in position 5 is Ala or Gly
  Variant (6)..(6): Xaa in position 6 is Leu or Met
  Variant (7)..(7): Xaa in position 7 is any amino acid
  Variant (8)..(8): Xaa in position 8 is Ile or Leu
  Variant (9)..(9): Xaa in position 9 is Ala or Thr
  Variant (10)..(10): Xaa in position 10 is Ala or Gly
  Variant (11)..(11): Xaa in position 11 is Ile or Met
  Variant (17)..(17): Xaa in position 17 is any amino acid
  Variant (18)..(23): Xaa in position 18 to 23 is any or no amino acid
PWVXXXXXXXXLPLLFXXXXXXXR

SEQ ID NO: 7940 - protein, 11 aa, Artificial sequence
  protein pattern
  Variant (11)..(11): Xaa in position 11 is Ala or Cys
AMAPALFILGX

SEQ ID NO: 7941 - DNA, 228 bp, Escherichia coli
  CDS (1)..(228): transl_table=11
atgccaactcaagaagcgaaagctcatcacgtcggtgaatgggcatctctgcgcaatacgtcgccggaaatagccgaggccattttcgaagtcgccgggtacgacgaaaaaatggcggaaaagatttgggaagaaggtagtgatgaagtgttagtcaaagcctttgctaagaccgataaagattcgcttttttggggcgaacagaccatcgaacgtaaaaacgtttaa

SEQ ID NO: 7942 - protein, 75 aa, Escherichia coli
MPTQEAKAHHVGEWASLRNTSPEIAEAIFEVAGYDEKMAEKIWEEGSDEVLVKAFAKTDKDSLFWGEQTIERKNV

SEQ ID NO: 7943 - DNA, 228 bp, Salmonella enterica subsp. enterica serovar Typhi Ty2
  CDS (1)..(228): transl_table=11
atgccaactcaagaagcaaaagcgcaccgcgtcggcgaatgggcaagcctgcgtaatacgtcgccggaaattgccgaagccatttttgaagtcgctcactatgacgagaaactggcagaaaaaatatgggaagaaggtagcgatgaggtgctgatcaaagcctttgagaaaacggacaaagactcgctcttctggggcgaacaagtcatcgaacgtaagaacgtataa

SEQ ID NO: 7944 - protein, 75 aa, Salmonella enterica subsp. enterica serovar Typhi Ty2
MPTQEAKAHRVGEWASLRNTSPEIAEAIFEVAHYDEKLAEKIWEEGSDEVLIKAFEKTDKDSLFWGEQVIERKNV

SEQ ID NO: 7945 - DNA, 22 bp, Artificial sequence
  primer
atgccaactcaagaagcgaaag

SEQ ID NO: 7946 - DNA, 24 bp, Artificial sequence
  primer
ttaaacgtttttacgttcgatggt

SEQ ID NO: 7947 - DNA, 948 bp, Escherichia coli
  CDS (1)..(948): transl_table=11
atgcttgcggactggttcagtgagcaattctcaacgggcgtgttgatcgtgccttgtatgctgacgttggctattcctggagtgctgccgcgctttaaagcagaacagatgatgcccgccatcgcgcttattgtgtcggttattgcctcggtagtcattggcggagcggggagtctggcgttcccgctgcctgcattaatctggtgtgcagtgcgctatacgccgcaggtaacatgtctgttgacctttgtcaccggtgcggtggaaatcgtactggtggcaaattcggtgattgatatctcggtcggttcgccgttctccattccgcaaatgttctccgcacgtctcggtattgccacgatggcgatatgcccaattatggtttcttttagcgtggcagcgatcaattcgctaatgaagcaagttgcgctgcgagccgactttgattttctgactcaggtttactcacggtccggtctttatgaggcgctgaaaagtccatcgctgaaacagacacaacatctgactgtcatgctgcttgatatcgactatttcaaaagcattaacgataactatggacatgaatgtggcgataaagtgttaagcgtgtttgcccggcatattcagaagattgtcggtgataaggggctggtggcgcgaatgggcggcgaagaatttgctgttgcagtgccgtcggtgaatcctgtcgatggtctgctaatggcggaaaaaatccgtaaaggcgttgaactgcaaccattcacctggcaacaaaaaacgctttatctcacggtaagtattggcgtcggtagtggtcgcgcatcgtacctaacgctgaccgatgactttaataaattgatggtcgaagccgatacgtgtctgtatcgctcgaagaaagatgggcgcaaccgtaccagcactatgcgttacggtgaggaagttgtctaa

SEQ ID NO: 7948 - protein, 315 aa, Escherichia coli
MLADWFSEQFSTGVLIVPCMLTLAIPGVLPRFKAEQMMPAIALIVSVIASVVIGGAGSLAFPLPALIWCAVRYTPQVTCLLTFVTGAVEIVLVANSVIDISVGSPFSIPQMFSARLGIATMAICPIMVSFSVAAINSLMKQVALRADFDFLTQVYSRSGLYEALKSPSLKQTQHLTVMLLDIDYFKSINDNYGHECGDKVLSVFARHIQKIVGDKGLVARMGGEEFAVAVPSVNPVDGLLMAEKIRKGVELQPFTWQQKTLYLTVSIGVGSGRASYLTLTDDFNKLMVEADTCLYRSKKDGRNRTSTMRYGEEVV

SEQ ID NO: 7949 - DNA, 1425 bp, Klebsiella pneumoniae subsp. pneumoniae MGH 78578
  CDS (1)..(1425): transl_table=11
atgtcttcactgtcgattcggtcatttacgctgtttcgtgaagaacaacccgtgcgcgatgcattggtcttatttacgttaacgctactgctgcattttcttggcgctatgctgcgtctggtgcaggagctctctttcttctggccgctcaatgcagtgatggccgggatttttgcacgctatgtatggcttaaccgcagctatttttatgccgtctgttttgcggcaatgctggtctatgacggattaacctcgcgctggggaatgggctttgcctcattgctgattaacttttccaatattgtctttattgtgacgctggcgcagctggtgctgtgggataaacgtcgcgccgactccatgccgggcccgataaacgcgcttaatttattctgtttctgcctgttagccgccttactgtgcgcagcggtcggcgcgctggggtcggtggatgttgaacgcgccaccttcgttccccagctggcggactggtttagcgaacagttctcaacggcggtattaatcctgccctttattctgaccctgacgctgccttcggcattaagcggttttcgctttcgccagctgctgccggtgctggcgctggtcctgtcaattgcgcttggcgtggcggtaggcggcgcgggcagcattaccttcccgttaccggctttgatctggtgcgctgtacgctatccgctgccgctgacctgtctgctgacttttctcactggcatcggcgaaatactgctggtcgctaattcgttaattcacttttcgccagatgcgcgaatgcagccgtggcagctgttctccacccgcctcggaattgccgccatgctgattagcccggtgattgtcgcatccagtgtcgaagcgattaacacgctggtgaagcagctggccctgcgcgccgattttgactttcagacccgcgtctattctcgttccggactgagcgaagcgttgaagcgtcagacgctgccggcggataagctgctgacggtgatggtgctggatatcgatggcttcaaacgggtgaatgatgctctgggccatgaaggcggcgattgcgtgctgacccagtttgcccagcaggttcgacagctggtgggtgagcaggggatggtggcccgtatcggcggcgaagagtttgcggtggccgccgtcgtcgacagcgcccagcagggctatttgctggcggaaaagatccgtcacggggtggagtcgcagcctttcggcctgggccagaacccgatccacctgaccatcagtctgggactggagacgcgcgaggtaggccacgcccgcatcaccgagctgtttaaccagctgctgttggcggcggacgatgagatggtgaaagccaaacagagcggtcgtaaccaaatttgtatgccgacgctgaccgaaagcgcgccataa

SEQ ID NO: 7950 - protein, 474 aa, Klebsiella pneumoniae subsp. pneumoniae MGH 78578
MSSLSIRSFTLFREEQPVRDALVLFTLTLLLHFLGAMLRLVQELSFFWPLNAVMAGIFARYVWLNRSYFYAVCFAAMLVYDGLTSRWGMGFASLLINFSNIVFIVTLAQLVLWDKRRADSMPGPINALNLFCFCLLAALLCAAVGALGSVDVERATFVPQLADWFSEQFSTAVLILPFILTLTLPSALSGFRFRQLLPVLALVLSIALGVAVGGAGSITFPLPALIWCAVRYPLPLTCLLTFLTGIGEILLVANSLIHFSPDARMQPWQLFSTRLGIAAMLISPVIVASSVEAINTLVKQLALRADFDFQTRVYSRSGLSEALKRQTLPADKLLTVMVLDIDGFKRVNDALGHEGGDCVLTQFAQQVRQLVGEQGMVARIGGEEFAVAAVVDSAQQGYLLAEKIRHGVESQPFGLGQNPIHLTISLGLETREVGHARITELFNQLLLAADDEMVKAKQSGRNQICMPTLTESAP

SEQ ID NO: 7951 - DNA, 1203 bp, Agrobacterium tumefaciens str. C58
  CDS (1)..(1203): transl_table=11
ttgaaaatttatctccatattataataggttctctcaaaatttatttaccgtatgggcatattatgctgggtgaactcgaccttgcaacagtcatactgatgcaaaaatgttcttacatcgttgggctgttgagttttatctacctgaagatgagtaatcgcggtttgcccggccccgttcatcttgcggcgggtttcgcggcgatgacggtcggctctacgcttgccggttacggcgaatggaagatactttcgccggcgctgtgggagcttggcagcgttttgttcggtattgccggatatgcgctgatctggcttgggctgaagacgttgagcgacggacgctttgtcaatcgcaaaaccatcttgtttacctgtcttgtcgccctgctggcgattggcgttgcgctgcaggtggccggcaacaatacgtttcgcgcggcgctttttaatggctgtgcggctctggcctatcttggcggggcgggcgtgctttttgcccggtggcggaaagagccgcttctttcccggctggctctcggtgcgattacaggcgtttccggtctgatatcgctggcggtgatgaaaagcgtgcttttccctggttacgccagcatcaatctggtcactgcgtttttcttcattatcatgctcaacttcgccatctcgctctttgtgatgatgctggtagcggagcggtccgaacggaaattgctggttctggcgaataccgatccactgacgggcgtcaagaaccggcgtttcttcttccagaccatgcccgcagcccccgatcccgctgatgcggccatgttgcttgacattgaccacttcaagtcgatcaatgaccgtttcggccacgctgtcggcgacagcgtgctgcaggaagtggcaaggcgcatcagcggcagcatccgtggcggcgatgtgctggcgcgttacggcggcgaggaattcatcattttcctgccgggtgccggtgtggacaaggcttgcatgatcggcgagcgcattcgcgacgcggttgcgataaatgaggtcgattgcggcggtctgcgtgtcggggtgaccatcagcatcggcgttgccaccacaggcgatatgcgctgcgatctccagatgctcgccgaaaaggcggatcgagcgctttaccgggcaaagaccgaagggcgcaattgcgttcgcgaggcgctggccgcgtaa

SEQ ID NO: 7952 - protein, 400 aa, Agrobacterium tumefaciens str. C58
MKIYLHIIIGSLKIYLPYGHIMLGELDLATVILMQKCSYIVGLLSFIYLKMSNRGLPGPVHLAAGFAAMTVGSTLAGYGEWKILSPALWELGSVLFGIAGYALIWLGLKTLSDGRFVNRKTILFTCLVALLAIGVALQVAGNNTFRAALFNGCAALAYLGGAGVLFARWRKEPLLSRLALGAITGVSGLISLAVMKSVLFPGYASINLVTAFFFIIMLNFAISLFVMMLVAERSERKLLVLANTDPLTGVKNRRFFFQTMPAAPDPADAAMLLDIDHFKSINDRFGHAVGDSVLQEVARRISGSIRGGDVLARYGGEEFIIFLPGAGVDKACMIGERIRDAVAINEVDCGGLRVGVTISIGVATTGDMRCDLQMLAEKADRALYRAKTEGRNCVREALAA

SEQ ID NO: 7953 - DNA, 1281 bp, Sinorhizobium meliloti 1021
  CDS (1)..(1281): transl_table=11
atggctgaaacgcaagccgcactttattttagcacgacaggccgtttcgaaatgagctttctctccgccataccggtcatcgcacttcttgccatgctacccgttctcctttctctgcggccggttgccggtgttcgggagttctccgccagttgcgcactctcggcagcgtcggcaggcgccttgacggttgcggcggcgttgcaggcgccggtcgccgcaatgttcggctatgcgggtctcgccgtttccctgtttttcgtcctccagggcctccgccggttcctcgcattgtcgattccggcctcgctttgtctggtgctcgcgttctcgagcggcgtgctcggcttcatcatcgctctcggcggccacgacagcccggccgccggcatgatcgtcgttgcgggcgttgtcgcagctctacttctcgtccttggtctggccgcagccgaccgctggccgggcgaaaagccggcgatccaggtcgttgtcgtcggctccgccgccgtggttttcaccgcccttgcccatgccctcggcccatcggcgcacgtcttgccgggaccggcgggctcgcccgcttcgagcctgttcgatttcctgctcgtcaccatgcgggtgctgtgccttcccctcctcttcctggccatgatcctcacgatgcaggcccgggtcatcgccggattgagggccatgatcgcacgcgacggcttgaccggtgcgctgtcacgcgggacgctcatggaagagggcgagcggatcttcgccgagtgcgtggcacgccaggagccggctgccttcctgctgctcgacctcgatttcttcaaacaaatcaacgatcagtatgggcacgcctgcggcgacatggcgctcgcgcattttgccgataccgtctcggctttcctcgccggacggggcgtcctcggacggatcggtggcgaggaattcggcatcgtcctgccggaccacacggaagagcaggcaagggcgcttgcggaggatatctgccgcgtggtgcgtgagacgccggccggccgctcgcatcagcgcatccgtctgaccgtgagcatcgggatcgccgccgccattgcgggcgagacgattaccgacgtgatgatacgcgccgaccttgctctctacgactcaaaggcggatggtcgcgaccgttgctcggtagcaagggatcgccgcatcgacgccagcgcccgcgcccttgcggcagccgccgcgcaattgcgcgaagcccgtgccgcccggtcggaactgcgccactcggcgtga

SEQ ID NO: 7954 - protein, 426 aa, Sinorhizobium meliloti 1021
MAETQAALYFSTTGRFEMSFLSAIPVIALLAMLPVLLSLRPVAGVREFSASCALSAASAGALTVAAALQAPVAAMFGYAGLAVSLFFVLQGLRRFLALSIPASLCLVLAFSSGVLGFIIALGGHDSPAAGMIVVAGVVAALLLVLGLAAADRWPGEKPAIQVVVVGSAAVVFTALAHALGPSAHVLPGPAGSPASSLFDFLLVTMRVLCLPLLFLAMILTMQARVIAGLRAMIARDGLTGALSRGTLMEEGERIFAECVARQEPAAFLLLDLDFFKQINDQYGHACGDMALAHFADTVSAFLAGRGVLGRIGGEEFGIVLPDHTEEQARALAEDICRVVRETPAGRSHQRIRLTVSIGIAAAIAGETITDVMIRADLALYDSKADGRDRCSVARDRRIDASARALAAAAAQLREARAARSELRHSA

SEQ ID NO: 7955 - DNA, 1140 bp, Agrobacterium tumefaciens str. C58
  CDS (1)..(1140): transl_table=11
atgctgggtgaactcgaccttgcaacagtcatactgatgcaaaaatgttcttacatcgttgggctgttgagttttatctacctgaagatgagtaatcgcggtttgcccggccccgttcatcttgcggcgggtttcgcggcgatgacggtcggctctacgcttgccggttacggcgaatggaagatactttcgccggcgctgtgggagcttggcagcgttttgttcggtattgccggatatgcgctgatctggcttgggctgaagacgttgagcgacggacgctttgtcaatcgcaaaaccatcttgtttacctgtcttgtcgccctgctggcgattggcgttgcgctgcaggtggccggcaacaatacgtttcgcgcggcgctttttaatggctgtgcggctctggcctatcttggcggggcgggcgtgctttttgcccggtggcggaaagagccgcttctttcccggctggctctcggtgcgattacaggcgtttccggtctgatatcgctggcggtgatgaaaagcgtgcttttccctggttacgccagcatcaatctggtcactgcgtttttcttcattatcatgctcaacttcgccatctcgctctttgtgatgatgctggtagcggagcggtccgaacggaaattgctggttctggcgaataccgatccactgacgggcgtcaagaaccggcgtttcttcttccagaccatgcccgcagcccccgatcccgctgatgcggccatgttgcttgacattgaccacttcaagtcgatcaatgaccgtttcggccacgctgtcggcgacagcgtgctgcaggaagtggcaaggcgcatcagcggcagcatccgtggcggcgatgtgctggcgcgttacggcggcgaggaattcatcattttcctgccgggtgccggtgtggacaaggcttgcatgatcggcgagcgcattcgcgacgcggttgcgataaatgaggtcgattgcggcggtctgcgtgtcggggtgaccatcagcatcggcgttgccaccacaggcgatatgcgctgcgatctccagatgctcgccgaaaaggcggatcgagcgctttaccgggcaaagaccgaagggcgcaattgcgttcgcgaggcgctggccgcgtaa

SEQ ID NO: 7956 - protein, 379 aa, Agrobacterium tumefaciens str. C58
MLGELDLATVILMQKCSYIVGLLSFIYLKMSNRGLPGPVHLAAGFAAMTVGSTLAGYGEWKILSPALWELGSVLFGIAGYALIWLGLKTLSDGRFVNRKTILFTCLVALLAIGVALQVAGNNTFRAALFNGCAALAYLGGAGVLFARWRKEPLLSRLALGAITGVSGLISLAVMKSVLFPGYASINLVTAFFFIIMLNFAISLFVMMLVAERSERKLLVLANTDPLTGVKNRRFFFQTMPAAPDPADAAMLLDIDHFKSINDRFGHAVGDSVLQEVARRISGSIRGGDVLARYGGEEFIIFLPGAGVDKACMIGERIRDAVAINEVDCGGLRVGVTISIGVATTGDMRCDLQMLAEKADRALYRAKTEGRNCVREALAA

SEQ ID NO: 7957 - DNA, 948 bp, Shigella flexneri 2a str. 301
  CDS (1)..(948): transl_table=11
ttgcttgcggactggttcagtgagcaattctcaacgggcgtgttgatcgtgccttgtatgctgacgttggctattcctggagtgctgccgcgctttaaagcagaacagatgatgcccgccatcgcgtttattgtgtcggttattgcctcggtagtcattggcggagcggggagtctggcgttcccgctgcctgcattaatctggtgtgcagtgcgctatacgccgcaggtaacatgtctgttgacctttgtcaccggtgcggtggaaatcgtactggtggcaaattcggtgattgatatctcggtcggttcgccgttctccattccggaaatgttctccgcacgtctcggtattgccacgatggcgatatgcccaattatggtttcttttagcgtggcagcgatcaatttgctaatgaagcaagttgcgctgcgagccgactttgattttctgactcaggtttactcacggtccggtctttatgaggcgctgaaaagtccatcgctgaaacagacacaacatctgacggtcatgctgcttgatatcgactatttcaaaagcattaacgataactatggacatgaatgtggcgataaagtgttaagcgtgtttgcccggcatattcagaagattgtcggtgataaggggctggtggcgcgcatgggcggcgaagaatttgctgttgcagtgccgtcggtgaatcctgtcgatggtctgctaatggcggaaaaaatccgtaaaggcgttgaactgcaaccattcacctggcaacaaaaaacgctttatctcacggtaagtattggcgtcggtagtggtcgcgcatcgtaccgaacgctgaccgatgattttaataaattgatggtcgaagccgatacgtgtctgtatcgctcgaagaaagatgggcgcaaccgtaccagcactatgcgttacggtgaggaagttgtctga

SEQ ID NO: 7958 - protein, 315 aa, Shigella flexneri 2a str. 301
MLADWFSEQFSTGVLIVPCMLTLAIPGVLPRFKAEQMMPAIAFIVSVIASVVIGGAGSLAFPLPALIWCAVRYTPQVTCLLTFVTGAVEIVLVANSVIDISVGSPFSIPEMFSARLGIATMAICPIMVSFSVAAINLLMKQVALRADFDFLTQVYSRSGLYEALKSPSLKQTQHLTVMLLDIDYFKSINDNYGHECGDKVLSVFARHIQKIVGDKGLVARMGGEEFAVAVPSVNPVDGLLMAEKIRKGVELQPFTWQQKTLYLTVSIGVGSGRASYRTLTDDFNKLMVEADTCLYRSKKDGRNRTSTMRYGEEVV

SEQ ID NO: 7959 - DNA, 1209 bp, Pseudomonas putida KT2440
  CDS (1)..(1209): transl_table=11
atggtcggggccgacctgctgtgtggcagcgcctgggtaccggctctgtggttaaacctgtgcaatcttggcgtggtggtcaccctctggcagctgctgtcgcgcttgccacgcatgcaccggcgcatgcgcagcccgcacggcgtactcagcgtgttcgccgcctgcgccgccgctgccatggtggcggcgagcatggcagcggtaatggccgcaccctggttcgaacagtcgttgcgcgccacctggctagcctggttcagcgaacagttctcgaccggcgtgctggtgctgccggtgctgcttacagcgccctcggtgcgggccttggtgcgcggcggcgcgcagcccatccgcctggcgccgttgctggtactgctggcctcgctggcattcagcatcgcattcggtggccctggggccattgccttcccgattgccgcgttactgtggtgtgcctggacctattcaccgtttctggtttcattgctgacgctcacggccggcagtacgctgatcgtggctgtggcgcaaaacctcatgcacttcagcgtgccgcagagcgagcctggggttaccacgctgatgtcggcgcgcctgggcatcgccatgctggtgctcgggccgctggtggtggcctgcgtcagccaggccaaccgtagcctcatggcccgcctggcgcaccaggccaccgtcgaccacctcaccggtgtgctcacccgcagcgccttcacacgccgcgccaacgcgctgctggagagccgtcaacagcacgcccaggcgctgccgctgaccctgatgatgctggacatcgaccacttcaagtcgatcaacgatgcccacggccatgccgtcggtgaccaggtgctgcgccaattcgccagcaccctccaggaccagctgcacaacgatgagctgatcgcacgcctgggtggcgaagaattcgttgtcatcctgcccggacttgcgccagagcgggccaacttcaccgccgaacgcctgcgccgcgccatacaggacctgcacgtgacacaggccgaccagcgcctgcagattaccgtgagtatcggtgtggcaggctgcgacgcagacatgccggcccccagcctcgacgaactgctggccagtgccgaccaggcgctgtaccgggccaaggcccggggccgcaaccgcgtcgaacaggccgaagcacagcgcctggtgatctga

SEQ ID NO: 7960 - protein, 402 aa, Pseudomonas putida KT2440
MVGADLLCGSAWVPALWLNLCNLGVVVTLWQLLSRLPRMHRRMRSPHGVLSVFAACAAAAMVAASMAAVMAAPWFEQSLRATWLAWFSEQFSTGVLVLPVLLTAPSVRALVRGGAQPIRLAPLLVLLASLAFSIAFGGPGAIAFPIAALLWCAWTYSPFLVSLLTLTAGSTLIVAVAQNLMHFSVPQSEPGVTTLMSARLGIAMLVLGPLVVACVSQANRSLMARLAHQATVDHLTGVLTRSAFTRRANALLESRQQHAQALPLTLMMLDIDHFKSINDAHGHAVGDQVLRQFASTLQDQLHNDELIARLGGEEFVVILPGLAPERANFTAERLRRAIQDLHVTQADQRLQITVSIGVAGCDADMPAPSLDELLASADQALYRAKARGRNRVEQAEAQRLVI

SEQ ID NO: 7961 - DNA, 1419 bp, Escherichia coli CFT073
  CDS (1)..(1419): transl_table=11
atgcatgtacagcccatttcaactttccgtttgttccaggaaggtcatctgctacgtaatagcatcgctatttttgtgctaaccacgctgttctattttattggtgcagagttacggctggttcacgaactttctcttttctggccgctgaatggcgtaatggcgggggtgtttgcccgctatgtctggcttaatcgactgcattactatgcgatcagttatgtggcgatgctggtttatgatgccataaccaccgaatgggggctggtttcactggctatcaatttctccaatatgatgtttattgttaccgtcgccttactggtcgcgcgggataagcgtctgggaaaaaataagtatgagccagtaagtgccttacggctatttaattactgtctgcttgccgcattattatgcgctattgtcggggcgattggttcggtcagtattgatagtctggatttctggcctttgcttgccgactggtttagtgagcaattctcaacgggcgtgttgatcgtgccttgtatgctgacgttggcaattcctggagtactgccgcgctttaaagcagagcagatgatgcctgctatcgcgcttattgtgtcggttattgcctcggtagtcattggcggagcggggagtctggcgtttccgctccctgcattaatctggtgtgcagtgcgctatacgccgcaggtaacatgtctgttgacctttgtcaccggtgcggtggaagtcgtactggtggcaaattcggtgattgatatctcggtcggttcgccgttctctattccgcaaatgttctccgcacgtctcggtattgccacgatggcgatatgcccaattatggtttcctttagcgtggcagcgatcaattcgctaatgaagcaagttgcgctgcgagccgactttgattttctgactcaggtttactcacggtctggtctttatgaggcgctgaaaagtccatcgctgaaacagacacaacatctgacggtcatgctgcttgatatcgactatttcaaaagcattaacgataactatggacatgaatgtggcgataaagtgttaagcgtgtttgcccagcatattcagaagattgtcggtgataaggggctggtggcgcgaatgggcggcgaagaatttgctgttgcagtgccgtcggtgaatcctgtcgatggcctgctaatggcggaaaaaatccgtaaaggcgtagaacttcaaccgttcacctggcaacaaaaaacgctttatctcacggtaagtattggcgtcggtagtggttgcgcatcgtaccgaacgctgaccgatgactttaataaattgatggtcgaagccgatacgtgtctgtatcgctcgaagaaagatgggcgcaaccgtaccagcactatgcgttacggtgaggaagttgtctga

SEQ ID NO: 7962 - protein, 472 aa, Escherichia coli CFT073
MHVQPISTFRLFQEGHLLRNSIAIFVLTTLFYFIGAELRLVHELSLFWPLNGVMAGVFARYVWLNRLHYYAISYVAMLVYDAITTEWGLVSLAINFSNMMFIVTVALLVARDKRLGKNKYEPVSALRLFNYCLLAALLCAIVGAIGSVSIDSLDFWPLLADWFSEQFSTGVLIVPCMLTLAIPGVLPRFKAEQMMPAIALIVSVIASVVIGGAGSLAFPLPALIWCAVRYTPQVTCLLTFVTGAVEVVLVANSVIDISVGSPFSIPQMFSARLGIATMAICPIMVSFSVAAINSLMKQVALRADFDFLTQVYSRSGLYEALKSPSLKQTQHLTVMLLDIDYFKSINDNYGHECGDKVLSVFAQHIQKIVGDKGLVARMGGEEFAVAVPSVNPVDGLLMAEKIRKGVELQPFTWQQKTLYLTVSIGVGSGCASYRTLTDDFNKLMVEADTCLYRSKKDGRNRTSTMRYGEEVV

SEQ ID NO: 7963 - DNA, 1290 bp, Rhodopseudomonas palustris CGA009
  CDS (1)..(1290): transl_table=11
gtggctgtccgggaaatcccgcgagaatgccgctggaatcaatctactagcggcctctatcaacccttgcgagcaaatggcagataccaaaacgaaaggcttttcctagtaggttccccaagagcaaaatcgaccgggcggacgatgggaccaactgccgcgctgtcgggcaccctgcccgatcctcaaaccagggccgaagacgcgcgcacccttgccgtccgcggccggcggatgcgtcagcgccggcacatgctggacctgatcgccgccagcttcatgatcgatgccgcgatcctgctgatctacgtccaagccgggacaatcccgtcgatggtggtggtggcgttcgccgtctccggcgccctggtcggtggcatcctgttcgctctgtcggaatccggattcaacgatcgcttctccgatcactatctgacggtgccgatcgcgatcacgacgctggcattgatcatcgccttcacggtgtgggcgccgcagatcggggcgttcttcctgttcgaactgttcgtcgtgttcggcttcgcgtcgctgcgcgccgaccgccggcaggcgctgatcctatggtccgcgctgctgtgcgcgctggtgccgctgttcctgctcaccgatctgccgatcgggatgccgcacgacaattcgctcgaacgcctcgccaccctgctggcgctggtgctgacggtcggacgctgcaccttcatcggggtgttttcgaaagccttgcgcgactcgctttacaagcgcggcgtccagctgcgcgaagcctatcagcggatcgaggagctggccgaactcgacgaactgaccggggcctataaccgccgctgtatcatgcggcacctggacaatgagatcgaacgcgcggcgcggcactgcgagtcgctgtcgctggcgttgatcgacctcgactggttcaagcgcatcaatgatacctttggccatccgatcggtgacgaggtgctgcgcaccttcgccatcaccatcttcgccaacatccgcagcttcgaccggttcggccgctacggcggcgaagaattcctgctgctgctgccgaacacatccgacgacgaagcccgcctgatcctcgaccggcttcgcatgatcgtcgccgatctcgactggagcgcgttctcgcccagcatgatggtgacgttgtccgccggcgtcaccaccatgacgctccaagaatccaccgaagccgtgctggcacgggccgatcgcgcgctctacgaggccaagcacggcggacgaaaccgaatttcctgcgcctga

SEQ ID NO: 7964 - protein, 429 aa, Rhodopseudomonas palustris CGA009
MAVREIPRECRWNQSTSGLYQPLRANGRYQNERLFLVGSPRAKSTGRTMGPTAALSGTLPDPQTRAEDARTLAVRGRRMRQRRHMLDLIAASFMIDAAILLIYVQAGTIPSMVVVAFAVSGALVGGILFALSESGFNDRFSDHYLTVPIAITTLALIIAFTVWAPQIGAFFLFELFVVFGFASLRADRRQALILWSALLCALVPLFLLTDLPIGMPHDNSLERLATLLALVLTVGRCTFIGVFSKALRDSLYKRGVQLREAYQRIEELAELDELTGAYNRRCIMRHLDNEIERAARHCESLSLALIDLDWFKRINDTFGHPIGDEVLRTFAITIFANIRSFDRFGRYGGEEFLLLLPNTSDDEARLILDRLRMIVADLDWSAFSPSMMVTLSAGVTTMTLQESTEAVLARADRALYEAKHGGRNRISCA

SEQ ID NO: 7965 - DNA, 1470 bp, Erwinia carotovora subsp. atroseptica SCRI1043
  CDS (1)..(1470): transl_table=11
atgaataacgatttgacgttgaaaactataaaattcatgccgcttctgtttctgaccaccctaatagtgagctgtctgggatttcggtttcgagtgctggatgaactgtcgctgttttggcccgctaatatgctggttttttgtctcatgattagtttcagggccagaaaagggacgataaaaggtaaaacattctcgatcggtatgggttttttagtgggctatgcggcgatgctgtcggcagcgttactgatggataataactcgccattaaaaaccaaggtactgttatgtttgtgcaatattatctttgtggtggcggcctggtgcgccttttgcctgatgtgccggtttaccggaaagtggtcgacatttgaaaaattcagcaagtattacgtctacattattttcgcttcgacgtttgtaggcgcgttctcatcaggtgtggcttatggattctatgcgtatgtctacgatgttgggaatcactatgatgaatttatggactggttcagtgaacaactgggaactggcattattctcgcgttctttttcctgcggggtaaagacatcctacgggcgttacggaatattccgctctgccctaagcacatcaaagaaaatgtttttccctttctggtcttcattattttcttattggttagcctgttttttctggacgccagtcttattacactgtccgttattccacttacgctgtgcgcgttcaattactctttcccgattatgtcgctactctgtgcaattacgggcgtaatactgaattatctctatattaatcaggtcggtatactcatagattcaaattccgaagcgtacattaattcgtttctcaccacggcacgactgaatattgcgatgctcattatggcgatgttaagcgtctcgcattttgtttcgatgaatcggcgactgattaaaatcatcgaaagtaacagcctgaaggatgcacttacgaataccttcaatcgtcgcgcttttctcagtatgttgaacgtgagacagggcgtgctgatgaataagagaaagcgtcaaataacgctgctatttctggatatcgattattttaagcaggtcaacgatacctacggccatgcctgcggtgatgaattgatcgccagctttgcccgtatgctgagcgccaatattcgaccgagcgacattctttgccgctggggcggggaagagttcattattgcggcttacgacctgacggatgagcagtctgaagccatggctgaagcgctgcggcgtcttacggaatccaccccgcttatgctgtccgatggtcgggaaatttactttactgtcagcattggcgttgccattttttcccagtatgaaggcggcaatatttacgatctcatcgggctggcggacgagcaactctataaagcgaaggctcagggacgtaattgcgtttgcatgcgcttggccgagggcgtctga

SEQ ID NO: 7966 - protein, 489 aa, Erwinia carotovora subsp. atroseptica SCRI1043
MNNDLTLKTIKFMPLLFLTTLIVSCLGFRFRVLDELSLFWPANMLVFCLMISFRARKGTIKGKTFSIGMGFLVGYAAMLSAALLMDNNSPLKTKVLLCLCNIIFVVAAWCAFCLMCRFTGKWSTFEKFSKYYVYIIFASTFVGAFSSGVAYGFYAYVYDVGNHYDEFMDWFSEQLGTGIILAFFFLRGKDILRALRNIPLCPKHIKENVFPFLVFIIFLLVSLFFLDASLITLSVIPLTLCAFNYSFPIMSLLCAITGVILNYLYINQVGILIDSNSEAYINSFLTTARLNIAMLIMAMLSVSHFVSMNRRLIKIIESNSLKDALTNTFNRRAFLSMLNVRQGVLMNKRKRQITLLFLDIDYFKQVNDTYGHACGDELIASFARMLSANIRPSDILCRWGGEEFIIAAYDLTDEQSEAMAEALRRLTESTPLMLSDGREIYFTVSIGVAIFSQYEGGNIYDLIGLADEQLYKAKAQGRNCVCMRLAEGV

SEQ ID NO: 7967 - DNA, 1083 bp, Rhodospirillum rubrum ATCC 11170
  CDS (1)..(1083): transl_table=11
gtgagccctcctcggctcgaggatcccatcacgaaatcagaggccggcgtttcccccatgctttccccccatgaggccagggaccgccatcgccacgatgtcatcactcgcagcctccttgtcggcgccttgctctgcgcgatcttcgcgcctttcgatttctttctcaccggctattgggtcgacgcgacggtcgaggcgctgggagcggcgacgctgcttgcgctgggggtctttctgcgccggggcggcgatcggctggtcgccgccctgatcggccatatcatcggcggggcggtgattctgaccgtggtgttgggggggaaggcccaagacgcggttttttcctgggccgtgctgtttccggtgcttcccttcttcgttctcggccaacggctggggctgttggtctccatcgtgttcgcgaccacggcgacggtcggcgtcaccatcctggccgtccttgacggagcgcaaggcttctcgtggatcgcgcccttcaatctggccggtgccctggccggctgcacggtgctggcttatttctatgaaggaacccgcgccaaagcggcgcggcagcttgaaaccctggcgaaatccgatccgctgaccggtcttgccaaccgccggggcctgcttgacgccttcggcggcgccgttctgacgcgctcccgggcgccgcaccggctttcgctgctggtccttgatctcgatcatttcaaaagcatcaatgaccgctacggccacgaggccggcgatggggtgctttgtcatgtggcgcatgtgatcaaggggatgatacgcgccaacgacctgatcgcacgcatcggcggcgaggaattcgcccttttgctgcccgatacggatttggccggggcccgcgaggtggccgaaaagatccgcaaggccatcgaaagcaccgccctgatcggccctggcggctccttgtccgtcaccgttagcatcggcgtcgccgaactcgatccccaatacccggacttcgccgcgcttttctcttccgccgaccaccggctgtatcaggccaagaaggccggccgcaatcgggtgagcgccgccacctga

SEQ ID NO: 7968 - protein, 360 aa, Rhodospirillum rubrum ATCC 11170
MSPPRLEDPITKSEAGVSPMLSPHEARDRHRHDVITRSLLVGALLCAIFAPFDFFLTGYWVDATVEALGAATLLALGVFLRRGGDRLVAALIGHIIGGAVILTVVLGGKAQDAVFSWAVLFPVLPFFVLGQRLGLLVSIVFATTATVGVTILAVLDGAQGFSWIAPFNLAGALAGCTVLAYFYEGTRAKAARQLETLAKSDPLTGLANRRGLLDAFGGAVLTRSRAPHRLSLLVLDLDHFKSINDRYGHEAGDGVLCHVAHVIKGMIRANDLIARIGGEEFALLLPDTDLAGAREVAEKIRKAIESTALIGPGGSLSVTVSIGVAELDPQYPDFAALFSSADHRLYQAKKAGRNRVSAAT

SEQ ID NO: 7969 - DNA, 1812 bp, Saccharophagus degradans 2-40
  CDS (1)..(1812): transl_table=11
atggctaaaatacccactcgtaccgcgtctactctattgctagtggtgctcgcgattataatctcatttgaagtacacgctcagccgacagcaacagcaagcagccttcgcacagaatctattaaagttgacctaaaccaagaatttgagttcctcgagctagataacaatttcaagctgtacgaagatgtttctgccagcgccacgatagacgatgtagcgcaagtgtttgaagatgaagccaccactcagttttcggttggcgacaccaacatagggtattcgagctctgcttggtgggtaaaactaagctttcacaacccgcagtcggcacctaaagaaattattctacgacaagcttacccccttattgataaccttcaactctggacaagaagctacgagagccattggagcgtaaagcaatatggcgataaatttccttttagccacagagaaatttaccaccgcgaattcctgtttccactaatcatccccgcaaggtccacaaaagaatactttttacgctacgaatcagaaggctcactcgacatagcgttaagcatacacgagccgcaacacttacttagttttgtgggcactcagcaacttatttacgggttgtattacggtggctttatggtgcttgtgctctataacctgtttatttttatagcagtgcgagataaagcctttttgtactaccttctatatatattcttttacgggctctatatgggcgcacataatggcctaacgtttcaatatttctggcctaatcacccacaaataggtaacgagggcctgcttgttaccctctcgctgtcgctggtgtttgcgctgcaattctcaacagatattttaaatattaaagaattttctaagctgcttaaccgaatagccaaatgcctaatgatagcttgcgttgtagcaatacccgccgtacttacaatgccctatgcttttatggcacctgttatgacagtgctaaccctaaccataatgccgctattttttgttatgggcgtattacgattagcatcgggctaccgccctgctcgctattttatgctcgcatggaccgcactcatctttagcgtaattgtttatgtacttaaagtgtttggcgtattaccaagaacattctttaccgaaaacggtttccaaataggctcaattattgaaatggtgttgctatcactcgcattgggtagccgtatgacagaacttaaacaacaaagccacaccgacgccctaacagaaataggtaatcgacgccgattcgacgatgtattcccagttgaatttgagcgagcgcagcgcaacaaacaaccgctggcactgcttatgatagatatagattacttcaaaaagcttaatgacacatttggccacgatgctggtgaccaagcattgcgtgcagtagctacaaccattaaaacccttactcgcaaaccaatgttaccctgccgttttggcggtgaagaatttgctgtaattttgccgcgcaccgatagcgcggctgcaaaaatagtcgcagaacgcataaggcaaaccatcgccgaaaaacctatggctaaacgagaagttactgtgagtgtgggtgtggcatcaacggacatggggtatttcacatcatcacgagccattatgaacgccgccgatgaatgcctttaccttgcgaaagaaatgggtagaaatagagtgtgtttgtttagcgaggcaccacaaaagcaggcgccaatcgctgcatctaaaacaccgctgctggaaaacactacggagggcaacgagcctaacgccgctgtttaa

SEQ ID NO: 7970 - protein, 603 aa, Saccharophagus degradans 2-40
MAKIPTRTASTLLLVVLAIIISFEVHAQPTATASSLRTESIKVDLNQEFEFLELDNNFKLYEDVSASATIDDVAQVFEDEATTQFSVGDTNIGYSSSAWWVKLSFHNPQSAPKEIILRQAYPLIDNLQLWTRSYESHWSVKQYGDKFPFSHREIYHREFLFPLIIPARSTKEYFLRYESEGSLDIALSIHEPQHLLSFVGTQQLIYGLYYGGFMVLVLYNLFIFIAVRDKAFLYYLLYIFFYGLYMGAHNGLTFQYFWPNHPQIGNEGLLVTLSLSLVFALQFSTDILNIKEFSKLLNRIAKCLMIACVVAIPAVLTMPYAFMAPVMTVLTLTIMPLFFVMGVLRLASGYRPARYFMLAWTALIFSVIVYVLKVFGVLPRTFFTENGFQIGSIIEMVLLSLALGSRMTELKQQSHTDALTEIGNRRRFDDVFPVEFERAQRNKQPLALLMIDIDYFKKLNDTFGHDAGDQALRAVATTIKTLTRKPMLPCRFGGEEFAVILPRTDSAAAKIVAERIRQTIAEKPMAKREVTVSVGVASTDMGYFTSSRAIMNAADECLYLAKEMGRNRVCLFSEAPQKQAPIAASKTPLLENTTEGNEPNAAV

SEQ ID NO: 7971 - DNA, 1143 bp, Shewanella sp. ANA-3
  CDS (1)..(1143): transl_table=11
atgatgataaatagtgacaattcaactttattaacatttattgaaatcataaaatttgaggcaagtgaaaaatatttgataaaaaaatattttgattatcgtatttgtactacagcgatactgttattactaatacccttaggatttgcagaaggcttatttgaccatataaccacacctgaattgaatggtgagctactagaacttagattatatatgttttttttgattatccctgcgattttaacatttaaggcaaagagtgttaaaatcgcaacagcaactattattgtgactgtgatcttcatatcttttctttcaataaaaatggctgagattttaggtgaagaggctatttatacagttactaccgtggctatttaccctttccttatattcttcattttaattggactttcaatatacatccaaattactgccctattttctgcttttttgtttgttatacattacaagttagatgcagctacgaatatggatctgcaaaacatttatttccaaatagcatttctttatagtcttgccgcattgttagtaatgctaattttctcttggagttattacaatcgttattgccttgaactggctctagaaaaggggtcaagaactgatccattaacaggtgtagctaatcgaagacattttgatagtttgcttaaatccgaggtgaatcgaaactctagatttggaagcgcttgtgctctcattatactagatatagatttttttaagcgcattaatgatacatacggacacccaactggagatagtgttatttgttcccttgcgaatttctgcgtaaccctctcccgggaaacagatctggtggctcgactaggtggagaagaatttgcaataattctccccgatacaaacattagtagtgcaaagaatctaggagaacgaatcaggttacatgttgagaaccaatctttaataagtgaaacaggagagaaagtaatatggacaattagcttggggatctccgccttacaagaacacaaaattactaaaaataataatgagtttattgctgagcaattaattcagcatgcagatacagctctttacgaggctaaaaaaggcggacgtaatagaactgttttatatgacagtgaataa

SEQ ID NO: 7972 - protein, 380 aa, Shewanella sp. ANA-3
MMINSDNSTLLTFIEIIKFEASEKYLIKKYFDYRICTTAILLLLIPLGFAEGLFDHITTPELNGELLELRLYMFFLIIPAILTFKAKSVKIATATIIVTVIFISFLSIKMAEILGEEAIYTVTTVAIYPFLIFFILIGLSIYIQITALFSAFLFVIHYKLDAATNMDLQNIYFQIAFLYSLAALLVMLIFSWSYYNRYCLELALEKGSRTDPLTGVANRRHFDSLLKSEVNRNSRFGSACALIILDIDFFKRINDTYGHPTGDSVICSLANFCVTLSRETDLVARLGGEEFAIILPDTNISSAKNLGERIRLHVENQSLISETGEKVIWTISLGISALQEHKITKNNNEFIAEQLIQHADTALYEAKKGGRNRTVLYDSE

SEQ ID NO: 7973 - DNA, 1074 bp, Candidatus Desulfococcus oleovorans Hxd3
  CDS (1)..(1074): transl_table=11
atgatcagcgttttccaaaaaggtgataccaggcaggcattgcgaatacgccggacgttgatggctgttgccagttatctgttcatcggtgcgggatgttacctgggtgttcatttaggatatgcccgggatctggaactcagcgttattttgatcatcacgacgggggtgtcgggtatctacctcatcatactgacgatgatgtataaaggcattaatgaacggttccgtgaccccagcctcacactgttccagattttatgcggcattatgtttatcacacttattgcctactacatggtcgaccggatacgcgggaccgcctcggttctttatatcctggcattcatgttcggcaccttccggctccggctgaaggatttgctggtacttacgggcataaccggcgggctttatgccggggccatggcgttgctgcattcttcggatcccggggcggttgatccccagctggaggtcatgcggtgggtcatattgatgatggccctggtctgggtttcctatatggccaactacatctccaagctccggcggcacatcacccgtcttgccactcatgacgccctgaccggggtgttgagcagaagagagattttcgaggtgctgggcagggaaaaagccttttcagaccgggcgggtaccccgttttcgctgtgcatgcttgacctggacgattttaagcagatgaatgacacttacggtcatcaggccggcgatgcggtgctccagtcctttgcccgggccttgaaagacaatacacgggccacggattatgtgggacggtatggtggggaggagtttatggtggtgttttccaacttccagtgcctggacagcagggcaagtggtgtccaacggctgctggccgccacacggaatatttgcctgccggatatttccccggatttgagaatcaccacatcaatcggtattgccgcctaccagccgggcgaatccccggatgcgctgcttgcaagggcggatgccgcgctttatgaagccaaggaaaacggcaaggaccgggccgttttcaaagagccggggaccgattaa

SEQ ID NO: 7974 - protein, 357 aa, Candidatus Desulfococcus oleovorans Hxd3
MISVFQKGDTRQALRIRRTLMAVASYLFIGAGCYLGVHLGYARDLELSVILIITTGVSGIYLIILTMMYKGINERFRDPSLTLFQILCGIMFITLIAYYMVDRIRGTASVLYILAFMFGTFRLRLKDLLVLTGITGGLYAGAMALLHSSDPGAVDPQLEVMRWVILMMALVWVSYMANYISKLRRHITRLATHDALTGVLSRREIFEVLGREKAFSDRAGTPFSLCMLDLDDFKQMNDTYGHQAGDAVLQSFARALKDNTRATDYVGRYGGEEFMVVFSNFQCLDSRASGVQRLLAATRNICLPDISPDLRITTSIGIAAYQPGESPDALLARADAALYEAKENGKDRAVFKEPGTD

SEQ ID NO: 7975 - DNA, 948 bp, Escherichia coli B
  CDS (1)..(948): transl_table=11
ttgcttgcggactggttcagtgagcaattctcaacgggcgtgttgatcgtgccttgtatgctgacgttggctattcctggagtgctgccgcgctttaaagcagaacagatgatgcccgccatcgcgcttattgtgtcggttattgcctcggtagtcattggcggagcggggagtctggcgttcccgctgcctgcattaatctggtgtgcagtgcgctatacgccgcaggtaacatgtctgttgacctttgtcaccggtgcggtggaaatcgtactggtggcaaattcggtgattgatatctcggtcggttcgccgttctccattccgcaaatgttctccgcacgtctcggtattgccacgatggcgatatgcccaattatggtttcttttagcgtggcagcgatcaattcgctaatgaagcaagttgcgctgcgagccgactttgattttctgactcaggtttactcacggtccggtctttatgaggcgctgaaaagtccatcgctgaaacagacacaacatctgactgtcatgctgcttgatatcgactatttcaaaagcattaacgataactatggacatgaatgtggcgataaagtgttaagcgtgtttgcccggcatattcagaagattgtcggtgataaggggctggtggcgcgaatgggcggcgaagaatttgctgttgcagtgccgtcggtgaatcatgtcgatggtctgctaatggcggaaaaaatccgtaaaggcgttgaactgcaaccattcacctggcaacaaaaaacgctttatctcacggtaagtattggcgtcggtagtggtcgcgcatcgtaccgaacgctgaccgatgactttaataaattgatggtcgaagccgatacgtgtctgtatcgctcgaagaaagatgggcgcaaccgtaccagcactatgcgttacggtgaggaagttgtctga

SEQ ID NO: 7976 - protein, 315 aa, Escherichia coli B
MLADWFSEQFSTGVLIVPCMLTLAIPGVLPRFKAEQMMPAIALIVSVIASVVIGGAGSLAFPLPALIWCAVRYTPQVTCLLTFVTGAVEIVLVANSVIDISVGSPFSIPQMFSARLGIATMAICPIMVSFSVAAINSLMKQVALRADFDFLTQVYSRSGLYEALKSPSLKQTQHLTVMLLDIDYFKSINDNYGHECGDKVLSVFARHIQKIVGDKGLVARMGGEEFAVAVPSVNHVDGLLMAEKIRKGVELQPFTWQQKTLYLTVSIGVGSGRASYRTLTDDFNKLMVEADTCLYRSKKDGRNRTSTMRYGEEVV

SEQ ID NO: 7977 - DNA, 1167 bp, Pseudomonas putida GB-1
  CDS (1)..(1167): transl_table=11
atggcgctagatccacccacgatgttgaccatttcggttgccttggctgctgccgctgccttgtacctggcaattgaatggcgcagtgtccgcgaaacctctctgctgttctggagcgccggtttcgccaccattactgtcggttgcatcctggctttgctgcgcgggatcggtttgttgttcatcggcatctggttcgccaatggcttgctggtggtcgcgcacggtttttttctgatgggcgtgctgcgatttacccaggagcgcttgtcgcgtgcctggctgatgatcgtggtggtctggttcgccttgctgctgttgcctgtggggccgcagtggtcgaaggtgatgctgatggtcaactcgttgctggtggcggcgttgacgctcaaggccagtttcctgttgcggccgcatggcagatcgctgagtgttggcgcggtgcagttgcgctatgtgctgctgattcatggggcattctatgtagccaaggcgatcattgcgattacgccgggtacgttgattgacctggccacctttggcgggctgatcattcaggtttccctggtcgagggggcgatggcgatcatgctgattgccttgtcgatgacgggaaccgtgcgttaccggcgtgaggaacggattgcccggctggcggcccgtgatccgctgaccgcgctgtacaaccggcgagcgctggaggtgcgggctgggcatttcttcaaggacgtgagccctgcgcaacctggggcgttactgctgatcgacatcgacaatttcaagctggtcaacgacctgcacgggcatatagccggggaccgcttgctgattgccttgagcgagatgattcgcacggcgctgcccgagcgctcgctggcggcgcggttggggggcgatgagtttgtcatcttgctgagtggggcgagtagtgaacgggtcatggagctgggtgggatgctgcgtgagcagttccagcagtacgcctgcaagaccgtgccaacgccgcaggcggttaccttgagcatcggtgccaacctgttcgaccagccaccggcgagcctggcggcgttgatcgagcagggggatgtggcgctgtaccagtccaagcgtggagggcgcgacagcattcggtttgtcgagcggcccatggcagacattagccactag

SEQ ID NO: 7978 - protein, 388 aa, Pseudomonas putida GB-1
MALDPPTMLTISVALAAAAALYLAIEWRSVRETSLLFWSAGFATITVGCILALLRGIGLLFIGIWFANGLLVVAHGFFLMGVLRFTQERLSRAWLMIVVVWFALLLLPVGPQWSKVMLMVNSLLVAALTLKASFLLRPHGRSLSVGAVQLRYVLLIHGAFYVAKAIIAITPGTLIDLATFGGLIIQVSLVEGAMAIMLIALSMTGTVRYRREERIARLAARDPLTALYNRRALEVRAGHFFKDVSPAQPGALLLIDIDNFKLVNDLHGHIAGDRLLIALSEMIRTALPERSLAARLGGDEFVILLSGASSERVMELGGMLREQFQQYACKTVPTPQAVTLSIGANLFDQPPASLAALIEQGDVALYQSKRGGRDSIRFVERPMADISH

SEQ ID NO: 7979 - DNA, 1410 bp, Pseudomonas putida GB-1
  CDS (1)..(1410): transl_table=11
atggtttttccagcccaatcgcgcttgatgccttatgtctttctgctttgcctgacctttgcccttaccctgggcggcatcctggcacgcccgatcgaatcgctgtcgctgttctggccggtgaatgcggtactggccggcgtactgctgcgctacccccgccaagccacgtttaccggcttcagcctggtgtggctggccatggtcggcgccgacttgctgtgcggcagtgcctgggtgccggccctgtggttcaacttgtgcaatcttggcgtggtggtcaccctctggcagttgctttctcgcttgccacggctgcatcggcgcatgcgcaccccacacggcgtgctcagcgtgttcgccgcctgcgccgccgccgccatggtggcagccagcatggcagcggtaatggctgccccctggttcgaacagtcgttgcgtgccacctggctcgcctggttcagcgaacaattctcgaccagcgtgctggtgctgccggtaatgcttacagcgccctcgctgcgtgccctggtgcgtggcggtgcacagcccatccgtctggcaccgttgctggtgctgttggcctcgctggcgttcagcatcgcgtttggcgggcctggggccattgccttcccgattgccgcgttgctgtggtgtgcctggacctattcaccgttcctggtttcactactgacgctcacggccgggagcacactgatcgtagcggtggcacaaaacctcatgcacttcagcgtgccgcagagcgaaccgggggtcaccacgctgatgtcggctcgccttggcatcgccatgctggtgctagggccgctggtggtggcctgcgtcagccaggccaaccgcagcctcatggcccgcctggcgcgccaggccaccatcgatcacctcaccggcgtgctcacccgcagcgctttcacccgtcgtgccaacgcgctgctcgacagccgccagcagcacgcccaggcgctcccgctgaccctgatgatgctggacatcgaccatttcaagtcggtcaacgatgctcatggccatgcggtcggtgaccaggtgctgcgccagttcgccggcaccctgcaggatcagttgcacaacgacgaactgttcgcgcgcctgggcggtgaggaattcgcggtcatcatccccggccttgcgccagagcgggccaagttcaccgccgaacgcctgcgccgcgccgtgcaggacctgcatgtaatgcaggccgaccaacgcttgcagattaccgtgagtatcggcctggctggctgcgatgccgacatgccagcccctagcctggacgaactgctggcgagtgccgatcaggcgctgtaccgggccaaggcccacggccgcaaccgcgtcgaacaggccgaagcacagcgccaggtggtctga

SEQ ID NO: 7980 - protein, 469 aa, Pseudomonas putida GB-1
MVFPAQSRLMPYVFLLCLTFALTLGGILARPIESLSLFWPVNAVLAGVLLRYPRQATFTGFSLVWLAMVGADLLCGSAWVPALWFNLCNLGVVVTLWQLLSRLPRLHRRMRTPHGVLSVFAACAAAAMVAASMAAVMAAPWFEQSLRATWLAWFSEQFSTSVLVLPVMLTAPSLRALVRGGAQPIRLAPLLVLLASLAFSIAFGGPGAIAFPIAALLWCAWTYSPFLVSLLTLTAGSTLIVAVAQNLMHFSVPQSEPGVTTLMSARLGIAMLVLGPLVVACVSQANRSLMARLARQATIDHLTGVLTRSAFTRRANALLDSRQQHAQALPLTLMMLDIDHFKSVNDAHGHAVGDQVLRQFAGTLQDQLHNDELFARLGGEEFAVIIPGLAPERAKFTAERLRRAVQDLHVMQADQRLQITVSIGLAGCDADMPAPSLDELLASADQALYRAKAHGRNRVEQAEAQRQVV

SEQ ID NO: 7981 - DNA, 1161 bp, Pseudomonas putida GB-1
  CDS (1)..(1161): transl_table=11
atgatcgcccacacccccacgttgttcgccgccgttgccctggtggcaaccatcctggccttctgcttgctgctggtcgggcgcagcaaccgccgcgacaacctgatgctgactggctgcgggctgctggtgcatgccttggcttatgtctgctacaccgtctatgcccaagcccctttgtggctcagctatggcgtgggcaacagcctgctgtcgctggccctggcgttctacacggccagcttgttccgggtgcgtgagcaggtagtgccctggcgtgtcatcttcgtcataccggcctgcatgctggtggggctgatgctgctgctcgatacgctggaaccgcgcatgctgctggcgaccctggtgctgatgctgcagtgcgcgatgatcttgtattgggcgtggcgttatgccgagcggccgggcagggcccatctgttgctggagattggcgcgttgatcagcctggtgggcctgggtatgcgtgtggtggcggtggccaatggcacggcggtggaaatgcgctatgacaccagcaacctcaaacagagcatttctgtggccatcggcaccgccacggtgatgatgtactcgatcggcttggtgctcctggccaaggagcgtagcgaatcgcgcctgcagcacctcgctctgcgtgatgtgctgaccggtacctacaatcgccgggcgatcctcgaacgcttcggcgtcgaactggaccgtgcacgcgatcagcagggcagtctggcggtggcgatgatcgacattgaccatttcaaacgcatcaatgacctgtatgggcatctggctggcgatgaggtgttatgccactgcgtgcgccagttgcagcagcgcctgcgccagggtgacagccttggtcgttacggcggcgaagagtttctgttgctgttgcccggcaccgaccgcaccggtgcaatggccgccctgcaagggctgcgcgaggccattgcgcgcagcccggcgcgttttgccggtgaccagatcgaactgcgtttcagcgtaggcctgtggtgcggcgtgccgtgcccaggggacagtactgccagcttgctggcccaggccgatgcggcgctgtaccaggccaaggccgctgggcgcaacacggtgcacatggcggcattggtcgaggcgagttga

SEQ ID NO: 7982 - protein, 386 aa, Pseudomonas putida GB-1
MIAHTPTLFAAVALVATILAFCLLLVGRSNRRDNLMLTGCGLLVHALAYVCYTVYAQAPLWLSYGVGNSLLSLALAFYTASLFRVREQVVPWRVIFVIPACMLVGLMLLLDTLEPRMLLATLVLMLQCAMILYWAWRYAERPGRAHLLLEIGALISLVGLGMRVVAVANGTAVEMRYDTSNLKQSISVAIGTATVMMYSIGLVLLAKERSESRLQHLALRDVLTGTYNRRAILERFGVELDRARDQQGSLAVAMIDIDHFKRINDLYGHLAGDEVLCHCVRQLQQRLRQGDSLGRYGGEEFLLLLPGTDRTGAMAALQGLREAIARSPARFAGDQIELRFSVGLWCGVPCPGDSTASLLAQADAALYQAKAAGRNTVHMAALVEAS

SEQ ID NO: 7983 - DNA, 984 bp, Bacillus sp. SG-1
  CDS (1)..(984): transl_table=11
atggggatttcaggcgggttattcagcaatatcctgatgcagtacagtatgcaaatcggaaacaccattatagatctaaggcatgtgcctgtaatattagttgcctattatggcgggagcatcccagctttgattgccatggtaatggtcatcatcgggcgtttcatcattggcattaatacttcttcctatcttgcggtgattctgatttgtaccattacggctgcagccatctatatttcaaaaagaaaactaccaaaaaagacaaagatcctactgatcctgactttttcaaacgttatcttttctgtgctggtttcttatttgttaaaagacccaagcacacttttgttccttcttccgacctattggatcatctcctatagtgcaggctttatctctttttatattgttgagtacctgcgccggagccaggccttatttgaccgttacaagtctgagtctgcaacagatggacttacggggctgaataacgtaaggaagtttgatgaaatctttaatgaccttctaagaacaattccaaataataacgagaagctctcacttttatatctggatattgattttttcaaaaaggttaatgatacatacggacatcaaaatggagatattattttgaaagatttaggaaagatcttgcaagaatctgttcgctcctttgatattgtcagccgcaatggcggagaggaattcaccgtcatcttactggattgccctgtcgatcgggcgaaagaaatcagtgaaaagatcagaaaagcagtagaagatcatgaattcacgttaacagacggacaaatcatccacattaccatctcaatcggcattgcatgttttaacgatacaactgatgatgtaacctcattgattgaagatgcagacagtgctttatacatggctaaaaaaaccggcagaaacagagtctgtgtctctgagaatataaaagcagtaaagataacatattaa

SEQ ID NO: 7984 - protein, 327 aa, Bacillus sp. SG-1
MGISGGLFSNILMQYSMQIGNTIIDLRHVPVILVAYYGGSIPALIAMVMVIIGRFIIGINTSSYLAVILICTITAAAIYISKRKLPKKTKILLILTFSNVIFSVLVSYLLKDPSTLLFLLPTYWIISYSAGFISFYIVEYLRRSQALFDRYKSESATDGLTGLNNVRKFDEIFNDLLRTIPNNNEKLSLLYLDIDFFKKVNDTYGHQNGDIILKDLGKILQESVRSFDIVSRNGGEEFTVILLDCPVDRAKEISEKIRKAVEDHEFTLTDGQIIHITISIGIACFNDTTDDVTSLIEDADSALYMAKKTGRNRVCVSENIKAVKITY

SEQ ID NO: 7985 - DNA, 948 bp, Escherichia coli O157
  CDS (1)..(948): transl_table=11
ttgcttgcggactggttcagtgagcaattctcaacgggcgtgttgatcgtgccttgtatgctgacgttggctattcctggagtgctgccgcgctttaaagcagaacagatgatgcccgccatcgcgcttattgtgtcggttattgcctcggtagtcattggcggagcggggagtctggcgttcccgctgcctgcattaatctggtgtgcagtgcgctatacgccgcaggtaacatgtctgttgacctttgtcaccggtgcggtggaaatcgtactggtggctaattcggtgattgatatctcggtcggttcgccgttctccattccgcaaatgttctccgcacgtctcggtattgccacgatggcgatatgcccaattatggtttcttttagcgtggcagcgatcaattcgctaatgaagcaagttgcgctgcgagccgactttgattttctgactcaggtttactcacggtccggtctttatgaggcgctgaaaagtccatcgctgaaacagacacaacatctgactgtcatgctacttgatatcgactatttcaaaagtattaacgataactatggacatgaatgtggcgataaagtgttaagcgtgtttgcccggcatattcagaagattgtcggtgataaggggctggtggcgcgcatgggcggcgaagaatttgctgttgcagtgccgtcagtgaatcctgtcgatggtctgctaatggcggaaaaaatccgtaaaggcgttgaactgcaaccattcacctggcaacaaaaaacgctttatctcacggtaagtattggcgtcggtagtggtcgcgcatcgtaccgaacgctgaccgatgactttaataaattgatggtcgaagccgatacctgtctgtatcgctcgaagaaagatgggcgcaaccgtaccagcactatgcgttacggtgaggaagttgtctga

SEQ ID NO: 7986 - protein, 315 aa, Escherichia coli O157
MLADWFSEQFSTGVLIVPCMLTLAIPGVLPRFKAEQMMPAIALIVSVIASVVIGGAGSLAFPLPALIWCAVRYTPQVTCLLTFVTGAVEIVLVANSVIDISVGSPFSIPQMFSARLGIATMAICPIMVSFSVAAINSLMKQVALRADFDFLTQVYSRSGLYEALKSPSLKQTQHLTVMLLDIDYFKSINDNYGHECGDKVLSVFARHIQKIVGDKGLVARMGGEEFAVAVPSVNPVDGLLMAEKIRKGVELQPFTWQQKTLYLTVSIGVGSGRASYRTLTDDFNKLMVEADTCLYRSKKDGRNRTSTMRYGEEVV

SEQ ID NO: 7987 - DNA, 23 bp, Artificial sequence
  primer
atgcttgcggactggttcagtga

SEQ ID NO: 7988 - DNA, 25 bp, Artificial sequence
  primer
ttagacaacttcctcaccgtaacgc

SEQ ID NO: 7989 - protein, 164 aa, Artificial sequence
  consensus sequence
  Variant (2)..(2): Xaa in position 2 is any amino acid
  Variant (5)..(8): Xaa in position 5 to 8 is any amino acid
  Variant (10)..(28): Xaa in position 10 to 28 is any amino acid
  Variant (29)..(36): Xaa in position 29 to 36 is any or no amino acid
  Variant (41)..(41): Xaa in position 41 is any amino acid
  Variant (44)..(45): Xaa in position 44 to 45 is any amino acid
  Variant (48)..(49): Xaa in position 48 to 49 is any amino acid
  Variant (52)..(53): Xaa in position 52 to 53 is any amino acid
  Variant (56)..(57): Xaa in position 56 to 57 is any amino acid
  Variant (59)..(61): Xaa in position 59 to 61 is any amino acid
  Variant (63)..(76): Xaa in position 63 to 76 is any amino acid
  Variant (78)..(78): Xaa in position 78 is any amino acid
  Variant (84)..(99): Xaa in position 84 to 99 is any amino acid
  Variant (101)..(102): Xaa in position 101 to 102 is any amino acid
  Variant (104)..(116): Xaa in position 104 to 116 is any amino acid
  Variant (117)..(121): Xaa in position 117 to 121 is any or no amino acid
  Variant (123)..(123): Xaa in position 123 is any amino acid
  Variant (125)..(125): Xaa in position 125 is any amino acid
  Variant (127)..(138): Xaa in position 127 to 138 is any amino acid
  Variant (139)..(146): Xaa in position 139 to 146 is any or no amino acid
  Variant (148)..(150): Xaa in position 148 to 150 is any amino acid
  Variant (153)..(154): Xaa in position 153 to 154 is any amino acid
  Variant (157)..(158): Xaa in position 157 to 158 is any amino acid
  Variant (160)..(161): Xaa in position 160 to 161 is any amino acid
DXLTXXXXRXXXXXXXXXXXXXXXXXXXXXXXXXXXLDIDXFKXXNDXXGHXXGDXXLXXXAXXXXXXXXXXXXXXRXGGEEFXXXXXXXXXXXXXXXXEXXRXXXXXXXXXXXXXXXXXXTXSXGXXXXXXXXXXXXXXXXXXXXLXXXADXXLYXXKXXGRN

SEQ ID NO: 7990 - protein, 56 aa, Artificial sequence
  protein pattern
  Variant (2)..(2): Xaa in position 2 is any or no amino acid
  Variant (4)..(6): Xaa in position 4 to 6 is any or no amino acid
  Variant (8)..(8): Xaa in position 8 is Ile or Leu
  Variant (10)..(10): Xaa in position 10 is any amino acid
  Variant (13)..(13): Xaa in position 13 is any amino acid
  Variant (14)..(14): Xaa in position 14 is Ile, Leu or Val
  Variant (17)..(17): Xaa in position 17 is any amino acid
  Variant (18)..(18): Xaa in position 18 is Phe, His or Tyr
  Variant (21)..(22): Xaa in position 21 to 22 is any amino acid
  Variant (25)..(25): Xaa in position 25 is any amino acid
  Variant (26)..(26): Xaa in position 26 is Ala, Ile, Leu or Val
  Variant (27)..(27): Xaa in position 27 is Ile or Leu
  Variant (28)..(29): Xaa in position 28 to 29 is any amino acid
  Variant (30)..(30): Xaa in position 30 is Phe, Leu or Val
  Variant (31)..(31): Xaa in position 31 is Ala, Gly or Ser
  Variant (32)..(33): Xaa in position 32 to 33 is any amino acid
  Variant (34)..(34): Xaa in position 34 is Ile, Leu or Val
  Variant (35)..(44): Xaa in position 35 to 44 is any amino acid
  Variant (45)..(45): Xaa in position 45 is Ala, Cys, Gly or Ser
  Variant (47)..(47): Xaa in position 47 is any amino acid
  Variant (50)..(50): Xaa in position 50 is Asp or Glu
  Variant (53)..(53): Xaa in position 53 is any amino acid
  Variant (54)..(54): Xaa in position 54 is Ile, Leu or Val
  Variant (55)..(55): Xaa in position 55 is any amino acid
  Variant (56)..(56): Xaa in position 56 is Ala, Ile, Leu or Val
LXLXXXDXDXFKXXNDXXGHXXGDXXXXXXXXXXXXXXXXXXXXXRXGGXEFXXXX

SEQ ID NO: 7991 - protein, 15 aa, Artificial sequence
  protein pattern
  Variant (2)..(2): Xaa in position 2 is any or no amino acid
  Variant (4)..(5): Xaa in position 4 to 5 is any amino acid
  Variant (8)..(8): Xaa in position 8 is any amino acid
  Variant (9)..(9): Xaa in position 9 is Ala or Ser
  Variant (11)..(12): Xaa in position 11 to 12 is any amino acid
AXDXXLYXXKXXGRN

SEQ ID NO: 7992 - DNA, 1035 bp, Escherichia coli
  CDS (1)..(1035): transl_table=11
atggcaaagccgatcatcacgctcaatggcctaaaaatcgtcattatgttgggaatgctggtcattattctctgcggtatccgttttgccgccgagatcatcgtgccgtttattctcgcattatttattgctgttattcttaacccgctggtgcaacacatggtccgctggcgtgtgccgcgtgtactggcggtgtcgattttgatgaccatcatcgtgatggcgatggtgttgctattagcttatctgggttccgcgctcaacgagttgacgcggacgttaccgcaatatcgcaactctattatgacgccgctgcaagcgcttgaaccgttgttgcaacgcgtagggattgacgtctcagttgaccagctggcgcattatattgatccgaacgcggcgatgacgttgctcaccaacttattgacgcagttatctaatgccatgtcatcaatatttttattgctgctgacggtgctgtttatgctgctcgaagtgccacaattgcccggaaaatttcagcaaatgatggcgcgtccggttgaagggatggcggcgattcaacgtgcgattgacagtgtttctcattatctggtgctgaaaacagccatcagcatcatcaccggcctggtcgcctgggcgatgctcgccgcactcgatgttcgcttcgcttttgtctggggattgctggcctttgcgcttaattacatcccgaatattggttcagtcctcgcggcaatcccccctatcgctcaggtactggtgtttaatggcttctacgaagcgttgctggtgctggcgggatatctgctgattaatctggtcttcggcaatattctggagccgcgtatcatggggcgtgggctggggctttccacattggtggtatttttgtcgttgattttttggggatggttgttaggaccggtgggtatgctgctttccgtgccgttgacaattattgtcaaaattgcgcttgaacaaacagcgggaggtcaaagcatcgccgttctgttaagcgatctcaataaagagtaa

SEQ ID NO: 7993 - protein, 344 aa, Escherichia coli
MAKPIITLNGLKIVIMLGMLVIILCGIRFAAEIIVPFILALFIAVILNPLVQHMVRWRVPRVLAVSILMTIIVMAMVLLLAYLGSALNELTRTLPQYRNSIMTPLQALEPLLQRVGIDVSVDQLAHYIDPNAAMTLLTNLLTQLSNAMSSIFLLLLTVLFMLLEVPQLPGKFQQMMARPVEGMAAIQRAIDSVSHYLVLKTAISIITGLVAWAMLAALDVRFAFVWGLLAFALNYIPNIGSVLAAIPPIAQVLVFNGFYEALLVLAGYLLINLVFGNILEPRIMGRGLGLSTLVVFLSLIFWGWLLGPVGMLLSVPLTIIVKIALEQTAGGQSIAVLLSDLNKE

SEQ ID NO: 7994 - DNA, 1254 bp, Pasteurella multocida subsp. multocida str. Pm70
  CDS (1)..(1254): transl_table=11
atgctcaaagttgaatcgcctattttaaaagtgttggtcgctttagcctccatagtgatcattttggctggcgtcaaagtcgcaagtgaaattgcggtaccgtttttattatcgctttttattgccatcatttgctcaccgatcatccgctttatgactagccgtaaagtcccgcactggcttgccattaccttattactgttgatgattttagtggtgtttttctcggtgttaagtttgatcaatagcaccgcgcgagagtttactcaatcgatccctcaatatcgtcttttattatcagaacggattaatgctttagtattattggcgaagaagtggaatattcccttggatttgtccaccgagcgaacgatggaatatatggatccgagtgtgatcatgaatttggtgagtagtacattactaagcttttccggcgtcgtcaccaacgtatttgttctgttccttgtggtgatttttatgctgagtgaagcgccgtttgcgaaacataaattggcgctcgtatttagttctgacgtgcgtgatgttcaccgtgaagaacattatattaaccggattttacaaggggtaattagttatcttggcgtgaaaacgctgaccagtttattaaccggtgtttgcgtttatattctgcttgaattaactgatgtgcaatatgctattttatgggcaactttgagttttctgcttaactatattcccaatattggttcgattattgccgccgtgccaattgtagtgcaagccttactattaaatggttttccaacaggtcttggggtagcgattggtgtaggtgcggtgaatatgattgtgggtaatatcattgaaccgaaaatgatggggcgcaccttaggcttatcgacacttgtcgttttcttatccttattattttggggatggctactgggtacagttgggatgttgctgtctgtgccactgacgatggtgcttaaaattgcccttgaagccagtccagaaacggttaaatatgcgattttgttaggcgatgtaaaagacattaaccgcgaaatcatcgacgccaaacaagaagccgcagaacgtatcaaagaacaggctgagtgggaagaaaacgcggagcaaatcgccgaagccattgccaccgccaaagaagaagcaaagaatgaagccatcgctggcgtcattgcagatgcgaaggcagaaattgaagcggaaatccaagcgattgcgaaagccgcggatcaaaaataa

SEQ ID NO: 7995 - protein, 417 aa, Pasteurella multocida subsp. multocida str. Pm70
MLKVESPILKVLVALASIVIILAGVKVASEIAVPFLLSLFIAIICSPIIRFMTSRKVPHWLAITLLLLMILVVFFSVLSLINSTAREFTQSIPQYRLLLSERINALVLLAKKWNIPLDLSTERTMEYMDPSVIMNLVSSTLLSFSGVVTNVFVLFLVVIFMLSEAPFAKHKLALVFSSDVRDVHREEHYINRILQGVISYLGVKTLTSLLTGVCVYILLELTDVQYAILWATLSFLLNYIPNIGSIIAAVPIVVQALLLNGFPTGLGVAIGVGAVNMIVGNIIEPKMMGRTLGLSTLVVFLSLLFWGWLLGTVGMLLSVPLTMVLKIALEASPETVKYAILLGDVKDINREIIDAKQEAAERIKEQAEWEENAEQIAEAIATAKEEAKNEAIAGVIADAKAEIEAEIQAIAKAADQK

SEQ ID NO: 7996 - DNA, 1095 bp, Escherichia coli O157:H7 EDL933
  CDS (1)..(1095): transl_table=11
gtgactcccgctacacttaatacaaaaagtcacaaggaagccccaatggaaacccctcaacccgataaaacgggcatgcacattctgctcaagctggcctcgctggtagtgatcctcgcgggcattcacgcagcggcagatatcattgtgcagctgttactggcgctgttttttgccatcgtcctcaacccgctcgtcacctggtttattcgtcggggagtacaacgccccgttgccattacgattgtagtggtggtgatgctgatcgcactaaccgcgctggtcggcgtactggcggcatcgtttaacgaatttatctctatgctgccgaagtttaataaggagctgacgcgcaaactttttaaattgcaggagatgttgccttttcttaatttgcatatgtcgccggagcgaatgctgcagcggatggactcggaaaaagtggttaccttcaccacagcgctaatgaccgggctttccggggcaatggcgagcgtgcttttgctggtgatgaccgtagtttttatgctgtttgaagtgcgccacgtcccttacaaaatgcgttttgcgctgaataacccacagattcacatcgcgggattacaccgcgcacttaaaggcgtttcgcattatctggcgttaaagacgctactcagtttatggacgggtgtcatcgtctggctggggctggagctgatgggggtacagtttgcgctgatgtgggcagtactggcgtttttgcttaactacgtgcccaatatcggcgcggtaatttccgccgtaccgccaatgattcaggtgctgctgtttaatggtgtttacgaatgtattctggtcggcgcattgtttttagtggtccatatggtcatcggcaatattttagaaccacggatgatgggccatcgcctggggatgtccaccatggtggtatttctttcattgttaatttggggatggctgctcggcccggtagggatgctactttcggtgccattaaccagcgtgtgtaaaatctggatggaaacgacgaaaggcggcagcaaactggcgattttactggggccgggcagaccgaaaagtcggttaccgggttaa

SEQ ID NO: 7997 - protein, 364 aa, Escherichia coli O157:H7 EDL933
MTPATLNTKSHKEAPMETPQPDKTGMHILLKLASLVVILAGIHAAADIIVQLLLALFFAIVLNPLVTWFIRRGVQRPVAITIVVVVMLIALTALVGVLAASFNEFISMLPKFNKELTRKLFKLQEMLPFLNLHMSPERMLQRMDSEKVVTFTTALMTGLSGAMASVLLLVMTVVFMLFEVRHVPYKMRFALNNPQIHIAGLHRALKGVSHYLALKTLLSLWTGVIVWLGLELMGVQFALMWAVLAFLLNYVPNIGAVISAVPPMIQVLLFNGVYECILVGALFLVVHMVIGNILEPRMMGHRLGMSTMVVFLSLLIWGWLLGPVGMLLSVPLTSVCKIWMETTKGGSKLAILLGPGRPKSRLPG

SEQ ID NO: 7998 - DNA, 1035 bp, Salmonella typhimurium LT2
  CDS (1)..(1035): transl_table=11
atggcaaaaccgatcatcacgctcaatggtctaaaaatcgtcattatgctgggaatgctggtagttattctgagcggtatccgcttcgccgcagatatcattgttccctttattttggcgttatttattgcagtcgttctcaatcccgttgtgcaacggatgacccgatgccgaattccgcgcgttatcgccgtatcattgctcattgtgattattgttatgttaatggtactactactggcctatttggggacatcattaaatgaactggctcgtaccctaccgcaatatcgctcctcattggtgataccgttgcaacgtattgaaccgtggttgcagcgagctggcattggcgtgtcggttgatgagctggcgaaatatatcgatccaaacgccgccatgactctggtaacgaacctgctcacccaactgtccaatgccatgtcatccatctttttattgctattgaccgtggtatttatgctgttggaggttccacaactgcctgaaaaactgcagcagatgatgagccgcccggtagaaggtatggcggcaattcaacgcgcgcttgatagcgtttcccattatctggtgttaaaaacagcgatcagtatcgtgacggggctggtcgcatggggaatgctggccgcgctggatgtccgcttcgcctttgtctggggtctactggccttcgcgctgaactatattcctaatattggatcggtgctcgctgccctgccacccattattcaggtgctggtatttaacgggttttatgatgcgctgctggtgctggcaggctatctgctgattaatctggtcttcggcaatatccttgagccacgaatcatgggacgtggtttaggtctttcaaccttagtggtatttttgtcgttaattttctggggctggttattaggtccggtgggcatgttgctctccgttccgttaaccatcattgtcaaaatcgccctcgaacagaccaccggcgggcagagtatcgccgttctgcttagcgatttaaacaaaagataa

SEQ ID NO: 7999 - protein, 344 aa, Salmonella typhimurium LT2
MAKPIITLNGLKIVIMLGMLVVILSGIRFAADIIVPFILALFIAVVLNPVVQRMTRCRIPRVIAVSLLIVIIVMLMVLLLAYLGTSLNELARTLPQYRSSLVIPLQRIEPWLQRAGIGVSVDELAKYIDPNAAMTLVTNLLTQLSNAMSSIFLLLLTVVFMLLEVPQLPEKLQQMMSRPVEGMAAIQRALDSVSHYLVLKTAISIVTGLVAWGMLAALDVRFAFVWGLLAFALNYIPNIGSVLAALPPIIQVLVFNGFYDALLVLAGYLLINLVFGNILEPRIMGRGLGLSTLVVFLSLIFWGWLLGPVGMLLSVPLTIIVKIALEQTTGGQSIAVLLSDLNKR

SEQ ID NO: 8000 - DNA, 1086 bp, Yersinia pestis KIM
  CDS (1)..(1086): transl_table=11
gtggcggttcgaatacaaggattgataatgacaacacctgtggtgagtaaccaagggctacgattagtggcgatgctggcaatgctggtggtcatcatggccggtattaaagcggcatcaccaattgtcgtccccttcctgttggctatttttctcgcgatcgtgctgaatcccttagtcaaattgcttgagaggataaaaatcccacggacactggcggttattttactcgtaaccattattattttactgatggtgctgctgtttggccgcttaggctcttcactcaatgagttcgcacgctcattaccgcaatatcgcggcatgatgctggagaaaatgcgcgatctgcaagaatttgccctgcattttaatattgaattctcagtagatgacatcatgaagtatgtcgatccgagcatggcgatgaactttgtcacccgtctactcagccacctgtctggtgccatgaccagcacgttcttattactgatgaccgtggtcttcatgttgtttgaagtagaacggatgccgtataaagtgcaattgatgtttgataatcccgaaaaagggaatgctatcctcaaacgagcactaaatggtgtcacccattatctggtgatcaaaacgattattagcattgccacggggattgtcatttggctgttcttggcagctatgggcgttagattcgccttcctttgggggttattggcgtttgtactgaattatattcccaacattgggtcggtgctggctgctatcccacccatcattcaggcactgttatttaacggttttgctgatgcttttgcggtaaccggcggttatattttgattaacttgatagggggcaatattatcgacccgcgtatgatgggccgtgggctgggtttatcgacgttggtcgtcttcttatcattaattttctggggctggctattgggcccagtcggtatgttgctctcggtgcctttaactattattgctaaaattgtccttgagctaacccctgcgggttatagatttgccgttttattgagtgatggtaaacccgctaaggttgaagaagagcaagcgctctga

SEQ ID NO: 8001 - protein, 361 aa, Yersinia pestis KIM
MAVRIQGLIMTTPVVSNQGLRLVAMLAMLVVIMAGIKAASPIVVPFLLAIFLAIVLNPLVKLLERIKIPRTLAVILLVTIIILLMVLLFGRLGSSLNEFARSLPQYRGMMLEKMRDLQEFALHFNIEFSVDDIMKYVDPSMAMNFVTRLLSHLSGAMTSTFLLLMTVVFMLFEVERMPYKVQLMFDNPEKGNAILKRALNGVTHYLVIKTIISIATGIVIWLFLAAMGVRFAFLWGLLAFVLNYIPNIGSVLAAIPPIIQALLFNGFADAFAVTGGYILINLIGGNIIDPRMMGRGLGLSTLVVFLSLIFWGWLLGPVGMLLSVPLTIIAKIVLELTPAGYRFAVLLSDGKPAKVEEEQAL

SEQ ID NO: 8002 - DNA, 1107 bp, Shewanella oneidensis MR-1
  CDS (1)..(1107): transl_table=11
atgacacgatccaatacgccgactgccgcctacaaaggttttgcagtcatggcatttgtggtgattattttggcagggataaaggccgcaagcccgattgttgttccctttgtcttatcctgttttattgcggtgatctgtaatccggccattggcttgatgactaaatatcgtgtgcctaaatggctcgcggtgattctattgatgtgttttatcgtgttgatgggattgtggctcgcctccttggtgggcagctcaatcaatgagttttctaagcagttgcctcaataccgaaatcagctggtggagcagttttcttgggtgttgcataaattacaggcgctgaatattcaaatctctaaggagcaagtgctagcctattttgaccccggcatggcgctgtcgatgaccaccaatatgctgtccggtgtaggcaatgtgatggcgaatttattcctgatcattttgaccatcgtctttatgttatttgaggcatcatctttaccgaaaaagttgcacttggcattggatgatcccgatatgcgtttgcaacaaattgaccgtttcctgcaatcggtgaatcaatatatggtgatcaaaaccctagtcagtttagcgacgggtttaattgttggtgttggactggcctttatcggcgtggattatgcgttactttgggcggtaattgcttttttattcaactacattcctaatatcgggtcgattattgccgccatccccgccgtattgttagcctttattcagttaggccctgcggccgctggtgggacgacgatgctatacataggcgctaacatggtaatgggtaatgtggttgagcctaaatttatgggccgaggattaggcctttctaccttagtggtatttttatcattaattttttgggggtggttactgggttccgtcggtatgttgctgtcagttcccttaactatggtggtcaaaattgccctcgaatcgagtaaaagtggtagttggttagcgatattattatccgatgatgtggatgataaactggtcgttcaatcttcaagcgcacatgactcgacgaatagggtcgatacacattcaactgataataagtag

SEQ ID NO: 8003 - protein, 368 aa, Shewanella oneidensis MR-1
MTRSNTPTAAYKGFAVMAFVVIILAGIKAASPIVVPFVLSCFIAVICNPAIGLMTKYRVPKWLAVILLMCFIVLMGLWLASLVGSSINEFSKQLPQYRNQLVEQFSWVLHKLQALNIQISKEQVLAYFDPGMALSMTTNMLSGVGNVMANLFLIILTIVFMLFEASSLPKKLHLALDDPDMRLQQIDRFLQSVNQYMVIKTLVSLATGLIVGVGLAFIGVDYALLWAVIAFLFNYIPNIGSIIAAIPAVLLAFIQLGPAAAGGTTMLYIGANMVMGNVVEPKFMGRGLGLSTLVVFLSLIFWGWLLGSVGMLLSVPLTMVVKIALESSKSGSWLAILLSDDVDDKLVVQSSSAHDSTNRVDTHSTDNK

SEQ ID NO: 8004 - DNA, 1059 bp, Yersinia pseudotuberculosis IP 32953
  CDS (1)..(1059): transl_table=11
atgacaacacctgtggtgagtaaccaagggctacgattagtggcgatgctggcaatgctggtggtcatcatggccggtattaaagcggcatcaccaattgtcgtccccttcctgttggctatttttctcgcgatcgtgctgaatcccttagtcaaattgcttgagaggataaaaatcccacggacactggcggttattttactcgtaaccattattattttactgatggtgctgctgtttggccgcttaggctcttcactcaatgagttcgcacgctcattaccgcaatatcgcggcatgatgctggagaaaatgcgcgatctgcaagaatttgccctgcattttaatattgaattctcagtagatgacatcatgaagtatgtcgatccgagcatggcgatgaactttgtcacccgtctactcagccacctgtctggtgccatgaccagcacgttcttattactgatgaccgtggtcttcatgttgtttgaagtagaacggatgccgtataaagtgcaattgatgtttgataatcccgaaaaagggaatgctatcctcaaacgagcactaaatggtgtcacccattatctggtgatcaaaacgattattagcattgccacggggattgtcatttggctgttcttggcagctatgggcgttagattcgccttcctttgggggttattggcgtttgtactgaattatattcccaacattgggtcggtgctggctgctatcccacccatcattcaggcactgttatttaacggttttgctgatgcttttgcggtaaccggcggttatattttgattaacttgatagggggcaatattatcgacccgcgtatgatgggccgtgggctgggtttatcgacgttggtcgtcttcttatcattaattttctggggctggctattgggcccagtcggtatgttgctctcggtgcctttaactattattgctaaaattgtccttgagctaacccctgcgggttatagatttgccgttttattgagtgatggtaaacccgctaaggttgaagaagagcaagcgctctga

SEQ ID NO: 8005 - protein, 352 aa, Yersinia pseudotuberculosis IP 32953
MTTPVVSNQGLRLVAMLAMLVVIMAGIKAASPIVVPFLLAIFLAIVLNPLVKLLERIKIPRTLAVILLVTIIILLMVLLFGRLGSSLNEFARSLPQYRGMMLEKMRDLQEFALHFNIEFSVDDIMKYVDPSMAMNFVTRLLSHLSGAMTSTFLLLMTVVFMLFEVERMPYKVQLMFDNPEKGNAILKRALNGVTHYLVIKTIISIATGIVIWLFLAAMGVRFAFLWGLLAFVLNYIPNIGSVLAAIPPIIQALLFNGFADAFAVTGGYILINLIGGNIIDPRMMGRGLGLSTLVVFLSLIFWGWLLGPVGMLLSVPLTIIAKIVLELTPAGYRFAVLLSDGKPAKVEEEQAL

SEQ ID NO: 8006 - DNA, 1047 bp, Mannheimia succiniciproducens MBEL55E
  CDS (1)..(1047): transl_table=11
atgaataaatctgtttcggtaaatcaatttttaatcggttttgccgcattggtgattattttggcgggaataaaaatggcaggtgaaattgtcgtgccatttttaatgtctttattcatcgccattatttgttcgccgattattaaatttatgaccaatcggaaaattcctcattggttggcgatcagtattttgtttttatttattgtgctagtttttttctttttgctggggctggtgaatagttcgattcgcgaattttcacaatctattcctcagtatcgggtattaatgtcggaacggttaaatgaaatcacggcattaatccaaaaatggaatttgcccttgaatttagagaaagaaaccattctggaacattttgacccaagttcgataatgaattttgtcagccgtctgctgttgagcttttctaatgtgttgtctaatgcctttgtgttgattttagtcgttattttcatgttgttagaagcgcctacggcaaaacgtaaagttgctttggcattgagcggcaatgaaaaagatgcaagtaaagaagaaaaacatttggaacgtattttgcagggcgtaatcagttatttaggcgtaaaaactgcggtaagtttattaacggggctttgtgcatgggtactgctggaaacttgtggcgtacaatatgcagtgttgtgggcaaccttaacctttctgtttaattatattccgaatatcggctcgattattgccgccattccaatagttttacaggcattattgttaaacggattttccaccggatttgccgtgatgacggggattatcgcaattaatatgcttatcggtaattttttagaacccaaattaatggggagaacactgggattatcgacattagtggtattcctttccttattattctggggttggttattaggcaccgtcggcatgttgctttccgtacctttgactatggcattaaaaataatgttggaagcaagccctaatacgacaaaatatgccgctttacttggtgatgttgaagaatctaactga

SEQ ID NO: 8007 - protein, 348 aa, Mannheimia succiniciproducens MBEL55E
MNKSVSVNQFLIGFAALVIILAGIKMAGEIVVPFLMSLFIAIICSPIIKFMTNRKIPHWLAISILFLFIVLVFFFLLGLVNSSIREFSQSIPQYRVLMSERLNEITALIQKWNLPLNLEKETILEHFDPSSIMNFVSRLLLSFSNVLSNAFVLILVVIFMLLEAPTAKRKVALALSGNEKDASKEEKHLERILQGVISYLGVKTAVSLLTGLCAWVLLETCGVQYAVLWATLTFLFNYIPNIGSIIAAIPIVLQALLLNGFSTGFAVMTGIIAINMLIGNFLEPKLMGRTLGLSTLVVFLSLLFWGWLLGTVGMLLSVPLTMALKIMLEASPNTTKYAALLGDVEESN

SEQ ID NO: 8008 - DNA, 1047 bp, Haemophilus influenzae 86-028NP
  CDS (1)..(1047): transl_table=11
gtgcaaaataatttaaatttacaccgcactttgcttggcattgctgcggtgattattatcttagctggcgtaaaattggcggcagaaatcgtggtgccattcttgctatcactctttatcgcgataatttgttcgccgataattaaggcgatgacccaacgccgcgtcccgcattggttagccattactttgctttttgtcttgatttctttggtatttttcttcttagtcgggttgattaacagcacggcaagagaatttacccaatctattccacaatataaagttttgctttcacaacgtgtgagtgatttaactggattgttgcaacgtttcaatctgcctttcacgctttcgcgtgaaaccatccaagaaaattttgacccaagcatcattatgaattttgtaagccgagtattgctgaatttctctggtgtagtgagtaatgtgtttgttttagtgttggttgtgatttttatgcttgccgaagcaccaacgatgaaacataaatttgcaatggtaattagttcaacccctcatgatgcagccaaagaagaacgccatattgatcgcgttttgcaaggcgtaattggttatcttggcatcaaaagcatcacgagtttactgactggcgtcggagtgtttattttgttggaagcctgtggggttcaatatgccattttgtgggcaaccttgagtttcttgctgaattatattcccaatataggttctatcatcgcggctattccgattattgtgcaagccttattactgaatggttttggcattggctttggcgtagcaatcggtgttattgcgattaatatggttgtcggtaacattattgaacctaaaatgatggggcaacgattagggctttcaaccttagtggtgttcctttcattattgttttggggatggctgcttggaacagtgggaatgctactgtctgttcctttgacgatggcattaaaaattgccttggagtccagtcccaatacagcgaaatatgcctgtctattaggagatgtcgaagatttcaaatag

SEQ ID NO: 8009 - protein, 348 aa, Haemophilus influenzae 86-028NP
MQNNLNLHRTLLGIAAVIIILAGVKLAAEIVVPFLLSLFIAIICSPIIKAMTQRRVPHWLAITLLFVLISLVFFFLVGLINSTAREFTQSIPQYKVLLSQRVSDLTGLLQRFNLPFTLSRETIQENFDPSIIMNFVSRVLLNFSGVVSNVFVLVLVVIFMLAEAPTMKHKFAMVISSTPHDAAKEERHIDRVLQGVIGYLGIKSITSLLTGVGVFILLEACGVQYAILWATLSFLLNYIPNIGSIIAAIPIIVQALLLNGFGIGFGVAIGVIAINMVVGNIIEPKMMGQRLGLSTLVVFLSLLFWGWLLGTVGMLLSVPLTMALKIALESSPNTAKYACLLGDVEDFK

SEQ ID NO: 8010 - DNA, 1065 bp, Colwellia psychrerythraea 34H
  CDS (1)..(1065): transl_table=11
atggtttcaagttcaaataatagctctattgcgaaagcatttgtaacagtcgccgctatttttatcatttttgcgggtattaaaaccgcggctaatattttagtgccgtttttactttcagtatttatcgccatcatctgtaacccattaatcaataaagccagtgagtataaaataccaaaggctgtttctgtcatttttgttatagttgtctttgttactatggctgtgtttttaacgggattagtgggcagctctttaaatgagctttctcagcagatacctcagtaccgaatacaactcaaagaacaatttacttggttaacaagtttccttaatagtcatgacatccaactttcttcatcgatagtgactgaatattttgaccctgctgcagcgatggggttagcggctgatatgttatccagttttggctctgtgatgacaaacttgtttttgattattttaactgttgttttcatgttgtttgaatcatcgacgattccacataaattacatttagcattagatgatcctcaaatgcgtttaaatcaaattgaacggtttttatcttcggtgaatcagtatatagccattaaaacactggttagtattgccacgggttgtattgtgtcactgatgttatggatctttggtttagacttctttttactctggggtgtattagcgtttctgcttaattatataccaaatatcggttctattattgccgcagtgccaccaatgacgctcgctatcttacaattaagcataggggaggccggcgctatcggtttaggttttgttttaataaatatggtaatgggtaatattattgagcctaggtatctaggtaaaggtctagggctatcgactttagttgttttcttatctctaattttttggggatggttgcttggtactgtaggtatgctattaagtgtgccactgaccatgatattaaagatagggttagaaagctcaccagaaggtcgttggttggctgtcatgctaagtgatgaagttgaactggtcgataaaaccgagcaagctttacttgattga

SEQ ID NO: 8011 - protein, 354 aa, Colwellia psychrerythraea 34H
MVSSSNNSSIAKAFVTVAAIFIIFAGIKTAANILVPFLLSVFIAIICNPLINKASEYKIPKAVSVIFVIVVFVTMAVFLTGLVGSSLNELSQQIPQYRIQLKEQFTWLTSFLNSHDIQLSSSIVTEYFDPAAAMGLAADMLSSFGSVMTNLFLIILTVVFMLFESSTIPHKLHLALDDPQMRLNQIERFLSSVNQYIAIKTLVSIATGCIVSLMLWIFGLDFFLLWGVLAFLLNYIPNIGSIIAAVPPMTLAILQLSIGEAGAIGLGFVLINMVMGNIIEPRYLGKGLGLSTLVVFLSLIFWGWLLGTVGMLLSVPLTMILKIGLESSPEGRWLAVMLSDEVELVDKTEQALLD

SEQ ID NO: 8012 - DNA, 1086 bp, Saccharophagus degradans 2-40
  CDS (1)..(1086): transl_table=11
atggaagttcaatcaccaatcgctcggtttttactcgtggcggctacgtttgttattgttgttgccggtatgcgcgctgcagaatctatacttgtcccgtttcttttatctttatttattgccgtaatagcaaccccgccgcttatttggatgcagcgcaaaggcgtgccgtcgagtattgctatgctgttggttatttgcagtattgtgattggcggcattcttattggggtaattgttggtgcctcgattgctgatttccgtcaagatttacctggttatcaacaacgcttaaccgtgctcacggcagacttttttgtacagctacaagctttgggtatagatgtagagcttggccatttgcgagaaagctttaacccatcggcggcgttatcgctagctggcaacaccttggcgcagtttggcaatatgatgaccaacgcgtttttaattttgttgcttgtggtttttattctcgcagaagaagtggggtttagagacaaaataaaatactcgtttaaaacgccagaaaaaacacttgccgctatagagaaattcacctcgggtgttaaccaatacgtagcaattaaaaccaccatgagtgcgctaaccggccttattattatgtgctggttgtggtttatgaaattagaatatttcgtgttgtggggcttgctggcatttttacttaattacgtgcctacgtttggctccattttggccgctgtacccgctgtgctacttgcacttgtacagcttggggtaggtgatgcgttgttagtgggcgcagcttaccttgctgtgaattttgttgtaggtaatgtaatagagccgcgagtgatgggtaaggggttagatttatctgcgctggtagtatttttatcgttagtgttttggggatgggtgcttgggccaattggcatgttgctttcaataccgttaaccatgaccgttaaaattgccttagaaagctttgaagatactcgttggttgggtgtgatgttaggttcgggcagtggtttatccgatagggtggtagacgatggagaatctatattgccaattgggttttcaaaggataaataa

SEQ ID NO: 8013 - protein, 361 aa, Saccharophagus degradans 2-40
MEVQSPIARFLLVAATFVIVVAGMRAAESILVPFLLSLFIAVIATPPLIWMQRKGVPSSIAMLLVICSIVIGGILIGVIVGASIADFRQDLPGYQQRLTVLTADFFVQLQALGIDVELGHLRESFNPSAALSLAGNTLAQFGNMMTNAFLILLLVVFILAEEVGFRDKIKYSFKTPEKTLAAIEKFTSGVNQYVAIKTTMSALTGLIIMCWLWFMKLEYFVLWGLLAFLLNYVPTFGSILAAVPAVLLALVQLGVGDALLVGAAYLAVNFVVGNVIEPRVMGKGLDLSALVVFLSLVFWGWVLGPIGMLLSIPLTMTVKIALESFEDTRWLGVMLGSGSGLSDRVVDDGESILPIGFSKDK

SEQ ID NO: 8014 - DNA, 1107 bp, Shewanella sp. MR-4
  CDS (1)..(1107): transl_table=11
atgacacgttccaatacgccgtctgccgcctataaaggttttgccgtcatggcctttgtggtgattattttggcagggataaaggccgccagcccgattgttgttccctttgtgttatccagttttattgcggtgatctgtaatccggcgataggcttgatgaccaaatatcgcgtacctaaatggctcgccgtgatcctgctgatgggttttatcgtgttgatgggcttgtggctcgcctctctggtaggcagctccattaatgagttttctaagcagttgccgcagtatcgcgatcagctggtggagcagttttcttgggtgctgcataagttgcaggcgctgaatatccaaatctccaaggaacaagtgttggcctatttcgatcccggcatggcgttgtctatgaccaccaatatgctctcgggtgttggcaatgtgatggcgaatttgttcctgatcattctgaccatcgtctttatgctgtttgaggcgcaatctttgccgaagaaactgcacttggcactggacgatccggacatgcgtttgcagcagattgaccgttttctgcaatcggtgaatcaatatatggtgattaagaccttagtcagtttagcgacgggcttgattgtcggcgtggggcttgcggtgattggggtggattacgcgctgctttgggcggttatcgcctttttattcaactatatcccgaatatcggctcgattatcgcggccattcccgccgtgttgctggcctttatccaattaggccctgcggcggctggcggtacggcgatgttatacgtcggcgcaaatatggtgatgggcaatgtggttgagcctaagtttatgggccgcggtctcgggctttccaccctagtggtgttcttatcgttaattttttgggggtggttactgggctcggtcggcatgttgctgtcggttcccttaaccatggtcgtcaagatcgccctcgaatccagtaagagtggtggctggttagccattttattatccgacgatgtggatgataaactagtaagccaatcgacaagcaccgctccgatttctgaacctgtcgatacccattcaacagataataagtag

SEQ ID NO: 8015 - protein, 368 aa, Shewanella sp. MR-4
MTRSNTPSAAYKGFAVMAFVVIILAGIKAASPIVVPFVLSSFIAVICNPAIGLMTKYRVPKWLAVILLMGFIVLMGLWLASLVGSSINEFSKQLPQYRDQLVEQFSWVLHKLQALNIQISKEQVLAYFDPGMALSMTTNMLSGVGNVMANLFLIILTIVFMLFEAQSLPKKLHLALDDPDMRLQQIDRFLQSVNQYMVIKTLVSLATGLIVGVGLAVIGVDYALLWAVIAFLFNYIPNIGSIIAAIPAVLLAFIQLGPAAAGGTAMLYVGANMVMGNVVEPKFMGRGLGLSTLVVFLSLIFWGWLLGSVGMLLSVPLTMVVKIALESSKSGGWLAILLSDDVDDKLVSQSTSTAPISEPVDTHSTDNK

SEQ ID NO: 8016 - DNA, 1083 bp, Alkalilimnicola ehrlichei MLHE-1
  CDS (1)..(1083): transl_table=11
atgccacccgggatgaacactgagaacgaggcgctcccgccgttggcggcgccggatcagacgctgtccacctggcactggctgctggggggcgcagcgctggtggttttgctggccgggctgaaggccgccgccggggtggtgaccccgttgttgctggcggccttcctggccatcatctgcgcgccgccgctgacctggatgcggcggcgcggggtcccggggtcggtggccgtgttggcgctgtttgttgccgtcgggctggccttcttcctgctctttctggcccttcagggggcggtggagagcatggcgcaccaggcgccgcactaccaggcgcgcctgttcggcctgttcgatgagaccatggcctggttggcggggcgcggggtcccggccgaattgttgccggatcggccgccgctgccggcgctggccgacctgaccgggctggcgcgggcggtggcggggggcgtgggccagttcaccgcgaccaccttcctggtgctgttggccttcatgttcctcctgcttgaggagacccacctgcccgggaagctgcgggcggccttcccccgctcccgccgaggcggggtgcgggcgcgccggttcctgcgctcggtctatcgctatctcttcatcaagagtgcgaccagcctggccaccggcctactggtcggggtggggttggcgctgatcggggtggatttcccggtgctctgggggatccttgccggcctgctcaacttcatcccgacggtcggatcgattctcgccgccatcccggcagtcctgatcgcgttcctgggtctgggggtgatggaggggctgctggccctggccctctacgtggccgtcaatgtggtcatcggtagcgtgctggagccgcgcttcatgggccataccctgggcttgtcgccgctggtggtgctggtctcactgatggcctggggctgggtgttggggccggtggggatgctgctgtccattcccctgaccatgatcgccaagctggcgctggaggcgcagcccgggacccgctggctggcgatcatgatgagcgaccgggcccgcggccactga

SEQ ID NO: 8017 - protein, 360 aa, Alkalilimnicola ehrlichei MLHE-1
MPPGMNTENEALPPLAAPDQTLSTWHWLLGGAALVVLLAGLKAAAGVVTPLLLAAFLAIICAPPLTWMRRRGVPGSVAVLALFVAVGLAFFLLFLALQGAVESMAHQAPHYQARLFGLFDETMAWLAGRGVPAELLPDRPPLPALADLTGLARAVAGGVGQFTATTFLVLLAFMFLLLEETHLPGKLRAAFPRSRRGGVRARRFLRSVYRYLFIKSATSLATGLLVGVGLALIGVDFPVLWGILAGLLNFIPTVGSILAAIPAVLIAFLGLGVMEGLLALALYVAVNVVIGSVLEPRFMGHTLGLSPLVVLVSLMAWGWVLGPVGMLLSIPLTMIAKLALEAQPGTRWLAIMMSDRARGH

SEQ ID NO: 8018 - DNA, 1053 bp, Actinobacillus pleuropneumoniae serovar 1 str. 4074
  CDS (1)..(1053): transl_table=11
atggaacattcgtcatcattaaccaaagtattagtcgctacggcttcaattatcgtgattctcgccggtataaaaatggcgggggagattattattcccttcttgttgtcattatttattgcgattatttgctcgccgattattaagtttatgaccaagcgtcatattccgttagggctggcaatcggtttattactcggtttaatcgttttaattttcttctttctggccggaatgtttaatggggcgattcaggaatttaccgcttcgattccgcaatataaggtgctattaacggagcgtttggacacggtttttgccttgattaaagcttataatttaccgattagtattacccaagaagatgtgctgaataaattcgacccaagcgtagttatgaattttgtcagccgtttgctgcttagcttttccggtgtggtatcgaatattttcgtgttatttttagtggtgatttttatgttgttcgaatcaccgatggctaaatataaactggctttggcattaagtccggatgatgatttgtcgaatgaggaatattatcttaaccaagtattagacggagttatcggctatttaggggtaaaaacggttgtgagtgcattaaccggtatctcgatttggattttattgatcgtgcttgatgtgcaatatgcggtgctttgggcgacacttgcttttttactgaattatattccgaatatcggttcgtttttagccggtattccgattgtattacaagcgcttttattaaacggattttccgtcggtatcggcgtattgattggggtagttggcatcaatatgttattcggtaatgtcttggagccgaaaatgatgggcaaacgtctcgggctttcaacccttgtcgtgttcttgtctttattattctggggttggttattaggtacggtcggtatgttgttgtccgtaccgcttacgatggcgttaaaaatcgctttagagtcaagccgttcgacccgtcgttatgcggtattactgggcgatatagaagaagtaccgactcgtcgttaa

SEQ ID NO: 8019 - protein, 350 aa, Actinobacillus pleuropneumoniae serovar 1 str. 4074
MEHSSSLTKVLVATASIIVILAGIKMAGEIIIPFLLSLFIAIICSPIIKFMTKRHIPLGLAIGLLLGLIVLIFFFLAGMFNGAIQEFTASIPQYKVLLTERLDTVFALIKAYNLPISITQEDVLNKFDPSVVMNFVSRLLLSFSGVVSNIFVLFLVVIFMLFESPMAKYKLALALSPDDDLSNEEYYLNQVLDGVIGYLGVKTVVSALTGISIWILLIVLDVQYAVLWATLAFLLNYIPNIGSFLAGIPIVLQALLLNGFSVGIGVLIGVVGINMLFGNVLEPKMMGKRLGLSTLVVFLSLLFWGWLLGTVGMLLSVPLTMALKIALESSRSTRRYAVLLGDIEEVPTRR

SEQ ID NO: 8020 - DNA, 1089 bp, Pseudoalteromonas tunicata D2
  CDS (1)..(1089): transl_table=11
atggttcaacccaatttttctgggatcagcaaaagaatgcttattttggctgcaaccgtagtggttttggctggagtaaaagcggcaagtgtggtgattgtgccatttttgctttcgctttttttagctattatttgtaacccactgattaatatttgcgcccgctatcgcattccaaaaggtgtggcggttattttagttatcctattgattgtattgctcggtatgtcgcttgctggcttggttgggcaatcactgaatgatttttcaagaaacatcccagaatacaaaattaagttacaacaagaatttgtgtgggcggttgaagttgcagcaaaatacaatattttgctcaataaagaacaaattttagagttatttgatccgggtaaagtgattgatatggcgtcaaacatgcttgcgggcttgggtggcgtgatggctaatttgtttttaattattttgactgtggtgtttatgttgtttgaagcgccagttatcggtaaaaaagtacatttggcattagatgatccgcaaatgaaaatgcgccaaatcgaccgttttttagaatcagtgaatgcctatttagcaataaaaaccttagtgagtttagccactggtgtgctggtggggctgttgctctggattttaagcgttgattactttgtactttggggtgtacttgcttttatgtttaattacattcccaatatcggttctattattgcagctgtaccggccgttttgttagcactgatcctgcaaggccctgcggtagccggcatggtgggctttggttatatcgccattaatactgtgatgggcaatgtagttgagcccaaatacatgggccgaggtttagggctttcgacgctggtggtatttttatcactcattttttggggctggttgcttggcactgtcggtatgctgttatctgttccattaactatgatagttaaaattggtttggaatcgagtgatgaaggtcgctggcttgctgtattacttggttctggtgaggaagatacgccagcaattgaggtattgtcgaaacccgatgaaagagtaaacgtcgaacaacaatag

SEQ ID NO: 8021 - protein, 362 aa, Pseudoalteromonas tunicata D2
MVQPNFSGISKRMLILAATVVVLAGVKAASVVIVPFLLSLFLAIICNPLINICARYRIPKGVAVILVILLIVLLGMSLAGLVGQSLNDFSRNIPEYKIKLQQEFVWAVEVAAKYNILLNKEQILELFDPGKVIDMASNMLAGLGGVMANLFLIILTVVFMLFEAPVIGKKVHLALDDPQMKMRQIDRFLESVNAYLAIKTLVSLATGVLVGLLLWILSVDYFVLWGVLAFMFNYIPNIGSIIAAVPAVLLALILQGPAVAGMVGFGYIAINTVMGNVVEPKYMGRGLGLSTLVVFLSLIFWGWLLGTVGMLLSVPLTMIVKIGLESSDEGRWLAVLLGSGEEDTPAIEVLSKPDERVNVEQQ

SEQ ID NO: 8022 - DNA, 1083 bp, marine gamma proteobacterium HTCC2207
  CDS (1)..(1083): transl_table=11
atgattgaaaagacttcacctatagcacggtttttggttgttgcagccgcttttgtggtggtcgtgactggtctaaaaatggctggcgagctgttggtgccttttctgttggcggtgtttatcgccatgattgtctcgccactgcttagctggctgaaaaatcgtagcattcccagcgcgatagccatcctaatgatcgttgttttgattatgttagtgggtctcatgttgaccgctgtaattggttcatcggtagaaaatttccgtcaagacattcccctgtattcggaaaaattgtccgctatgagtgttggggcgcagtcttggttgagtctgcggggcgtagatatagacccgcagcagtggcaaaacagctttgatcccagtgtcgtgatgtcctttgccggcagcacattggcctcctttggcagtgttatgaccaatgccgtgatgatcctgttaacagtgatatttattctcactgaaaatgtcggtttcggtgaaaaactgcggatggcgcgcggcaaagatgtttcggaagagtggctcaatcgcttctcagaaagtgttcatagctatctggcaattaaaaccggtatcagtttagtcaccggtctgctgatctttatctggctatctattctgggcgttgactacccagtgctctgggctctactggcctttttactcaactttgtgcccaccgtgggctcatttatcgcggcagtgccggcggtactgttggccacggttcagctcggggtgttctccgcgggcttaaccctcgccggatttgttgtggtcaacctagtgatgggcaatgccgttgaaccacggtggatgggcaaaggcctaaacctttcgccgctggtggtttttgtctccttggtgctatggggttgggtactgggtccagtgggcatgttgctgtcaattccgctgactattatgatcaagattgccctagaaaatcaggaagagacacgatggattggggtattgttgggttcgggaaccctgtcggaaatagatgagcctagtggcgatatgagtctgttgcccgatgatcaaacgggtagttaa

SEQ ID NO: 8023 - protein, 360 aa, marine gamma proteobacterium HTCC2207
MIEKTSPIARFLVVAAAFVVVVTGLKMAGELLVPFLLAVFIAMIVSPLLSWLKNRSIPSAIAILMIVVLIMLVGLMLTAVIGSSVENFRQDIPLYSEKLSAMSVGAQSWLSLRGVDIDPQQWQNSFDPSVVMSFAGSTLASFGSVMTNAVMILLTVIFILTENVGFGEKLRMARGKDVSEEWLNRFSESVHSYLAIKTGISLVTGLLIFIWLSILGVDYPVLWALLAFLLNFVPTVGSFIAAVPAVLLATVQLGVFSAGLTLAGFVVVNLVMGNAVEPRWMGKGLNLSPLVVFVSLVLWGWVLGPVGMLLSIPLTIMIKIALENQEETRWIGVLLGSGTLSEIDEPSGDMSLLPDDQTGS

SEQ ID NO: 8024 - DNA, 1044 bp, Alteromonadales bacterium TW-7
  CDS (1)..(1044): transl_table=11
atgaataaagtggcaggtttaacgggtgtaaataaaagcttaattgtttttgctgctttagtagtggtattggcagggatcaaatcagcaagtgtcattgttattcctttcatattagcggcatttattgccattatttgtaatccactaattaaattttttgcacgttataaaattcctaaaggcattgcagtgatgcttgtggtgctaattattgttgggcttggagtcagcttaggtggcttagttggccagtccattaatgatttttcacagcagcttcctgaatataaagcccaactcaaagaagagtttatttggcttgtagacctcgcctcccagtacaatattttaattaataaagaacaactcatttcgatgtttgacccaggcaaaatggttgatgtagcaactaacatgctgacagggcttggtggcgtaatggcaaacatgtttttaataatcttaacggttatttttatgctgtttgaaggcccactgctaagcaataaaatacatatggctcttgaagatcctgatagtaaaatgaagcaaattgaccgatttttagaatcaattaattcttacttggctataaaaacactcgttagtttagctaccggtattattgtgtctgtttacttatgggttctaaatgtcgactactttatattatggggtgttttagcatttatgtttaattacattccgaatattgggtcaataattgcggctgtgcctgccgtgttacttgccttaataactcaaggccctctaattgcaggtatggtagcggcgggttacttaacaataaacacggtaatgggaaacattgtagagcctaaatttttaggtaaagggcttggcctatcaacccttgttgtatttttatctttaatattttgggggtggctacttggtacagtgggtatgcttttatctgttccattaacaatgattgttaaaataggccttgaaacaagcatagaaggtaaatgggttgcaacattattaggcagtggtgaagatagcgcgatacgttaa

SEQ ID NO: 8025 - protein, 347 aa, Alteromonadales bacterium TW-7
MNKVAGLTGVNKSLIVFAALVVVLAGIKSASVIVIPFILAAFIAIICNPLIKFFARYKIPKGIAVMLVVLIIVGLGVSLGGLVGQSINDFSQQLPEYKAQLKEEFIWLVDLASQYNILINKEQLISMFDPGKMVDVATNMLTGLGGVMANMFLIILTVIFMLFEGPLLSNKIHMALEDPDSKMKQIDRFLESINSYLAIKTLVSLATGIIVSVYLWVLNVDYFILWGVLAFMFNYIPNIGSIIAAVPAVLLALITQGPLIAGMVAAGYLTINTVMGNIVEPKFLGKGLGLSTLVVFLSLIFWGWLLGTVGMLLSVPLTMIVKIGLETSIEGKWVATLLGSGEDSAIR

SEQ ID NO: 8026 - DNA, 21 bp, Artificial sequence
  primer
atggcaaagccgatcatcacg

SEQ ID NO: 8027 - DNA, 27 bp, Artificial sequence
  primer
ttactctttattgagatcgcttaacag

SEQ ID NO: 8028 - protein, 328 aa, Artificial sequence
  consensus sequence
  Variant (2)..(3): Xaa in position 2 to 3 is any amino acid
  Variant (5)..(7): Xaa in position 5 to 7 is any amino acid
  Variant (10)..(12): Xaa in position 10 to 12 is any amino acid
  Variant (14)..(15): Xaa in position 14 to 15 is any amino acid
  Variant (17)..(17): Xaa in position 17 is any amino acid
  Variant (21)..(21): Xaa in position 21 is any amino acid
  Variant (23)..(24): Xaa in position 23 to 24 is any amino acid
  Variant (26)..(26): Xaa in position 26 is any amino acid
  Variant (28)..(31): Xaa in position 28 to 31 is any amino acid
  Variant (33)..(42): Xaa in position 33 to 42 is any amino acid
  Variant (44)..(46): Xaa in position 44 to 46 is any amino acid
  Variant (48)..(54): Xaa in position 48 to 54 is any amino acid
  Variant (56)..(61): Xaa in position 56 to 61 is any amino acid
  Variant (63)..(77): Xaa in position 63 to 77 is any amino acid
  Variant (79)..(79): Xaa in position 79 is any amino acid
  Variant (81)..(111): Xaa in position 81 to 111 is any amino acid
  Variant (112)..(113): Xaa in position 112 to 113 is any or no amino acid
  Variant (116)..(125): Xaa in position 116 to 125 is any amino acid
  Variant (126)..(126): Xaa in position 126 is any or no amino acid
  Variant (128)..(137): Xaa in position 128 to 137 is any amino acid
  Variant (139)..(141): Xaa in position 139 to 141 is any amino acid
  Variant (143)..(143): Xaa in position 143 is any amino acid
  Variant (145)..(145): Xaa in position 145 is any amino acid
  Variant (149)..(149): Xaa in position 149 is any amino acid
  Variant (151)..(156): Xaa in position 151 to 156 is any amino acid
  Variant (158)..(172): Xaa in position 158 to 172 is any amino acid
  Variant (173)..(177): Xaa in position 173 to 177 is any or no amino acid
  Variant (179)..(179): Xaa in position 179 is any amino acid
  Variant (181)..(182): Xaa in position 181 to 182 is any amino acid
  Variant (184)..(185): Xaa in position 184 to 185 is any amino acid
  Variant (187)..(189): Xaa in position 187 to 189 is any amino acid
  Variant (192)..(193): Xaa in position 192 to 193 is any amino acid
  Variant (195)..(196): Xaa in position 195 to 196 is any amino acid
  Variant (199)..(204): Xaa in position 199 to 204 is any amino acid
  Variant (206)..(209): Xaa in position 206 to 209 is any amino acid
  Variant (211)..(214): Xaa in position 211 to 214 is any amino acid
  Variant (217)..(218): Xaa in position 217 to 218 is any amino acid
  Variant (222)..(223): Xaa in position 222 to 223 is any amino acid
  Variant (232)..(233): Xaa in position 232 to 233 is any amino acid
  Variant (236)..(236): Xaa in position 236 is any amino acid
  Variant (238)..(241): Xaa in position 238 to 241 is any amino acid
  Variant (243)..(246): Xaa in position 243 to 246 is any amino acid
  Variant (248)..(261): Xaa in position 248 to 261 is any amino acid
  Variant (263)..(265): Xaa in position 263 to 265 is any amino acid
  Variant (268)..(269): Xaa in position 268 to 269 is any amino acid
  Variant (272)..(273): Xaa in position 272 to 273 is any amino acid
  Variant (276)..(277): Xaa in position 276 to 277 is any amino acid
  Variant (290)..(290): Xaa in position 290 is any amino acid
  Variant (298)..(298): Xaa in position 298 is any amino acid
  Variant (309)..(311): Xaa in position 309 to 311 is any amino acid
  Variant (314)..(314): Xaa in position 314 is any amino acid
  Variant (317)..(324): Xaa in position 317 to 324 is any amino acid
  Variant (326)..(326): Xaa in position 326 is any amino acid
AXXVXXXAGXXXAXXIXVPFXLXXFXAXXXXPXXXXXXXXXXPXXXAXXXXXXXIXXXXXXLXXXXXXXXXXXXXXXPXYXXXXXXXXXXXXXXXXXXXXXXXXXXXXXXXXXDPXXXXXXXXXXXLXXXXXXXXXXFXXXLXVXFMLXEXXXXXXKXXXXXXXXXXXXXXXXXXXXRXLXXVXXYXXXKTXXSXXTGXXXXXXLXXXXVXXXXLWXXLAFXXNYIPNIGSXXAAXPXXXXAXXXXGXXXXXXXXXXXXXXNXXXGNXXEPXXMGXXLGLSTLVVFLSLXFWGWLLGXVGMLLSVPLTXXXKIXLEXXXXXXXXAXLL

SEQ ID NO: 8029 - protein, 61 aa, Artificial sequence
  protein pattern
  Variant (2)..(2): Xaa in position 2 is any amino acid
  Variant (3)..(3): Xaa in position 3 is Ile, Leu or Val
  Variant (4)..(4): Xaa in position 4 is any amino acid
  Variant (7)..(7): Xaa in position 7 is Phe, Ile or Val
  Variant (8)..(8): Xaa in position 8 is Ile, Leu or Val
  Variant (9)..(9): Xaa in position 9 is Asp or Glu
  Variant (11)..(11): Xaa in position 11 is Lys or Arg
  Variant (12)..(12): Xaa in position 12 is any amino acid
  Variant (13)..(13): Xaa in position 13 is Leu or Met
  Variant (15)..(16): Xaa in position 15 to 16 is any amino acid
  Variant (18)..(18): Xaa in position 18 is Asp or Gly
  Variant (21)..(21): Xaa in position 21 is Ala or Thr
  Variant (29)..(29): Xaa in position 29 is Ile, Leu or Val
  Variant (34)..(34): Xaa in position 34 is any or no amino acid
  Variant (36)..(36): Xaa in position 36 is any or no amino acid
  Variant (38)..(38): Xaa in position 38 is Pro, Ser or Thr
  Variant (39)..(39): Xaa in position 39 is Ile or Val
  Variant (45)..(45): Xaa in position 45 is Ile or Val
  Variant (49)..(49): Xaa in position 49 is Ile or Met
  Variant (50)..(50): Xaa in position 50 is any amino acid
  Variant (51)..(51): Xaa in position 51 is Ala, Leu or Val
  Variant (54)..(54): Xaa in position 54 is any amino acid
  Variant (57)..(59): Xaa in position 57 to 59 is any amino acid
  Variant (60)..(60): Xaa in position 60 is Ala, Asp, Glu, Gly, Asn or Ser
  Variant (61)..(61): Xaa in position 61 is Gly or Thr
NXXXGNXXXPXXXGXXLXLSXLVVFLSLXFWGWXLXGXXGMLLSXPLTXXXKIXLEXXXXX

SEQ ID NO: 8030 - protein, 49 aa, Artificial sequence
  protein pattern
  Variant (2)..(3): Xaa in position 2 to 3 is any amino acid
  Variant (4)..(6): Xaa in position 4 to 6 is any or no amino acid
  Variant (8)..(8): Xaa in position 8 is Ile, Leu, Met or Val
  Variant (9)..(9): Xaa in position 9 is Lys or Arg
  Variant (10)..(10): Xaa in position 10 is any amino acid
  Variant (12)..(12): Xaa in position 12 is Ala, Glu, Gly or Ser
  Variant (13)..(13): Xaa in position 13 is any amino acid
  Variant (14)..(14): Xaa in position 14 is Ile, Leu or Val
  Variant (15)..(15): Xaa in position 15 is Ala, Ile, Leu or Val
  Variant (16)..(16): Xaa in position 16 is Ile or Val
  Variant (19)..(19): Xaa in position 19 is Ile, Leu or Val
  Variant (20)..(20): Xaa in position 20 is Leu or Met
  Variant (21)..(21): Xaa in position 21 is Ala or Ser
  Variant (22)..(22): Xaa in position 22 is any amino acid
  Variant (24)..(24): Xaa in position 24 is Ile or Leu
  Variant (26)..(26): Xaa in position 26 is Ile, Met or Val
  Variant (27)..(27): Xaa in position 27 is Ile or Val
  Variant (28)..(28): Xaa in position 28 is any amino acid
  Variant (29)..(29): Xaa in position 29 is Asn, Ser or Thr
  Variant (31)..(31): Xaa in position 31 is Ala, Ile, Leu, Pro or Val
  Variant (32)..(32): Xaa in position 32 is Ile, Leu or Val
  Variant (33)..(39): Xaa in position 33 to 39 is any amino acid
  Variant (40)..(40): Xaa in position 40 is Ile or Val
  Variant (42)..(43): Xaa in position 42 to 43 is any amino acid
  Variant (44)..(44): Xaa in position 44 is Ile, Leu or Val
  Variant (46)..(46): Xaa in position 46 is Ile, Met or Val
  Variant (47)..(47): Xaa in position 47 is any amino acid
  Variant (48)..(48): Xaa in position 48 is Ile, Leu or Met
  Variant (49)..(49): Xaa in position 49 is Ile, Leu or Val
VXXXXXGXXXAXXXXXPFXXXXFXAXXXXPXXXXXXXXXXPXXXAXXXX

SEQ ID NO: 8031 - protein, 52 aa, Artificial sequence
  protein pattern
  Variant (2)..(2): Xaa in position 2 is Ala, Gly, Asn or Ser
  Variant (3)..(4): Xaa in position 3 to 4 is any amino acid
  Variant (5)..(5): Xaa in position 5 is Ile, Leu, Met or Val
  Variant (6)..(6): Xaa in position 6 is Asp, Gly, Asn, Ser or Thr
  Variant (7)..(7): Xaa in position 7 is Phe, Leu, Met or Val
  Variant (8)..(8): Xaa in position 8 is any amino acid
  Variant (9)..(9): Xaa in position 9 is Ala, Gly, Ser or Thr
  Variant (10)..(10): Xaa in position 10 is Asp, Asn, Arg or Ser
  Variant (11)..(11): Xaa in position 11 is any amino acid
  Variant (13)..(14): Xaa in position 13 to 14 is any amino acid
  Variant (15)..(15): Xaa in position 15 is Phe, Leu or Val
  Variant (16)..(16): Xaa in position 16 is Gly or Ser
  Variant (17)..(17): Xaa in position 17 is Gly, Asn or Ser
  Variant (18)..(18): Xaa in position 18 is any amino acid
  Variant (19)..(19): Xaa in position 19 is Leu, Met or Val
  Variant (20)..(20): Xaa in position 20 is Ala, Ser or Thr
  Variant (21)..(21): Xaa in position 21 is Asn or Ser
  Variant (22)..(22): Xaa in position 22 is any amino acid
  Variant (24)..(24): Xaa in position 24 is any or no amino acid
  Variant (26)..(26): Xaa in position 26 is any amino acid
  Variant (27)..(27): Xaa in position 27 is any or no amino acid
  Variant (29)..(29): Xaa in position 29 is any amino acid
  Variant (30)..(30): Xaa in position 30 is any or no amino acid
  Variant (32)..(32): Xaa in position 32 is Phe, Ile, Leu or Val
  Variant (33)..(33): Xaa in position 33 is Phe or Met
  Variant (34)..(34): Xaa in position 34 is Ile, Leu or Met
  Variant (35)..(35): Xaa in position 35 is Phe or Leu
  Variant (36)..(36): Xaa in position 36 is any amino acid
  Variant (37)..(37): Xaa in position 37 is Ala or Glu
  Variant (38)..(51): Xaa in position 38 to 51 is any amino acid
  Variant (52)..(52): Xaa in position 52 is Asp, Asn, Pro or Thr
PXXXXXXXXXXLXXXXXXXXXXFXLXXLXXVXXXXXXXXXXXXXXXXXXXXX

SEQ ID NO: 8032 - protein, 26 aa, Artificial sequence
  protein pattern
  Variant (2)..(2): Xaa in position 2 is any amino acid
  Variant (3)..(3): Xaa in position 3 is Ile or Leu
  Variant (4)..(4): Xaa in position 4 is any amino acid
  Variant (5)..(5): Xaa in position 5 is Gly or Ser
  Variant (6)..(6): Xaa in position 6 is Ile or Val
  Variant (7)..(8): Xaa in position 7 to 8 is any amino acid
  Variant (10)..(10): Xaa in position 10 is Ile, Leu or Met
  Variant (11)..(11): Xaa in position 11 is any amino acid
  Variant (12)..(12): Xaa in position 12 is Ile, Leu or Val
  Variant (14)..(15): Xaa in position 14 to 15 is any or no amino acid
  Variant (17)..(18): Xaa in position 17 to 18 is any or no amino acid
  Variant (20)..(20): Xaa in position 20 is Ile or Leu
  Variant (21)..(21): Xaa in position 21 is any amino acid
  Variant (24)..(25): Xaa in position 24 to 25 is any amino acid
  Variant (26)..(26): Xaa in position 26 is Ala, Ile or Val
RXXXXXXXYXXXKXXTXXSXXTGXXX

SEQ ID NO: 8033 - DNA, 1365 bp, Escherichia coli
  CDS (1)..(1365): transl_table=11
atgattagtctattcgacatgtttaaggtggggattggtccctcatcttcccataccgtagggcctatgaaggcaggtaaacagttcgtcgatgatctggtcgaaaaaggcttactggatagcgttactcgcgttgccgtggacgtttatggttcactgtcgctgacgggtaaaggccaccacaccgatatcgccattattatgggtcttgcaggtaacgaacctgccaccgtggatatcgacagtattcccggttttattcgcgacgtagaagagcgcgaacgtctgctgctggcacagggacggcatgaagtggatttcccgcgcgacaacgggatgcgttttcataacggcaacctgccgctgcatgaaaacggtatgcaaatccacgcctataacggcgatgaagtcgtctacagcaaaacttattattccatcggcggcggttttatcgtcgatgaagaacactttggtcaggatgctgccaacgaagtaagcgtgccgtatccgttcaaatctgccaccgaactgctcgcgtactgtaatgaaaccggctattcgctgtctggtctcgctatgcagaacgaactggcgctgcacagcaagaaagagatcgacgagtatttcgcgcatgtctggcaaaccatgcaggcatgtatcgatcgcgggatgaacaccgaaggtgtactgccaggcccgctgcgcgtgccacgtcgtgcgtctgccctgcgccggatgctggtttccagcgataaactgtctaacgatccgatgaatgtcattgactgggtaaacatgtttgcgctggcagttaacgaagaaaacgccgccggtggtcgtgtggtaactgcgccaaccaacggtgcctgcggtatcgttccggcagtgctggcttactatgaccactttattgaatcggtcagcccggacatctatacccgttactttatggcagcgggcgcgattggtgcattgtataaaatgaacgcctctatttccggtgcggaagttggttgccagggcgaagtgggtgttgcctgttcaatggctgctgcgggtcttgcagaactgctgggcggtagcccggaacaggtttgcgtggcggcggaaattggcatggaacacaaccttggtttaacctgcgacccggttgcagggcaggttcaggtgccgtgcattgagcgtaatgccattgcctctgtgaaggcgattaacgccgcgcggatggctctgcgccgcaccagtgcaccgcgcgtctcgctggataaggtcatcgaaacgatgtacgaaaccggtaaggacatgaacgccaaataccgcgaaacctcacgcggtggtctggcaatcaaagtccagtgtgactaa

SEQ ID NO: 8034 - protein, 454 aa, Escherichia coli
MISLFDMFKVGIGPSSSHTVGPMKAGKQFVDDLVEKGLLDSVTRVAVDVYGSLSLTGKGHHTDIAIIMGLAGNEPATVDIDSIPGFIRDVEERERLLLAQGRHEVDFPRDNGMRFHNGNLPLHENGMQIHAYNGDEVVYSKTYYSIGGGFIVDEEHFGQDAANEVSVPYPFKSATELLAYCNETGYSLSGLAMQNELALHSKKEIDEYFAHVWQTMQACIDRGMNTEGVLPGPLRVPRRASALRRMLVSSDKLSNDPMNVIDWVNMFALAVNEENAAGGRVVTAPTNGACGIVPAVLAYYDHFIESVSPDIYTRYFMAAGAIGALYKMNASISGAEVGCQGEVGVACSMAAAGLAELLGGSPEQVCVAAEIGMEHNLGLTCDPVAGQVQVPCIERNAIASVKAINAARMALRRTSAPRVSLDKVIETMYETGKDMNAKYRETSRGGLAIKVQCD

SEQ ID NO: 8035 - DNA, 1386 bp, Mycobacterium tuberculosis
  CDS (1)..(1386): transl_table=11
atgaccatcagcgtcttcgacctgttcaccatcggcatcgggccgtccagttcccacaccgtgggaccgatgcgcgcggcaaaccagttcgtagttgcgctgcgccgccggggccacctggatgacctcgaggcgatgcgagtggatctgttcggctcgctcgcggccaccggagccggtcatggcaccatgtcggcgatattgctggggctggaaggctgccagccagaaacgattaccaccgaacacaaggaacgccggctcgccgagatcgcagcgtccggcgtgacgcgaatcggcggtgtcattccggtcccgctgaccgagcgtgatatcgacctgcatcccgacatcgttctgccaacgcatcccaacggaatgacgttcactgccgcgggcccacacggccgcgtcttggccaccgagacttatttttcggtgggcggagggttcatcgtcacggaacagaccagcggcaacagcggccaacatccatgctcagttgcccttccctacgtgtcggcccaagaactgctggacatctgtgaccgcctcgacgtgtcaattagcgaagcggcgctgcgcaacgaaacatgttgccgcaccgagaacgaggtacgcgccgcgctgctgcacctgcgcgacgtcatggttgagtgcgaacagcggagcatcgctcgcgaagggttgcttcctggcggcctccgggtgcgccggcgagcgaaggtgtggtatgaccgcttgaacgccgaagaccccactcgcaagccggaattcgctgaggactgggtcaacctggtcgcgctggcagtcaacgaggagaacgcctccggtgggcgcgtcgtcaccgccccgaccaacggtgccgccggcatcgtgccggcggtcctgcactacgcaatccactacacgtcggccggcgcgggggaccccgacgatgtcaccgtgcgattcctgctcactgctggagccatcggatcgttgttcaaggagcgagcatcgatctccggagccgaggtcggctgtcagggcgaggtcggctccgcggccgccatggccgccgccggattggctgaaatcctcggcggcacaccgcgacaagtggaaaacgccgccgagatcgccatggaacacagcctcggcctgacctgtgaccccatcgccgggctggtgcagatcccctgcatcgaacgcaacgcgatttccgccggcaaggccatcaacgccgcacggatggcattgcgcggcgacggcatccatcgcgtcaccctcgaccaggtcatcgacaccatgcgcgccaccggcgcggacatgcacaccaagtacaaggaaacctcggccggcgggctcgccatcaacgtcgcagtcaacatcgtcgagtgttga

SEQ ID NO: 8036 - protein, 461 aa, Mycobacterium tuberculosis
MTISVFDLFTIGIGPSSSHTVGPMRAANQFVVALRRRGHLDDLEAMRVDLFGSLAATGAGHGTMSAILLGLEGCQPETITTEHKERRLAEIAASGVTRIGGVIPVPLTERDIDLHPDIVLPTHPNGMTFTAAGPHGRVLATETYFSVGGGFIVTEQTSGNSGQHPCSVALPYVSAQELLDICDRLDVSISEAALRNETCCRTENEVRAALLHLRDVMVECEQRSIAREGLLPGGLRVRRRAKVWYDRLNAEDPTRKPEFAEDWVNLVALAVNEENASGGRVVTAPTNGAAGIVPAVLHYAIHYTSAGAGDPDDVTVRFLLTAGAIGSLFKERASISGAEVGCQGEVGSAAAMAAAGLAEILGGTPRQVENAAEIAMEHSLGLTCDPIAGLVQIPCIERNAISAGKAINAARMALRGDGIHRVTLDQVIDTMRATGADMHTKYKETSAGGLAINVAVNIVEC

SEQ ID NO: 8037 - DNA, 1362 bp, Vibrio cholerae
  CDS (1)..(1362): transl_table=11
atgattagtgtatttgatatctataaaatcggtgttggtccttcaagttcacacacggttggaccgatgaaagcgggtaaagagtttattgacgaactacgctcaatgggaaaattgcgcgacgtcactaaaatcaccgtggacgtttatggatcgctatcactgacagggaaaggtcaccacacggatatcgctatcatcatgggtctggcaggcaatacgccagagaaagtggatatcgactcgattccgagctttatcgctcgtgtagaagaaacagaacgtcttcctgttggtatgcactgtcataccgtctctttccctcgtgaaggtgggatgaatttccaccgcactaatctgcctttgcacgaaaacggcatgcagattcacgcatggatcaacgacgagaaaatcttcagcaaaacttactactctatcggtggtggtttcattgttgatgaagagcactttggtaaagagaacgaatctcttattcaagtgccttacgctttccgttcagcggaagagctgctgaaccaatgtaaagagagtggcctctcgatcagcacgctcgttatggcgaacgaaaaagccatgcattctgacgaagaagtgcgcacctatttcgcgaacatttggcgtaccatgcgtgagtgtatggaacgcgggatgaacaccgaaggcatcctacctgggcctttgcgtgtaccacgccgtgcggcagcgctgcgtcaacaactgctgacgtccgaaaaaaccaccaacgatccaatggcggtggttgactgggtaaacatgtatgcgtttgcggttaacgaagaaaacgcagccggtggccgtgtagtcactgcaccgactaacggtgcgtgtggcattatccctgcggtactcgcctactacgacaaattcatccaaaccgtgactgagaaagactacatccgttacttcgctgcttctggcgcgattggtggtttgtacaaacgtaatgcgtctatctcaggtgcagaagtgggctgtcaaggtgaagtcggtgtcgcttgttctatggcagcagcgggtcttgctgagcttttaggcggtagcccagagcaagtctgtatggcggctgaaatcgcgatggagcataaccttggtttgacttgtgaccctgttgcaggacaagtacaggtgccatgtatcgaacgtaacggcattgcagcggtgaaagcgatcaactcaacccgtatggcgctgcgtcgttcttctgccccacgtgtttcactggataaagtgattgaaaccatgctggaaaccggcaaggacatgaatgctaagtaccgtgaaacctcacaaggtggcttggcgatcaaagtgatctgttaa

SEQ ID NO: 8038 - protein, 453 aa, Vibrio cholerae
MISVFDIYKIGVGPSSSHTVGPMKAGKEFIDELRSMGKLRDVTKITVDVYGSLSLTGKGHHTDIAIIMGLAGNTPEKVDIDSIPSFIARVEETERLPVGMHCHTVSFPREGGMNFHRTNLPLHENGMQIHAWINDEKIFSKTYYSIGGGFIVDEEHFGKENESLIQVPYAFRSAEELLNQCKESGLSISTLVMANEKAMHSDEEVRTYFANIWRTMRECMERGMNTEGILPGPLRVPRRAAALRQQLLTSEKTTNDPMAVVDWVNMYAFAVNEENAAGGRVVTAPTNGACGIIPAVLAYYDKFIQTVTEKDYIRYFAASGAIGGLYKRNASISGAEVGCQGEVGVACSMAAAGLAELLGGSPEQVCMAAEIAMEHNLGLTCDPVAGQVQVPCIERNGIAAVKAINSTRMALRRSSAPRVSLDKVIETMLETGKDMNAKYRETSQGGLAIKVIC

SEQ ID NO: 8039 - DNA, 1669 bp, Legionella pneumophila
  CDS (131)..(1507): transl_table=11
  misc_feature (1607)..(1607): n is a, g, c or t
  misc_feature (1608)..(1608): n is a, g, c or t
  misc_feature (1624)..(1624): n is a, g, c or t
  misc_feature (1648)..(1648): n is a, g, c or t
  misc_feature (1665)..(1665): n is a, g, c or t
atcggccactaattctgcctaaatttgcgtaaaattaccagtcataagctatcatttaattatataatggacaaaaaggtaatatccttctacacttgcccctaataatgaacaagagattttaacggcgatgaacattagtgtttttgatttattttctataggaattgggccatcaagctcacacacagtaggccctatgttagctgccaatgcttttttgcaattactggaacaaaaaaatctgtttgataaaactcagagagtcaaagtagagctttatggttcgctggcgcttactggcaaggggcacggtactgataaagccattttaaatggtcttgaaaacaaagcgcccgagacagttgatcctgcctccatgatcccaagaatgcatgaaattcttgattctaatctactcaatttggccggcaagaaagaaattccttttcatgaagcgaccgattttttatttttacaaaaagaattattacccaaacacagtaatggaatgcgcttttctgcttttgatggaaacgctaatctactgattgagcaagtctattactctattggcggtggttttattacaaccgaagaagactttgataaatcaacaaccgataccaatccccccccttacccctttgcaacagcaactgagttattgaaattatgcaaaaaacatcacttgaccatcgctgaattgatgttagtcaatgaaaaaacatggagaagttcagcagaaattcataaaggaattcttgatattgccaaagtaatggatgactgcatcaacaacggttgcaaacatgatggagtgctccccggtggccttaatttaaagcgacgggcacctgacttgtatagaaaactaatagaacaaaaaggggttaaaagtgtttttgaacagtcagatattatgaatcatttgaacctttatgctatggctgtcaatgaagaaaacgcagcgggaggacgaattgtcacagccccaacaaatggagctgccggaattattccagctgttcttaaatattgtcagcaagctcacgacaggatgagcaacgaagacatctacacttattttctgactgccgcagcgattggaatcctttataaaaaaggcgcttcaatttctggcgctgaagtaggatgccaaggtgaggttggtgttgcctcttccatggcagctgctggtttgacagcggttcttggcggaaccatcgagcaggttgaaaatgctgcagaaattgcaatggaacatcatctgggaatgacctgtgatcccgttctgggccttgtgcaaatcccatgcatcgagagaaatgccatgggggctgtgaaagcagttaatgcaacccgaatggcactcataggtgatggtcagcatcaaatctctttggataaagtcatcaaaacaatgaagcaaaccggcatggatatgcaaagtatatacaaggaaacgtccatgggtggattggctgttaacttgcctgagtgttagttatcaccgctccctcacggtcgcggctcggatgattaaatcaaatgataattaaacctgcgccgcgaccgtgaggagcggatacaattatctaattaannacaataatacgttacnacggggaacataataccgagcacngtgcgatactattcttnatct

SEQ ID NO: 8040 - protein, 458 aa, Legionella pneumophila
MNISVFDLFSIGIGPSSSHTVGPMLAANAFLQLLEQKNLFDKTQRVKVELYGSLALTGKGHGTDKAILNGLENKAPETVDPASMIPRMHEILDSNLLNLAGKKEIPFHEATDFLFLQKELLPKHSNGMRFSAFDGNANLLIEQVYYSIGGGFITTEEDFDKSTTDTNPPPYPFATATELLKLCKKHHLTIAELMLVNEKTWRSSAEIHKGILDIAKVMDDCINNGCKHDGVLPGGLNLKRRAPDLYRKLIEQKGVKSVFEQSDIMNHLNLYAMAVNEENAAGGRIVTAPTNGAAGIIPAVLKYCQQAHDRMSNEDIYTYFLTAAAIGILYKKGASISGAEVGCQGEVGVASSMAAAGLTAVLGGTIEQVENAAEIAMEHHLGMTCDPVLGLVQIPCIERNAMGAVKAVNATRMALIGDGQHQISLDKVIKTMKQTGMDMQSIYKETSMGGLAVNLPEC

SEQ ID NO: 8041 - DNA, 1371 bp, Dichelobacter nodosus VCS1703A
  CDS (1)..(1371): transl_table=11
atgattagtattaaatcaattttgaaaatcggtatcggaccatcgagttcccacacgatgggacccatgcgcgcggcggctgtatttcgcactcatcttattgaaaaaggattattggataaaaccacgcgcgtggtcgtgaatttatatggttctttatccgcaacgggcaaaggtcacgcaaccgatagcgccacgattgccggactcaccggcgatgatccgcaaaccgttgataccgattctttgccggaacgcattgaacgcattaaaaaagaaggaaaattgccgttaagtgatacgcatcaaatcgcttttaattatgatcgcgatattattttcgaaaaaacggcattgccgcagcacgaaaatggtatgactttgaaagcattcaataatgatcaggttttatacgaagaaaccgtgttttccatcggcggcggttttattgccagcgctgaagaattagctcatcaaggtaaacaaacccgtgaaatgaatgtgccttatcctttccaaaaggcaaaagacgttgtggcattatgtcaacagcataaattgcggttttctgatttaattttggcaaacgaagtggctttattgggcagcgaagaagcggttaatgaatattgtcaacgtgtttgggcggtgatgaatcattgcattgaaggcggattatctaaagaaggatttttgccgggcggattaaaattaccgcggcgagcagcaaaaatgcacgcgcaattgcaagcggctgaaaaagagggcgcagccgatcctatgcgagtagtggattgggtcaatatgtttgctatcgctgttaacgaagaaaatgcggcgggtgcgcgcgtggttacggcgccaactaatggcgcgtgtggtgtcgtgccggcggttttagcgtattacaatcgctttattaaaccgatcgacgaagaaaccattatgcgttatttattaacgtgtagcggtatcggcgttttatataaattaaatgcgtctatttctggggcggaagtaggttgtcaaggtgaagtgggcacggcttgctctatggctgccggcggtttagccgaaattcaaggcgcaacggtagaacaagtatgcgcagcggcagaaatggcaatggaacacaatttagggttaacttgcgacccaattgcgggattagttcaagtgccgtgtattgaacgcaacggcgtggcagcaatgaaatcaattaacgccgcgcgcatggcattgatgcgtactgataacacattcgtttctttagatgatgttattcaaaccatgctggaaactggacgcgatatgcattcaaaataccgcgaaacttcccaaggcggtcttgctgttcacgtgaaatattaa

SEQ ID NO: 8042 - protein, 456 aa, Dichelobacter nodosus VCS1703A
MISIKSILKIGIGPSSSHTMGPMRAAAVFRTHLIEKGLLDKTTRVVVNLYGSLSATGKGHATDSATIAGLTGDDPQTVDTDSLPERIERIKKEGKLPLSDTHQIAFNYDRDIIFEKTALPQHENGMTLKAFNNDQVLYEETVFSIGGGFIASAEELAHQGKQTREMNVPYPFQKAKDVVALCQQHKLRFSDLILANEVALLGSEEAVNEYCQRVWAVMNHCIEGGLSKEGFLPGGLKLPRRAAKMHAQLQAAEKEGAADPMRVVDWVNMFAIAVNEENAAGARVVTAPTNGACGVVPAVLAYYNRFIKPIDEETIMRYLLTCSGIGVLYKLNASISGAEVGCQGEVGTACSMAAGGLAEIQGATVEQVCAAAEMAMEHNLGLTCDPIAGLVQVPCIERNGVAAMKSINAARMALMRTDNTFVSLDDVIQTMLETGRDMHSKYRETSQGGLAVHVKY

SEQ ID NO: 8043 - DNA, 1404 bp, Mesorhizobium loti MAFF303099
  CDS (1)..(1404): transl_table=11
gtgttcctttcggttttcgacctgttcaagatcggcatcggcccctcgagctcgcacacgatgggcccgatgacggccgcgcggcggtttctcgacgaggtcgcgggtgacgactggccgcggcccaccggcgccaaggtcgcccgcatcggcgccagcctgcacggctcgctcgcctatactggcatcggccatggcagcgaccgcgccgtcatcctcggccttgccggccagaccccgcaaacggttgatccggaccaggccgatggcatcatcggccgcatcaccgccgacaggatgatttcgccgcccggtcacccgtcctaccatttcgacccggccacggatctggtgctcgaccgcaagacaccgcttaccggccacgccaacggcatggcgttctatgcctatgacgccagcgggcgcctgctgctcaaacgcatctactattcgatcggcggcggcttcgtggtgtcggaagaagagctgcagcggatgaaggccaaggggtcggtgacttcagaaggcaagaaagtgccttatcctttcaagaacgccgtcgagatgctgaagatggcggccaagagcgggctttccatcgccgagatgaagcgcgtcaacgaggaaacgcagatgtcgcgcgaggacctcgacgccggcctcgacgccatctggggggctatgaagagctgcatcgaccgtggcctgtcgcaggacggcatcatgccgggcgggttgaaggttcggcgccgggcccggcagctgcacgacaagctgcaggaacagtggcagcagaaccggccaaatcccttgctcgccaatgactggctgtcgatctacgccatggcggtcaacgaggagaatgcggccggcggccgcgttgttaccgcgccgaccaacggggcggccggtacgctgccggcggtgctgcgctactggctgcatttccatcccgaagccgaccagccgagcatacgcgacttcctgctgacggctgccgccgtcggcggcatcatcaagaccaatgcgtcgatctctggcgccgaggtcggctgccagggcgaggtcgggtccgcctcggcgatggccgcggccggcctgtgcgccgtcatgggcggcacgcccgagcaggtcgagaatgccgccgagatcgcgctcgaacaccatctcggcatgacttgcgatccagtcggcgggctggtccaggtgccgtgcatcgagcgcaatgcgctgggcgcggtcaaggcggtgacggctgcgtccctggcgatcaagggcgacggcatccacttcgtgccgctcgacgcggcgatcgagaccatgcgccagaccggcctcgacatgaacgagaagtacaaggaaaccagcctcggcgggctcgcggtcaatgtcgtggagtgctga

SEQ ID NO: 8044 - protein, 467 aa, Mesorhizobium loti MAFF303099
MFLSVFDLFKIGIGPSSSHTMGPMTAARRFLDEVAGDDWPRPTGAKVARIGASLHGSLAYTGIGHGSDRAVILGLAGQTPQTVDPDQADGIIGRITADRMISPPGHPSYHFDPATDLVLDRKTPLTGHANGMAFYAYDASGRLLLKRIYYSIGGGFVVSEEELQRMKAKGSVTSEGKKVPYPFKNAVEMLKMAAKSGLSIAEMKRVNEETQMSREDLDAGLDAIWGAMKSCIDRGLSQDGIMPGGLKVRRRARQLHDKLQEQWQQNRPNPLLANDWLSIYAMAVNEENAAGGRVVTAPTNGAAGTLPAVLRYWLHFHPEADQPSIRDFLLTAAAVGGIIKTNASISGAEVGCQGEVGSASAMAAAGLCAVMGGTPEQVENAAEIALEHHLGMTCDPVGGLVQVPCIERNALGAVKAVTAASLAIKGDGIHFVPLDAAIETMRQTGLDMNEKYKETSLGGLAVNVVEC

SEQ ID NO: 8045 - DNA, 1368 bp, Pasteurella multocida subsp. multocida str. Pm70
  CDS (1)..(1368): transl_table=11
atgattagtgtttttgatatgtttaaaattggtatcggtccctcgagttcccatactgtcggtcccatgaaagcgggcaaacaatttattgatgatcttgtgagtcgtcatcagctagcacaagtgagtaaactgcgtgtggaggtgtacggttcactttccatgacaggacgtggacataataccgacattgccattattatgggattagccggctatttaccccatgatgtggatatcgagttgatccctcaatttatttctaccctaaaacagactgcccgtttgcccattgcgcaaaatacgaaagaggtcacctttaattttaatgatgacttaatctttcatcaaaccttcctcccacgacatgaaaatgggatgaccattaccgcactagcacaagatgatacggaactttatcagcaaacctactactctatcggaggtgggtttattgtggatgaagaacattttgaacatgctatgcatactgaaatcagtgtgccatttccttaccaaaatgcagcagatatgctaaaacactgcgatgacaatggtctcccgttgtctagtgttgtgatgaaaaatgaaaccgcattacatggaaaaaccgcattaagccaacatttacaacaggtctggcaaaccatgaaagcctgtatccaacacggtatcaatacagaaggtttattaccgggtccattaaaagtacctcgtcgcgcggcaagcttatatcgaatgttacaagcgaatagtagcttatccaatgatccaatgagcattgtggattgggtgaatatgtatgcgcttgctgtcaatgaagaaaatgctgcaggcggacgtgtggtaactgcgccaaccaacggagcttgtggtattgtgcctgctgtatttgcttattacgaacaattcatcgcagatagcatacctgacatcatcgaacgttatttattaacttgtagctttattggttcactgtacaaaatgaatgcgtcgatttcaggtgctgaagtaggctgccaaggcgaagttggtgtagcttgttctatggcggcggctggcttgactgaaattctgggtggtagtcctgaacaagtatgtattgcggcagaaattgccatggaacataatcttggtctgacttgtgatccagtgggaggacaggtacaggtcccttgtattgaacgtaacgctatcgccgcggttaaagccattaatgccagtcgaatggcattgcgtcgaacaaccagtccacgagtcactttagacaaggtcattgaaactatgtatgaaacaggcaaagatatgaatgctaaataccgtgaaacctcgcagggtggattggctattaaagtagtctgttcataa

SEQ ID NO: 8046 - protein, 455 aa, Pasteurella multocida subsp. multocida str. Pm70
MISVFDMFKIGIGPSSSHTVGPMKAGKQFIDDLVSRHQLAQVSKLRVEVYGSLSMTGRGHNTDIAIIMGLAGYLPHDVDIELIPQFISTLKQTARLPIAQNTKEVTFNFNDDLIFHQTFLPRHENGMTITALAQDDTELYQQTYYSIGGGFIVDEEHFEHAMHTEISVPFPYQNAADMLKHCDDNGLPLSSVVMKNETALHGKTALSQHLQQVWQTMKACIQHGINTEGLLPGPLKVPRRAASLYRMLQANSSLSNDPMSIVDWVNMYALAVNEENAAGGRVVTAPTNGACGIVPAVFAYYEQFIADSIPDIIERYLLTCSFIGSLYKMNASISGAEVGCQGEVGVACSMAAAGLTEILGGSPEQVCIAAEIAMEHNLGLTCDPVGGQVQVPCIERNAIAAVKAINASRMALRRTTSPRVTLDKVIETMYETGKDMNAKYRETSQGGLAIKVVCS

SEQ ID NO: 8047 - DNA, 1377 bp, Pseudomonas aeruginosa PAO1
  CDS (1)..(1377): transl_table=11
atgtccctgagtgtcttcgatctgttcaagatcggcatcgggccgtccagctcccacaccgtggggccgatgcgtgccgccgcgcgctttgccgaggggctgaggcgcgaggggttgctggaggccactgccagcatcaaggtcgagctgtacggctcgctcggcgccaccggcaagggccacggcagcgacaaggcggtactgctcggcctggagggcgagcagccggacacggtggataccgccgcgattcccgctcggctcgatgccatccgttccagcggcgagctgcgcctgctcggcgagcggccgatccgcttcgtcgagaaggaacaccttgcgctgatccgcaagccgctggcctaccatcccaacggcatgatcttccgtgccttcgacgccgccggcctgcaggtccgcagccgcgagtactactcggtgggcggcggtttcgtggtcgacgacgaggccgccggcctcgaccgcatcgtcgaggaccgcacgccgctggcgttccccttcaagaccgcgcggcaactgctcgaccattgcgcccgcgaaggcctgtcgatcagccagttgatggccgagaacgagaaggcctggcgccccgccgaggaaacccgcaccggcctgctgcgtatctggcaggtgatgcaggactgcgtcgaggccggctgccgcaacgagggcatcatgcccggcggactgaaggtcaggcgccgtgcggcggcgctccaccgccagttgtgccagcggccggaggccggtctgcgcgacgccctcagcgtgctcgactgggtcaacctctacgccctggcggtgaacgaggagaacgccagcggcggccgcgtggtgaccgcgccgaccaacggcgcggcggggatcattccggcggtgctgcattactacgcgcgcttcatccccggggccgacgacgacggcgtggtgcgcttcctgctcaccgcggcggcgatcggcatcctctacaaggaaaacgcctcgatctccggcgccgaggtcggttgccagggcgaggtcggcgtggcctgctcgatggctgccggggcgctctgcgaagtgctcggcggtagcgtgcagcaggtcgagaacgccgccgaaatcggcatggagcacaacctcgggctgacctgcgacccggtcggcgggctggtccaggtgccctgcatcgaacgcaacgcgatggcttcggtgaaggcgatcaacgccgcgcgcatggccctgcgcggcgacggccagcacttcatttccctcgacaaggtcatccgcaccatgcgccagaccggcgccgacatgaaaagcaaatacaaggaaaccgcgcgcggcggcctcgccgtgaacatcatcgaatgctga

SEQ ID NO: 8048 - protein, 458 aa, Pseudomonas aeruginosa PAO1
MSLSVFDLFKIGIGPSSSHTVGPMRAAARFAEGLRREGLLEATASIKVELYGSLGATGKGHGSDKAVLLGLEGEQPDTVDTAAIPARLDAIRSSGELRLLGERPIRFVEKEHLALIRKPLAYHPNGMIFRAFDAAGLQVRSREYYSVGGGFVVDDEAAGLDRIVEDRTPLAFPFKTARQLLDHCAREGLSISQLMAENEKAWRPAEETRTGLLRIWQVMQDCVEAGCRNEGIMPGGLKVRRRAAALHRQLCQRPEAGLRDALSVLDWVNLYALAVNEENASGGRVVTAPTNGAAGIIPAVLHYYARFIPGADDDGVVRFLLTAAAIGILYKENASISGAEVGCQGEVGVACSMAAGALCEVLGGSVQQVENAAEIGMEHNLGLTCDPVGGLVQVPCIERNAMASVKAINAARMALRGDGQHFISLDKVIRTMRQTGADMKSKYKETARGGLAVNIIEC

SEQ ID NO: 8049 - DNA, 1377 bp, Pseudomonas aeruginosa PAO1
  CDS (1)..(1377): transl_table=11
atggctatcagtgtgttcgaccttttcaagatcggtatcggcccgtccagttcgcataccgtcggccccatgcgcgccgccgcgctgttcaccgctgccctgcgccaacgccaggcgctgtcggcggtgcggcgtctcgaagtgcgcctgtatggctcgctgtccgccaccggcgtcggccacggcaccgatcgcgcggtgatcatgggcctgatgggcgaatggccggatcgtatcgacccgacccagatcgccccacgcatggccgcgctgctcgatagcggcctgctgcaactggacggccgcgtggcggtaccgttcgactgggtgcgcgacatgcgcctgctcgacgagaacctgccctaccaccccaacgccatgaccctggtcgcctacggcgagcaaggcgaactgcaccaggagacctactactcggtgggtggcggcttcgtggtcgatgcggcacaggccgcctcgggacagctcgaccaggaccacacggtgctgccctacgacttctccagcgccgaggaactgttgctgctgtgcaagcgccacaacctgcgggtatccgagctgatgctggccaacgaacgcatctggcgcagcgagaccgacatccgcgaaggcctgcggcgcatctggcaggcgatgcgcgattgcgtcgacaacgggttgcgcaacgaaggcatccttcccggcgggctcaacgtgcaacgccgcgctgcgcgcctgcaccgcaacctgcaggagatcggcaagcccaacgtgatcggctcgaccctcagcgccatggaatgggtcaacctgttcgccctggcggtgaacgaggagaacgccgccggcgggcgcatggtcaccgcgcccaccaacggcgcggcggggatcatcccggcggtgctgcactactatatgaagttcaatcccgacgcccaggaccgcgacgtcgtcgactacctgctggccgccgccgcggtgggcatcctgtgcaagaagaacgcctcgatctccggcgccgaggtcggctgccagggcgaggtcggctcggcctgcgcgatggccgccgccggactggcggaagtcctcggcgccaccccggcgcaggtcgagaacgccgccgagatcggcctggagcacaacctcgggctgacctgcgacccggtcggcgggctggtccaggtgccctgtatcgagcgcaacgcgatcgccgcggtgaaggccatcaacgcggcgcaaatggccttgcgcggcgacggccagcatttcatctcgctggacaaggtgatccgcaccatgcgcgacaccggtgccgacatgcacgacaagtacaaggaaacctcgcgcgggggcctggcggtgaacgccatcgagtgctga

SEQ ID NO: 8050 - protein, 458 aa, Pseudomonas aeruginosa PAO1
MAISVFDLFKIGIGPSSSHTVGPMRAAALFTAALRQRQALSAVRRLEVRLYGSLSATGVGHGTDRAVIMGLMGEWPDRIDPTQIAPRMAALLDSGLLQLDGRVAVPFDWVRDMRLLDENLPYHPNAMTLVAYGEQGELHQETYYSVGGGFVVDAAQAASGQLDQDHTVLPYDFSSAEELLLLCKRHNLRVSELMLANERIWRSETDIREGLRRIWQAMRDCVDNGLRNEGILPGGLNVQRRAARLHRNLQEIGKPNVIGSTLSAMEWVNLFALAVNEENAAGGRMVTAPTNGAAGIIPAVLHYYMKFNPDAQDRDVVDYLLAAAAVGILCKKNASISGAEVGCQGEVGSACAMAAAGLAEVLGATPAQVENAAEIGLEHNLGLTCDPVGGLVQVPCIERNAIAAVKAINAAQMALRGDGQHFISLDKVIRTMRDTGADMHDKYKETSRGGLAVNAIEC

SEQ ID NO: 8051 - DNA, 1386 bp, Neisseria meningitidis MC58
  CDS (1)..(1386): transl_table=11
atgatcagcattttcgatattttcaaaatcggtatcgggccttccagttcgcatacggtcggcccgatgaaggcagccgccgcctttgcggcaggtttggatgcacaggctgttcgcatcgtcatcgacatttacggctcgctcgcactgaccggatacggacacggtacatttgacgcgctgatgctcggtttggaaggcagcctgccgcacgacatcccgcttgccggcattcccgaacgcctcgaacgcatccgcacgcagcacatcctccggctcaacgggcaagaaatccgcttcatccccgaccgcgacctgaacatactcggcaatcaagtgctgcccaaacaccccaacagcctgcgttttaccgcctatgcttcagacggcacggtattgaatgaacaggtttattattcggtcggcggcggctttgtcgttaccgaagaagattttgaccggcaggcggaaacggaaaaagccgttccctatccctataccagttgcgccgaactgcttgcccgatgccgtctgaaccggctcgacatctccgaagtcgtgttggcaaacgaagccgcgcttgccggatgcggcgaagccgaaatccgccgccgcgccgctgccgttgccgaggttatggaaggctgcatcaaacgcggcttgggtgcggacggcgaactgcccagcggattgaacgtccgccgccgcgccccgcagcttgccgccaagctcaaagtcctgcgcgaaaccgaaatcgtcaacacccagctctggccgatggtgtacgccatggcggtcaacgaagaaaacgccgccggcggacgcgtcgttaccgcaccgaccaacggcgcggcaggcatcattcccgccgtattgcactatttccgcaagttcaatccgcacgccacacaggaacgcgtcgaaaacttcctgctcaccgcaggcgcaatcggcatcctctacaagaccaacgcctccatttccggtgcggatgtcggctgtcagggcgaagtcggcgtagcgtgttcgatggcggcgggcgcatacgccgaagtcatcggcggcacgcccaaacaagtggaaaacgccgccgaaatggcgatggaacaccatttggggctgacttgcgaccccgtcggcggactggtgcaaatcccctgcatcgagcgcaacggcatcgccgccgaaaaagccctcaaactcggcacgctcgcgcttttggaagacggcacggacaaaaaagtctcgctcgacgaagtcatccgaaccatgctgcaaaccggccgggatatgaaggcgacctacaaagaaacctcgcttgccggactcgccgccacgctccggaaaaaagccgtccccgtatccgtgcgcgtggtcgagtgctga

SEQ ID NO: 8052 - protein, 461 aa, Neisseria meningitidis MC58
MISIFDIFKIGIGPSSSHTVGPMKAAAAFAAGLDAQAVRIVIDIYGSLALTGYGHGTFDALMLGLEGSLPHDIPLAGIPERLERIRTQHILRLNGQEIRFIPDRDLNILGNQVLPKHPNSLRFTAYASDGTVLNEQVYYSVGGGFVVTEEDFDRQAETEKAVPYPYTSCAELLARCRLNRLDISEVVLANEAALAGCGEAEIRRRAAAVAEVMEGCIKRGLGADGELPSGLNVRRRAPQLAAKLKVLRETEIVNTQLWPMVYAMAVNEENAAGGRVVTAPTNGAAGIIPAVLHYFRKFNPHATQERVENFLLTAGAIGILYKTNASISGADVGCQGEVGVACSMAAGAYAEVIGGTPKQVENAAEMAMEHHLGLTCDPVGGLVQIPCIERNGIAAEKALKLGTLALLEDGTDKKVSLDEVIRTMLQTGRDMKATYKETSLAGLAATLRKKAVPVSVRVVEC

SEQ ID NO: 8053 - DNA, 1365 bp, Escherichia coli O157:H7 EDL933
  CDS (1)..(1365): transl_table=11
  misc_feature (481)..(481): n is a, g, c or t
  misc_feature (722)..(722): n is a, g, c or t
gtgattagtctattcgacatgtttaaggtggggattggtccctcatcttcccataccgtagggcctatgaaggcgggtaaacagttcgtcgatgatctggtcgaaaaaggcttactggatagcgttactcgcgttgccgtggacgtttatggttcactgtcgctgacgggtaaaggccaccacaccgatatcgccattattatgggtcttgcaggtaacgaacctgccaccgtggatatcgacagtattcccggttttattcgcgacgtagaagagcgcgaacgtctgctgctggcacagggacggcatgaagtggatttcccgcgcgacaacgggatgcgttttcataacggcaacctgccgctgcatgaaaacggtatgcaaatccacgcctataacggcgatgaagtcgtctacagcaaaacttattattccatcggcggcggttttatcgtcgatgaagaacactttggtcaggatnctgccaacgaagtgagcgtgccgtatccgttcaaatctgccaccgaactgctcgcgtactgtaatgaaaccggctattcgctgtctggtctcgctatgcagaacgaactggcgctgcacagcaagaaagagatcgacgagtatttcgcgcatgtctggcaaaccatgcaggcatgtatcgatcgcgggatgaacaccgaaggtgtactgccaggcccgctgcgcgtgccacgtcgtgcgtntgccctgcgccggatgctggtttccagcgataaactgtctaacgatccgatgaatgtcattgactgggtaaacatgtttgcgctggcagttaacgaagaaaacgccgccggtggtcgtgtggtaactgcgccaaccaacggtgcctgcggtatcgttccggcagtgctggcttactatgaccactttattgaatcggtcagcccggacatctatacccgttactttatggcagcgggcgcgattggtgcattgtataaaatgaacgcctctatttccggtgcggaagttggttgccagggcgaagtgggtgttgcctgttcaatggctgctgcgggtcttgcagaactgctgggcggtagcccggaacaggtttgcgtggcggcggaaattggcatggaacacaaccttggtttaacctgcgacccggttgcagggcaggttcaggtgccgtgcattgagcgtaatgccattgcctctgtgaaggcgattaacgccgcacggatggctctgcgccgcaccagtgcaccgcgcgtctcgctggataaggtcatcgaaacgatgtacgaaaccggtaaggacatgaacgccaaataccgcgaaacctcacgcggtggtctggcaatcaaagtccagtgtgactaa

SEQ ID NO: 8054 - protein, 454 aa, Escherichia coli O157:H7 EDL933
  misc_feature (161)..(161): The Xaa at location 161 stands for Ala, Pro, Ser, or Thr.
  misc_feature (241)..(241): The Xaa at location 241 stands for Cys, Phe, Ser, or Tyr.
MISLFDMFKVGIGPSSSHTVGPMKAGKQFVDDLVEKGLLDSVTRVAVDVYGSLSLTGKGHHTDIAIIMGLAGNEPATVDIDSIPGFIRDVEERERLLLAQGRHEVDFPRDNGMRFHNGNLPLHENGMQIHAYNGDEVVYSKTYYSIGGGFIVDEEHFGQDXANEVSVPYPFKSATELLAYCNETGYSLSGLAMQNELALHSKKEIDEYFAHVWQTMQACIDRGMNTEGVLPGPLRVPRRAXALRRMLVSSDKLSNDPMNVIDWVNMFALAVNEENAAGGRVVTAPTNGACGIVPAVLAYYDHFIESVSPDIYTRYFMAAGAIGALYKMNASISGAEVGCQGEVGVACSMAAAGLAELLGGSPEQVCVAAEIGMEHNLGLTCDPVAGQVQVPCIERNAIASVKAINAARMALRRTSAPRVSLDKVIETMYETGKDMNAKYRETSRGGLAIKVQCD

SEQ ID NO: 8055 - DNA, 1368 bp, Escherichia coli O157:H7 EDL933
  CDS (1)..(1368): transl_table=11
atgattagcgtattcgatattttcaaaatcggcattggcccttccagttctcataccgttggaccaatgaaagcgggtaaacaatttaccgacgatctgattgcccgtaacctgcttaaagacgtgacccgcgtggtggttgacgtgtacggctcgctctctctgactggtaaaggccaccacactgatatcgccattattatgggcctggcgggtaacctgccggataccgtggatatcgattccatccctggttttattcaggatgtgaatactcatggtcgcctgatgctggcaaacggtcagcatgaagtggagttcccggttgatcagtgcatgaacttccatgccgacaacctttctctgcatgaaaacggtatgcgcattaccgcgctggcgggtgataaagtcgtttacagtcagacttactactctattggcggtggctttatcgttgatgaagagcattttggccagcaggatagcgcaccggttgaagttccttatccgtacagttcagcagccgatctgcaaaaacattgtcaggaaaccgggctgtcactctctggcctgatgatgaaaaacgagctggcgctgcacagcaaagaagagctggaacagcacctggcgaacgtctgggaagtgatgtgtggcggtattgagcgcggtatttccaccgaaggtgtgttacctggcaaactgcgtgttccacgccgtgctgcggcactacgccggatgctggtcagccaggataaaaccaccactgacccgatggcggttgttgactggatcaacatgtttgcactggcagtgaacgaagagaacgctgctggcggtcgcgtggtgactgcgccgactaacggtgcgtgcgggattatcccggcagtgctggcgtactacgataagtttatccgcgaagtgaacgctaactcactggctcgttacctgctggtagccagcgccattggttctctttataagatgaacgcgtcgatttctggtgccgaagtgggttgccagggtgaagttggtgtggcgtgctcaatggcggcggctggtctggcagaactgttaggtgcaagcccggcgcaggtgtgcatcgcggcggaaatcgccatggagcacaacctcggtctgacgtgtgacccggtcgccggacaggtacaggtgccatgcatcgagcgtaacgccattgcggcagtaaaagcggtgaacgccgcacgtatggcgctgcgccgtaccagcgagccgcgcgtctgcctcgataaagttatcgaaaccatgtacgaaacaggtaaagatatgaacgccaagtaccgcgaaacctctcgcggcggcctggcaatgaagatcgttgcctgcgattaa

SEQ ID NO: 8056 - protein, 455 aa, Escherichia coli O157:H7 EDL933
MISVFDIFKIGIGPSSSHTVGPMKAGKQFTDDLIARNLLKDVTRVVVDVYGSLSLTGKGHHTDIAIIMGLAGNLPDTVDIDSIPGFIQDVNTHGRLMLANGQHEVEFPVDQCMNFHADNLSLHENGMRITALAGDKVVYSQTYYSIGGGFIVDEEHFGQQDSAPVEVPYPYSSAADLQKHCQETGLSLSGLMMKNELALHSKEELEQHLANVWEVMCGGIERGISTEGVLPGKLRVPRRAAALRRMLVSQDKTTTDPMAVVDWINMFALAVNEENAAGGRVVTAPTNGACGIIPAVLAYYDKFIREVNANSLARYLLVASAIGSLYKMNASISGAEVGCQGEVGVACSMAAAGLAELLGASPAQVCIAAEIAMEHNLGLTCDPVAGQVQVPCIERNAIAAVKAVNAARMALRRTSEPRVCLDKVIETMYETGKDMNAKYRETSRGGLAMKIVACD

SEQ ID NO: 8057 - DNA, 1371 bp, Escherichia coli O157:H7 EDL933
  CDS (1)..(1371): transl_table=11
gtggatatgattagtgcattcgatattttcaaaattgggattggtccctccagttcgcataccgtggggccaatgaatgccggaaaaagttttattgatcggctggaaagtagcggcttattaaccgcgacgagccatattgtggtcgatctgtacgggtcgttgtcactgacgggcaaaggccatgccacggatgtcgccatcatcatgggactggcaggaaacagtccgcaggatgttgtcattgatgagatccctgcatttatagagttagtaacgcgcagcgggcggctgccagtggcatctggtgcgcatattgttgattttcctgtagcaaagaacattatcttccatcccgaaatgttgcctcgccatgagaacggaatgcggatcactgcctggaaggcacaggaagagctattaagtaaaacctattactctgtcggcggcgggtttattgtcgaagaagaacacttcggcctgtcgcacgatgtcgaaacacccgtaccttacgatttccactcagcaggtgaactgctgaaaatgtgtgattacaacggcctgtctatttctggcctgatgatgcacaacgagctagcgctgcgcagtaaagcggaaattgacgccggttttgcccgtatctggcaagtgatgcatgacggtattgaacgcgggatgaacactgaaggcgtgctgcctggtccgctcaatgtgccgcgccgtgccgtagcgctgcgtcgtcagctggtttccagcgataacatctctaacgatccgatgaatgtcatcgactggatcaacatgtacgcgctggcggttagtgaagaaaacgcagctggcgggcgcgtggtaacggcaccgactaacggtgcgtgcggcattattccggcagtgctggcttattacgataagttccgtcgtccggtaaacgagcggtcaattgcccgctattttcttgcagccggggctattggcgcgctgtataaaatgaacgcctccatctctggcgcggaggtcggctgtcagggggagattggcgtggcctgttcaatggcggcggcagggttaactgaactactgggcggcagtccggcgcaggtatgcaatgcggcggaaatcgcgatggagcataaccttggactgacctgcgagccggttgccggacaggtacaaatcccgtgcattgaacgtaatgccattaatgccgtgaaagcagtaaacgccgcgcggatggcgatgcgccgcacctcggcaccgcgtgtttcactcgataaagtgatcgagacgatgtatgaaaccggcaaagatatgaacgataaataccgcgaaacatcacgcggcggactggccattaaagtggtctgcggctga

SEQ ID NO: 8058 - protein, 456 aa, Escherichia coli O157:H7 EDL933
MDMISAFDIFKIGIGPSSSHTVGPMNAGKSFIDRLESSGLLTATSHIVVDLYGSLSLTGKGHATDVAIIMGLAGNSPQDVVIDEIPAFIELVTRSGRLPVASGAHIVDFPVAKNIIFHPEMLPRHENGMRITAWKAQEELLSKTYYSVGGGFIVEEEHFGLSHDVETPVPYDFHSAGELLKMCDYNGLSISGLMMHNELALRSKAEIDAGFARIWQVMHDGIERGMNTEGVLPGPLNVPRRAVALRRQLVSSDNISNDPMNVIDWINMYALAVSEENAAGGRVVTAPTNGACGIIPAVLAYYDKFRRPVNERSIARYFLAAGAIGALYKMNASISGAEVGCQGEIGVACSMAAAGLTELLGGSPAQVCNAAEIAMEHNLGLTCEPVAGQVQIPCIERNAINAVKAVNAARMAMRRTSAPRVSLDKVIETMYETGKDMNDKYRETSRGGLAIKVVCG

SEQ ID NO: 8059 - DNA, 1377 bp, Mycobacterium leprae TN
  CDS (1)..(1377): transl_table=11
atgaccatcagcgtgttcgatctgtttacgatcggcatagggccgtccagctcacacacggtcggtccaatgcgcgccgcagcacgtttcgtcgatggcttagctgccaacggtttgctcgaggacgtgtgcgacatccgtgtcgagttgttcggatcgctggcggcaactggggcaggccacggcaccatgtcggctatcctgttagggcttgagggggagcatcccgagaggcttgatgccgatgacatggtgacccgattggcctgtatgcgcgctgccgggacaatctgtctgggtggattgatcgtgatcaagttcaccgaagccgatgtcgtactgcgtccacagacggtgctggaccggcatcccaacgccatgacgatcgttgctctcgcccgcgacggaaccaagctcgccgccgagacttattattcggtcggtggcggatttgtcgtggcacacggcgatccacccgagggcgcggaatggaccactggtggggtgtcctttggctcggcgggtgagttgttagaattggcggccacgcgaggaatgtcaatctgcgagttgatggccgagtacgagcaaagcctgaggtccgagcaggaggtacgtgccggtctgctaaatattcgtgacgtcatgacgcaatccgttcagcgtggtattgctcagggcggctacctgcctggtgggctgaaagtgcgtcgccgcgcacattcctggcacgagcggctgtgtgccgaggatccgaatcgcgatccagtgttcgccgaggactgggtgaacctggtcgcgctggcagtcaacgaggagaatgccgtgggcggaagagtggtcaccgctccgactaacggtgcggcgggcatcattcccgctgttttgcattatgcacagcattactgtcccgctgggcgggcagacccagacgatacaagtgtgcggtttttgttaactgcgggggcaattggttcgctgtacaaggagcttgcgtctatctccggcgcggaggtcggttgccaaggtgaggtggggtcggcggcttctatggccgctgcgggcttggctgaaatccttggtggcacaccggctcaggtcgagaacgcggctgagattgcgatggaacacagtctcggtttaacctgtgacccgatcgccggtctggtccagattccgtgcatcgaacgcaatgccatctcggccggcaaagcgatcaatgccgctcggatggctatgcgtggcgacggtacccaccgggtgagccttgacgaggtgatcgccaccatgagggcaaccggccgggacatgaatttcaagtacaaggagactgccgcgggcggactcgccctcgcggtcaacatcgtcgaatgctga

SEQ ID NO: 8060 - protein, 458 aa, Mycobacterium leprae TN
MTISVFDLFTIGIGPSSSHTVGPMRAAARFVDGLAANGLLEDVCDIRVELFGSLAATGAGHGTMSAILLGLEGEHPERLDADDMVTRLACMRAAGTICLGGLIVIKFTEADVVLRPQTVLDRHPNAMTIVALARDGTKLAAETYYSVGGGFVVAHGDPPEGAEWTTGGVSFGSAGELLELAATRGMSICELMAEYEQSLRSEQEVRAGLLNIRDVMTQSVQRGIAQGGYLPGGLKVRRRAHSWHERLCAEDPNRDPVFAEDWVNLVALAVNEENAVGGRVVTAPTNGAAGIIPAVLHYAQHYCPAGRADPDDTSVRFLLTAGAIGSLYKELASISGAEVGCQGEVGSAASMAAAGLAEILGGTPAQVENAAEIAMEHSLGLTCDPIAGLVQIPCIERNAISAGKAINAARMAMRGDGTHRVSLDEVIATMRATGRDMNFKYKETAAGGLALAVNIVEC

SEQ ID NO: 8061 - DNA, 1467 bp, Agrobacterium tumefaciens str. C58
  CDS (1)..(1467): transl_table=11
ttgtggcgatccgctgcagctttggatatgatgggtagaaatccaatatgcagggtatatttcatgtttctttcggtcttcgacgtcttcaagatcggtatcggtccttccagctcccatacgatggggccgatgacggctgcaaaccgctttctggcgctgatcctcagtgacgagtggccgcggccggcgggtgcggccgtggcgcagctgaaagtcagcctgcacggatctctcgcctttacgggcatcggccatggcaccgggcgtgccgtcgttctcggtctcaccggcgagcggcctgatcttgtcgatcccgatgcgatggacgccatcatcgagaccgtggaaaaggcaggcacggtcacgccgcccggccacccgtcctatgtgttccgcccggccgaagatctggtttttgacaagaagaacccgctgcccggccatgccaacggcatgatcttttccgccttcgacaatcagggcaggctgctcatcaagcgcatctattattccgtcggcggcggtttcgtcgtgaccgatacggaactggaggcgatcaagcagcgcggaaagaccatcgataatggtccgcgcgtgccttatccctttgcgtccgcgcgggaaatgctcgatatggctacccgttccggccgcaccatcgcccagatgaagcgtgccaacgaggaaacggtcgtctcacgcgacgagctgaacgagcggctcgatcaaatctgggaggcaatgaacggttgcatcgaacgtggtctgaaggtggatggtatcatgcccggaggcctcaaggtgcgccgccgtgcccgttccatctatgagaaactcaatgaggagtggcgcagcaaccggctcaaccccgtcatggcgaatgactggctcagtgtttacgccatggccgtgaacgaagagaacgccgccggcgggcgtgtcgtcacggcgccgaccaatggtgcggcgggcgtcgtgcctgccactgtcagatatttccggcattttcacgaggatgcgactgtcgacgacgtgcgtgacttcctgctgacggcggcggccatcggcggcatcatcaagcataatgcttccatttcgggcgcagaggtgggctgtcagggcgaggtgggttcggctgctgcaatggcagcggcggggcttgctgccgtcatgggcggatcacctgaacagatcgaaaatgctgccgaaatcgcgcttgaacatcaccttggcatgacctgcgatccgattgcgggactggtgcaggtgccctgcatcgagcgcaacgcactgggtgccgtcaaggcagtgacggcggcctcgctggcattgaagggcgacgggcaacatttcgtgccgctcgatgcctgtatcgagaccatgcgccagaccggcaatgacatgagtgaaaaatacaaggaaacctccaccggcggcctcgccgtcaacgttgtggagtgctga

SEQ ID NO: 8062 - protein, 488 aa, Agrobacterium tumefaciens str. C58
MWRSAAALDMMGRNPICRVYFMFLSVFDVFKIGIGPSSSHTMGPMTAANRFLALILSDEWPRPAGAAVAQLKVSLHGSLAFTGIGHGTGRAVVLGLTGERPDLVDPDAMDAIIETVEKAGTVTPPGHPSYVFRPAEDLVFDKKNPLPGHANGMIFSAFDNQGRLLIKRIYYSVGGGFVVTDTELEAIKQRGKTIDNGPRVPYPFASAREMLDMATRSGRTIAQMKRANEETVVSRDELNERLDQIWEAMNGCIERGLKVDGIMPGGLKVRRRARSIYEKLNEEWRSNRLNPVMANDWLSVYAMAVNEENAAGGRVVTAPTNGAAGVVPATVRYFRHFHEDATVDDVRDFLLTAAAIGGIIKHNASISGAEVGCQGEVGSAAAMAAAGLAAVMGGSPEQIENAAEIALEHHLGMTCDPIAGLVQVPCIERNALGAVKAVTAASLALKGDGQHFVPLDACIETMRQTGNDMSEKYKETSTGGLAVNVVEC

SEQ ID NO: 8063 - DNA, 1401 bp, Sinorhizobium meliloti 1021
  CDS (1)..(1401): transl_table=11
atgtttctttccgtcttcgacgttttcaagatcggtatcggtccatcgagctctcacacgatggggcccatgtcggcggccaacaggtttctcgatctcatcctgtcggatgaatggccgcgaccgtctcacgcggctgtcggcgccatcaaggtaagcctccatggttcgctggcgcatacaggcatcggccatggaacgggcagggcggtcattctcggcctgatgggcgagcggccggatctcgtcgagccggacgggatggacgggatcatcgagcaggtggagcgtacgggccgcatcaccccgcccggtcacgcgggctatatgttccagccgaaaaccgatctcgtcttcgacaagaagacgccgctgccgggtcatgcaaacggcatgtccttctccgccttcgaccgggacggccggctccttctgaaacgcatctactattcgatcggcggcggcttcgtggtgaccgatacggaactggacgcgatgagggcccagaagaacaagcccgccggcgtaaaggtgccctatccctttgccacggcccagcagatgctcgacatggccgcgcgctccgggctgacgatcgcccagatgaagcgggcgaacgaagagtgcaggatgtcgagggacgagctcgacgccgggctcgaccgcatctggacggcgatgagcagttgcatcgatcgcggcctcagccaggacggcatcatgcctggtgggctgaaggtgcgccggcgcgcccgggcgatccatgacaagctgcaggaggaatggcgctccaacaagaccaatcctctcctcgcaaatgattggttgagcgtctatgccatggcggtcaatgaggagaatgctgccggcggccgggtggtgacttcgccgaccaacggcgcggccggcgtcgttccggcgacgatccgctactatctgcatttccacgacgatgccgatcaggaaggcatccgggattacctgctgaccgcagcggcgatcggcggtatcatcaagcacaacgcctcgatttcaggcgcggaggtgggctgtcagggcgaagtcggatcggcgtcggcgatggccgcggcgggtcttgctgccgtcatgggcggaacgcccgagcagatcgagaatgcggccgagatcgcgctcgaacaccatctcggaatgacctgcgatccggtcgcaggtctcgttcaggtgccgtgcatcgaacgcaatgcccttggtgccgtcaaggcggttacggccgcttcgctcgcactcaagggcgacggcaagcatttcgtgccgctcgatgcctgtatagagacgatgcgccagaccggcgcggacatgaacgagaagtacaaggaaacatcgaccgggggtctcgccgtcaacgtggtcgagtgctga

SEQ ID NO: 8064 - protein, 466 aa, Sinorhizobium meliloti 1021
MFLSVFDVFKIGIGPSSSHTMGPMSAANRFLDLILSDEWPRPSHAAVGAIKVSLHGSLAHTGIGHGTGRAVILGLMGERPDLVEPDGMDGIIEQVERTGRITPPGHAGYMFQPKTDLVFDKKTPLPGHANGMSFSAFDRDGRLLLKRIYYSIGGGFVVTDTELDAMRAQKNKPAGVKVPYPFATAQQMLDMAARSGLTIAQMKRANEECRMSRDELDAGLDRIWTAMSSCIDRGLSQDGIMPGGLKVRRRARAIHDKLQEEWRSNKTNPLLANDWLSVYAMAVNEENAAGGRVVTSPTNGAAGVVPATIRYYLHFHDDADQEGIRDYLLTAAAIGGIIKHNASISGAEVGCQGEVGSASAMAAAGLAAVMGGTPEQIENAAEIALEHHLGMTCDPVAGLVQVPCIERNALGAVKAVTAASLALKGDGKHFVPLDACIETMRQTGADMNEKYKETSTGGLAVNVVEC

SEQ ID NO: 8065 - DNA, 1389 bp, Caulobacter crescentus CB15
  CDS (1)..(1389): transl_table=11
atgaccgcctccgtcttcgacctcttcaagctcggcgtcggcccgtcgagcagccacaccatggggccgatgacggccgccgtgctgttcatcggccgcctgcgcgacgccggtaaactggccgccgtcgcgcgggtggagacgcggctctacgcctcgctggccctgaccggtcgcggtcacgccaccgatcgcgcggtgatcctgggtctgatgggcttcgtgcccgctgacctcgatcccgacgcgggtgaagcggcgctgctggactgtcaggccagccagtcgctgaagctgggcggtgaggtcgatatcgccttcgacgaggcgcgagacatcgtctggctgggccatgagcgcctgccgcagcatcccaacgccctgaccttcgccgcctatgacaaggccggtcaggtcctggccgagcgcacctatttctcgatcggcggcggctttgtccgtgacgaggccgagatgggccgcaacgccccgccagacgaaggccccgccatccccttcccgttcgaaagcgccgccgacctgctggaacgcgccgagcaggcgggtctctccatcgccgaggtcatggccgccaacgagcgcgcgcggatgagccagggcgagatggacgccggcctcgaccgcatcttcggcgccatggaggcctgtatcgatcgcggcatgcgccaggagggcgtcctgccgggcggcctcaccgtcaagcgccgcgcccgccagatccatcagaccatccagggccggatggagcgccagatgagcgatccgctggcggcgatggacttcgtcaacctgtgggccatggcggtcaacgaagagaacgccgccggcggccgcgtcgtcaccgccccaaccaacggcgcggcggggctgatcccggccgtgctgcggttcttcgtcaggttctacaagggcacgcccgagcagatccgcacgttcctgctgaccgccgcggcgatcggcgcgctctacaaacgcaacgcctcgatcagcggcgccgaggtcggctgccagggcgaggtgggcgtggcctgctcgatggcggcggcgggcctggcggccgcgctgggcgggaccaacgcccagatcgagaacgccgccgagatcggcatggagcacaatctcggcctcacctgcgacccgatcgggggtctggtgcagatcccctgcatcgagcgcaacgccatgggcgccatcaaggccatcgacgccgcccgtctggccttgctgggcgacggccagcactcggtgtcgctggacaaggtgatcgccaccatgaagcgcaccggcgaggacatgaacgagatctacaaggaaacctcgatggggggtctggcggtgggtctgtcggtgaaccgggtggagtgttga

SEQ ID NO: 8066 - protein, 462 aa, Caulobacter crescentus CB15
MTASVFDLFKLGVGPSSSHTMGPMTAAVLFIGRLRDAGKLAAVARVETRLYASLALTGRGHATDRAVILGLMGFVPADLDPDAGEAALLDCQASQSLKLGGEVDIAFDEARDIVWLGHERLPQHPNALTFAAYDKAGQVLAERTYFSIGGGFVRDEAEMGRNAPPDEGPAIPFPFESAADLLERAEQAGLSIAEVMAANERARMSQGEMDAGLDRIFGAMEACIDRGMRQEGVLPGGLTVKRRARQIHQTIQGRMERQMSDPLAAMDFVNLWAMAVNEENAAGGRVVTAPTNGAAGLIPAVLRFFVRFYKGTPEQIRTFLLTAAAIGALYKRNASISGAEVGCQGEVGVACSMAAAGLAAALGGTNAQIENAAEIGMEHNLGLTCDPIGGLVQIPCIERNAMGAIKAIDAARLALLGDGQHSVSLDKVIATMKRTGEDMNEIYKETSMGGLAVGLSVNRVEC

SEQ ID NO: 8067 - DNA, 1365 bp, Salmonella typhimurium LT2
  CDS (1)..(1365): transl_table=11
gtgattagcctattcgacatgtttaaggtagggattggtccctcctcttcccacactgttggcccgatgaaggccggtaaacagttcgtcgatgacctggtcgaaaaaggattactggataacgttacccgcgtcgctgtcgatgtctacggctcgctgtcgctgacggggaaaggtcaccataccgatatcgccattattatgggtctggcgggtaatgaacccgctaccgtggatattgatagtatccccggttttattcgcgacgtcgaaacgcgcgagcgtctgttactggcccagggacgtcacgaagtcgacttcccgaaagatgacggaatgcgttttcacaacggcaatttgccgctgcatgaaaacgggatgcagatccacgcctggcatgacgacacggtcatttatagcaagacgtactattccatcggcggcggctttatcgttgatgaagagcatttcggccaggaagcgacgaatgaggttactgtaccttatccgtttaaatcggcgaaagaaatgctggagtattgcaacagtaccggcctttcactctccggcatggtgatgcaaaacgaactggcgctgcatagcaagaaagagattgaagagtatttcggtcacgtctggcagaccatgcaggcctgtattgatcgtggtatgaataccgaaggcgtgctgccggggccgctgcgcgtaccgcgtcgcgcctctgcgctgcgtcgtatgctggtttccagcgataagctttccagcgatccgatgaacgtcattgactgggtgaacatgtttgctctggcggtgaacgaagagaacgccgcaggcggccgcgtcgtgacggcgccaaccaacggcgcgtgcggtatcgttcctgcggtactggcttactacgaccattttattgaatcagtcagcccggatatttacacccgctacttcctggcggcaggcgctattggcgcgctgtataagatgaacgcgtctatttccggcgcggaagtcggctgtcagggcgaagtcggggtcgcctgttcgatggcggcggcaggccttgctgaactgttgggcgccagcccggagcaggtttgcgttgccgctgaaatcggcatggagcataacctggggctgacctgcgacccggttgccggtcaggtgcaggtgccgtgtatcgagcgtaacgccattgcttcggttaaagcgatcaacgctgcgcgtatggccatgcgtcgaaccagcgcgccgcgcgtctcgttggataaagtcatcgaaacgatgtacgagaccggaaaagacatgaacgcaaaataccgcgaaacgtcgcgcggcgggttggctattaaagtccagtgtgattaa

SEQ ID NO: 8068 - protein, 454 aa, Salmonella typhimurium LT2
MISLFDMFKVGIGPSSSHTVGPMKAGKQFVDDLVEKGLLDNVTRVAVDVYGSLSLTGKGHHTDIAIIMGLAGNEPATVDIDSIPGFIRDVETRERLLLAQGRHEVDFPKDDGMRFHNGNLPLHENGMQIHAWHDDTVIYSKTYYSIGGGFIVDEEHFGQEATNEVTVPYPFKSAKEMLEYCNSTGLSLSGMVMQNELALHSKKEIEEYFGHVWQTMQACIDRGMNTEGVLPGPLRVPRRASALRRMLVSSDKLSSDPMNVIDWVNMFALAVNEENAAGGRVVTAPTNGACGIVPAVLAYYDHFIESVSPDIYTRYFLAAGAIGALYKMNASISGAEVGCQGEVGVACSMAAAGLAELLGASPEQVCVAAEIGMEHNLGLTCDPVAGQVQVPCIERNAIASVKAINAARMAMRRTSAPRVSLDKVIETMYETGKDMNAKYRETSRGGLAIKVQCD

SEQ ID NO: 8069 - DNA, 1368 bp, Salmonella typhimurium LT2
  CDS (1)..(1368): transl_table=11
atggagagttgccttgatatattcaaaatagtaataggtccatccagctcacgtaccgtagggccgatgcgcgccgcctgtcactttatttcattgctcagagaacaagagacgttaccgctaattcgggaaattgaaatcgagctgtatggcgcgttatcgttaagccgcaagtgccacaatgtggataccgccctttatcttgggctgctgggttgccagccggagaatgtcgatctccgttcgtatatggcggtgattaagcgtgcggaaaatgaaaacaaaatcgaactcccgctctccgacgcgggcggaatcacgataaaagtcaagattatcgccaatcaccaggcgcatccaggccatccttatgccatgacgtttcgcgccagagatgattatttcacggtgtatgaagagacctggttttcgaccggcgccggacaggttcgcaaacatggcgagccgctgacgccatcgcttcctttgcgtacagtgtcgccctttgaatttagtcatgccgcgcagttgctggcgctgtgtcggcgtaacggcctgtccgtggcggcgctgatgatgaaaaatgagctgtgccgccactcgccacagacgttgcagaattatctggcgcaaatatgggacgtgatgcagcaggcggtttatcgcggcctgcatactgagggggtattacccggcccctatcaggtaccgcggcgcgcctgcgcgttacataagacgttacaggctaatcgctccgccagcgattttttaaccgcgctgaactgggtcaatgccttcgcgattgcggtaagcgaagaaaatgccagcggcggacagattgttaccgcgccaaccaatggtgcgtgcggcatcattccggcagcgctttgctggtatgataaatttgtcacgccgctggagcccggtgctctgacccgtttcttcctgaccgccgccgctatcgcgatgttgtttaaacaaaacgcctctattctgggatctgaagttggctgtcagggggaaatcggcgtggcgtgctcaatggcggcggcgggcctggctgaactaatgggcgcatccgtggagcaaacgctgagcgccgctgaaattgccatggaacatcatctgggattgacctgcgatccgctgggcggacaggtacaaattccctgcatagagagaaatgctatctctgccgtgaaagcgataaacgcggcgacgatggcgatgagtcgcgtaagcgaaccctgtatttcgctcgatgagatcattgctgcgatgtacgagaccggtaaagacatgagcgctaaataccgtgaaacgtatcatggttcgctggggaaaattcagccgcgcaagagagggtaa

SEQ ID NO: 8070 - protein, 455 aa, Salmonella typhimurium LT2
MESCLDIFKIVIGPSSSRTVGPMRAACHFISLLREQETLPLIREIEIELYGALSLSRKCHNVDTALYLGLLGCQPENVDLRSYMAVIKRAENENKIELPLSDAGGITIKVKIIANHQAHPGHPYAMTFRARDDYFTVYEETWFSTGAGQVRKHGEPLTPSLPLRTVSPFEFSHAAQLLALCRRNGLSVAALMMKNELCRHSPQTLQNYLAQIWDVMQQAVYRGLHTEGVLPGPYQVPRRACALHKTLQANRSASDFLTALNWVNAFAIAVSEENASGGQIVTAPTNGACGIIPAALCWYDKFVTPLEPGALTRFFLTAAAIAMLFKQNASILGSEVGCQGEIGVACSMAAAGLAELMGASVEQTLSAAEIAMEHHLGLTCDPLGGQVQIPCIERNAISAVKAINAATMAMSRVSEPCISLDEIIAAMYETGKDMSAKYRETYHGSLGKIQPRKRG

SEQ ID NO: 8071 - DNA, 1368 bp, Salmonella typhimurium LT2
  CDS (1)..(1368): transl_table=11
atgattagcgtattcgatatttttaaaatcggcattggcccttccagttctcacaccgtcggaccaatgaaagcaggcaagcagttcacggacgatctgattgcccgccatattcttacagatgtcacccgcgtcgtggtggatgtctacggctctctgtcattgacgggtaaaggccaccacactgatatcgccattattatgggcctggcggggaatctgccggacaccgtcgatatcgacgccattccgtcctttatccaggatgtgaacacccatgggcgtttactactggctaatgggcagcatgaagtcgaatttccggtcgataagtgcatgaatttccacgccgacaacctgtctctgcatgagaacgggatgcgtattaccgcgctggcgggcgataaggtgctctacagccaaacctactactccatcggcggcggctttatcgtcgatgaagagcactttggtttgacgaatagcgaacccgttaacgtaccgtacccttacaaaaccgccgcggatttacagcgccactgccaggagacgggtttgtcgctctccggtctgatgatgcaaaacgaactggctctgcacagtaaagaagcgctggagcagcacttcgccagggtctgggaggtgatgcgcagcggtattgagcgcggtatcaccaccgagggcgtattgccgggcaaactgcgcgttccgcgtcgcgcggcggcgctgcgtcggatgctggtcagtcaggataagaccaccaccgatccgatggcggtcgtcgactggatcaatatgttcgcgctagcagtgaacgaagagaatgccgcaggcggacgagtagtcactgccccgactaacggcgcatgtggtattgttccggcggtgctggcgtactatgacaagtttatccgcgaagtaaatgctaactcgcttgctcgctatatgctggtcgccagcgcgattggctcgctgtataagatgaacgcctctatttccggcgccgaagtgggttgtcagggagaggtcggcgtggcctgttccatggcggcagcgggtctggccgagctgctgggcggtagcccggcgcaggtgtgcatcgccgcagaaatcgccatggagcataatctggggttaacttgcgatccggttgccggtcaggtacaggttccctgcattgagcgtaacgcaattgcttcagtcaaagcggtcaacgccgcgcgtatggccgtgcgccgtaccagcgaaccgcgcgtatgcctcgataaagtgattgagaccatgtacgaaaccggtaaagacatgaacgctaagtaccgcgaaacttcgcgcggcggcctggcgatgaagatcgttacctgcgattaa

SEQ ID NO: 8072 - protein, 455 aa, Salmonella typhimurium LT2
MISVFDIFKIGIGPSSSHTVGPMKAGKQFTDDLIARHILTDVTRVVVDVYGSLSLTGKGHHTDIAIIMGLAGNLPDTVDIDAIPSFIQDVNTHGRLLLANGQHEVEFPVDKCMNFHADNLSLHENGMRITALAGDKVLYSQTYYSIGGGFIVDEEHFGLTNSEPVNVPYPYKTAADLQRHCQETGLSLSGLMMQNELALHSKEALEQHFARVWEVMRSGIERGITTEGVLPGKLRVPRRAAALRRMLVSQDKTTTDPMAVVDWINMFALAVNEENAAGGRVVTAPTNGACGIVPAVLAYYDKFIREVNANSLARYMLVASAIGSLYKMNASISGAEVGCQGEVGVACSMAAAGLAELLGGSPAQVCIAAEIAMEHNLGLTCDPVAGQVQVPCIERNAIASVKAVNAARMAVRRTSEPRVCLDKVIETMYETGKDMNAKYRETSRGGLAMKIVTCD

SEQ ID NO: 8073 - DNA, 1365 bp, Salmonella typhimurium LT2
  CDS (1)..(1365): transl_table=11
atgattagcgcatttgatatttttaagattggcattggaccttcaagctcccataccgtagggccaatgaatgcaggaaaatgttttatcgatcggctgatcgacagcggcgacctgccgcgaacgacgcgcatcacggttgatctttacggatcgctatcgctgacgggcaaaggccacgcgaccgataccgccgtcattatgggcctggcgggcaatacgccgcaggatgtcaatattgatagcattccggcgtttatccaggaggttgcccgcagcagccgtttatcggtggcgggtggcgcgcatgtggtggattttcccgtcgccgacagtattttctttcacgctgaaaccctggcgcgccatgaaaacggtatgcgtattaccgcctggaacggacaagcgccgcttttacacaaaacgtattactctattggcggcggctttattgtcgaagaggagcgttttggtcagtcgcacgacgtagaaaaatcggtgccgtatgattttcattccgccagcgaactgttgacgctgtgtgaaagacaggggctctcggtttccggcctgatgatgcaaaatgaactggcgttgcggagcaaagagcagattgacgctggctttgcccgcatctggcaggtgatggcgaccggaattgaacgtggcatgaatactgagggcgtgctgccggggccgctgaacgttccacgccgcgcggtagcgttacggcgtctgctggtctccagcgataatctctcccgcgatccgatgaacgttattgactggattaacatgttcgccctggccgtgagcgaagagaacgcggcgggcgggcgagtggtcaccgcgccgaccaacggcgcgtgcggcattattcctgcggtgctggcctattacgacaaattccgtcgtccggtcaatgccaactctatcgcccgttatctgctgtcggcgggggcgattggtatgctgtacaagatgaacgcctcgatatccggcgcggaagtggggtgtcagggcgaggttggcgtcgcgtgttcgatggcggcggcggggctgacagaactgctgggcggcagcccggcgcaggtctgtattgcggcggaaattgcgatggagcataaccttggcctcacctgtgacccggtggcgggtcaggtacaaatcccttgtattgaacgtaatgcgattaacgccgttaaagcggtaaatgcggcgcgaatggcgctacgccgtacctctgaaccgcgggtttcgctcgataaagtaatcgaaaccatgtacgaaacgggtaaagacatgaacgacaaatatcgcgagacgtcgcgcggcggtctggcgattaaagtcgtttgtggatag

SEQ ID NO: 8074 - protein, 454 aa, Salmonella typhimurium LT2
MISAFDIFKIGIGPSSSHTVGPMNAGKCFIDRLIDSGDLPRTTRITVDLYGSLSLTGKGHATDTAVIMGLAGNTPQDVNIDSIPAFIQEVARSSRLSVAGGAHVVDFPVADSIFFHAETLARHENGMRITAWNGQAPLLHKTYYSIGGGFIVEEERFGQSHDVEKSVPYDFHSASELLTLCERQGLSVSGLMMQNELALRSKEQIDAGFARIWQVMATGIERGMNTEGVLPGPLNVPRRAVALRRLLVSSDNLSRDPMNVIDWINMFALAVSEENAAGGRVVTAPTNGACGIIPAVLAYYDKFRRPVNANSIARYLLSAGAIGMLYKMNASISGAEVGCQGEVGVACSMAAAGLTELLGGSPAQVCIAAEIAMEHNLGLTCDPVAGQVQIPCIERNAINAVKAVNAARMALRRTSEPRVSLDKVIETMYETGKDMNDKYRETSRGGLAIKVVCG

SEQ ID NO: 8075 - DNA, 1377 bp, Ralstonia solanacearum GMI1000
  CDS (1)..(1377): transl_table=11
atggctgtttctgttttcgacctcttcaagatcggcatcggcccgtccagctcgcacacggtcggcccgatgcgcgccgcgctgatgttcgcctccggcctggaggccgatggcctgatgccgcaaatcgccagcgtgcgcgtcgaactgtatggctcgctcggcgccaccggcaagggccacggcaccgaccgcggcgtcatcctcggcctgatgggcgaggcgcccgacaccatcgatcccgacaccatcgacgccaagctggccgcgctgcgccagtcgcaatcgctgtcgctgctgggccaccacgcggtgcgcttcaccgagaaggagcacattgccttctaccgccgcgaggccatggccgagcatcccaacggcatgaagttccacgccttcgacgcggccggcgagcggctgcgtgaggcgcgctacctgtcggtgggcggcggcttcgtcgtcacagcgggcgcgcccaacacgcaggtcctgagcgcgcacgaccagctgccccacccgtttcgcagcggccgcgaactgctggcgatgtgcgaatcgacgggcaagtccatcgcccggctgatgctcgaaaacgaactgacctggcgcagcgaggccgaagtgcgcgccggcctgctcaacatctggcacgtgatgcaggcctgcgtggcgcgcggctgccgcaccgagggcgagctgcccgggcccttccacgtgcgccgccgcgccgccgagctatacacgcggctgaccggccaggccgagcgcacgctgtccgacccgctgtcggtcatcgactgggtcaacctgtacgccatcgccgtcaacgaagagaacgccgcgggtgggcgcgtggtcacggcccccaccaacggcgcggccggcatcatccccgccgtgctgcactactacgaccgcttcgtgcccggcgccaatgacaacggcgtggtcgatttcctgctgaccgccggcgcgatcggcatgctctacaagatgaacgcctccatctccggcgccgaggtcggctgccagggcgaagtgggcgtggcctgctcgatggccgcgggcgcgctggccgccgtgctgggcggcacgcccgcgcaggccgagaacgccgccgagatcggcatggagcacaacctcgggctgacctgcgacccggtcggcgggctggtgcagatcccgtgcatcgagcgcaacgcgatggcctccgtgaaagccgtcaatgcggcgcgcatggcgctgcgcggcgacggcacgcactatgtctcgctcgactccgtcatcaaaacgatgcgggagacgggggcggacatgaagaccaaatacaaggagacggcccgggggggattggcggtgaatatcgtcgagtgttga

SEQ ID NO: 8076 - protein, 458 aa, Ralstonia solanacearum GMI1000
MAVSVFDLFKIGIGPSSSHTVGPMRAALMFASGLEADGLMPQIASVRVELYGSLGATGKGHGTDRGVILGLMGEAPDTIDPDTIDAKLAALRQSQSLSLLGHHAVRFTEKEHIAFYRREAMAEHPNGMKFHAFDAAGERLREARYLSVGGGFVVTAGAPNTQVLSAHDQLPHPFRSGRELLAMCESTGKSIARLMLENELTWRSEAEVRAGLLNIWHVMQACVARGCRTEGELPGPFHVRRRAAELYTRLTGQAERTLSDPLSVIDWVNLYAIAVNEENAAGGRVVTAPTNGAAGIIPAVLHYYDRFVPGANDNGVVDFLLTAGAIGMLYKMNASISGAEVGCQGEVGVACSMAAGALAAVLGGTPAQAENAAEIGMEHNLGLTCDPVGGLVQIPCIERNAMASVKAVNAARMALRGDGTHYVSLDSVIKTMRETGADMKTKYKETARGGLAVNIVEC

SEQ ID NO: 8077 - DNA, 1386 bp, Ralstonia solanacearum GMI1000
  CDS (1)..(1386): transl_table=11
atgaacgtcagcgtcttcgatttgttcaagatcggcatcggcccgtccagctcgcatacggtcgggcccatgattgccgcttgccgcttcgcctcgcatattgaagataccaacctgctggggttcgtcaagtatgtgcgggcggaactgtacgggtcacttggcgcaaccggtaaggggcacggtaccgacaaggccgtgctgctcgggctggagggtcacctgcccgatgtgatcgaccccgacctcatcgagtcgcgccttgccgcaatccgtgcgtccaaatcgctgtcgctgctcggcaagcatgccatccgcttcgaggagaaagagcacatcggtttctatcgaaagctgatgagcggcaccagcatcgtgcacccgaacggcatgcggtttcaggcgttcgacgacaacggccagttgctggtcgagaaggagtattactcgatcggcggcggctttgtcgtgaaccgcgatggtgatcgcgtgaacggcgtgcgtgcgacggccgaggtgccgtatccgttccgcaccggcgatgacttgatgcggcagtgtcgcgagcacgggctatcgatcgctgaactgatgttccgcaacgaatgcacgttgcgcgctcctgacgaagtccgtgccggcctgctcactatctggcgcacgatggccgcatgcgtggagcgcggctgcagggccgagggcgagcttcccggcccgatgcgcgtgaggcgccgtgcggctgagctgaacaaccgcctgcgtgcacgatcggaagaatcgctgcgcgacccgctctcgatgctcgactgggtcaacttgtatgcgatggccgtcaacgaggaaaacgcggccggcgggcgcgtcgtcaccgccccgaccaacggcgccgctggcgtgattcccgccgtcctccattactacgtgaagttcgtaccgggctcgaccgacaacggcatcgtcgaattcctgctgaccgccgcggcgatcgggatcatctacaaggagaccgcgtcgatttccggcgcggaagtcggctgccagggcgaggtcggtgtggcgtgctcgatggcggcggccgcgcttgccgcggtgatgggcggcacacccgatcaggtggagaacgccgctgagatcggcatggagcacaacctcggtatgacctgtgacccggtcggcgggctggtgcagattccgtgcatcgagcgcaatgcgatgggcgcgatcaaggcgctcaacgcgtcgcgcatggcgctcaagggcaatggccagcattacgtgtcgctcgactccgtcatcaagacgatgcgcgagaccggtgctgatatgaaaacgaaatacaaggaaacgtcgcgcggcggtttggctgtgaacgtgatcgaatgctaa

SEQ ID NO: 8078 - protein, 461 aa, Ralstonia solanacearum GMI1000
MNVSVFDLFKIGIGPSSSHTVGPMIAACRFASHIEDTNLLGFVKYVRAELYGSLGATGKGHGTDKAVLLGLEGHLPDVIDPDLIESRLAAIRASKSLSLLGKHAIRFEEKEHIGFYRKLMSGTSIVHPNGMRFQAFDDNGQLLVEKEYYSIGGGFVVNRDGDRVNGVRATAEVPYPFRTGDDLMRQCREHGLSIAELMFRNECTLRAPDEVRAGLLTIWRTMAACVERGCRAEGELPGPMRVRRRAAELNNRLRARSEESLRDPLSMLDWVNLYAMAVNEENAAGGRVVTAPTNGAAGVIPAVLHYYVKFVPGSTDNGIVEFLLTAAAIGIIYKETASISGAEVGCQGEVGVACSMAAAALAAVMGGTPDQVENAAEIGMEHNLGMTCDPVGGLVQIPCIERNAMGAIKALNASRMALKGNGQHYVSLDSVIKTMRETGADMKTKYKETSRGGLAVNVIEC

SEQ ID NO: 8079 - DNA, 1227 bp, Fusobacterium nucleatum subsp. nucleatum ATCC 25586
  CDS (1)..(1227): transl_table=11
atggatacattaaaagaattatttaaaattggtgcaggaccttcaagttcgcatacaataggacctgaaagagctacaaaaagagtaaaagaaaagtttcctaatgcagatagttatatagttgagctttggggaagtttagctgcaactggaaaaggacactatacagataaaataattatagaaacatttaaaccaattccagttgaaataatttggaaacccgaatttgtccatgaattacataccaatggaatgaaatttattgctcttgataaagataaaaaacaaattggagaatggatagtattttctgttggtggaggaactataagagattatgatgaacttatggataaatcacctaaaaaagaagtttatcctttaaattctatgaaagaaattgttaaatggtgtaaagataataaaaaacaactatggcaatatgttgaagaatgtgaaggtccttctatatggcaacatttaagatacatagatcaagctatgactgatgcagtaaaaagaggtttagaaaaaagtggagatgttcctggaccttttaagtatccaaaaagagctagagaaatgtatgagaaggctttatctaaaagagcttcattaatttttacaaataaagtttttgcctatgctttagcagtatcagaagaaaatgctagtatgggacaagttgtaactgctccaacttgtggtgcatctggagttatccctggtgtattaagaggaatgaaagaagaatacgaattagttgaaaagcatattttaagaggtttggctattgctggacttattggaaatttagttaaatacaatgcaactatttcaggagctgaaggaggttgccaagcagaagttggaacagcatgctcaatggcagcagctatggcaacatattttatggggggaaatactgaccaaatagaatatgcagctgaaagtgctatggaacatcatttaggtatgacttgtgaccccgttggaggttatgtgattattccttgtatagagagaaatgctatctgtgctgtaagagcaataaatacagcaacttattgtatgtctactgatggaaaacatactatcagttttgatgaagttattaagactatgaaagaaactggaaaagatatgtgttctgcatataaagaaacttctgatggtggacttgcaaaatactatgatagaattttggtggatagtaaagaataa

SEQ ID NO: 8080 - protein, 408 aa, Fusobacterium nucleatum subsp. nucleatum ATCC 25586
MDTLKELFKIGAGPSSSHTIGPERATKRVKEKFPNADSYIVELWGSLAATGKGHYTDKIIIETFKPIPVEIIWKPEFVHELHTNGMKFIALDKDKKQIGEWIVFSVGGGTIRDYDELMDKSPKKEVYPLNSMKEIVKWCKDNKKQLWQYVEECEGPSIWQHLRYIDQAMTDAVKRGLEKSGDVPGPFKYPKRAREMYEKALSKRASLIFTNKVFAYALAVSEENASMGQVVTAPTCGASGVIPGVLRGMKEEYELVEKHILRGLAIAGLIGNLVKYNATISGAEGGCQAEVGTACSMAAAMATYFMGGNTDQIEYAAESAMEHHLGMTCDPVGGYVIIPCIERNAICAVRAINTATYCMSTDGKHTISFDEVIKTMKETGKDMCSAYKETSDGGLAKYYDRILVDSKE

SEQ ID NO: 8081 - DNA, 1383 bp, Xanthomonas axonopodis pv. citri str. 306
  CDS (1)..(1383): transl_table=11
atggctgtcagcacgttcgacctgttcaagatcggtatcggcccgagttcctcccacaccgtggggccgatgcgcgccgccgagcgcttcgtgcaccgctggctgctcgatgccgggcgcctgcaggatgtggtgcgcatccgcgccgaagtgttcggttcgctcgccctgaccggccgcggccatggcaccgacaaagccgtgctgctggggctggagggccatcgccccaacgtgatcgacccggacatcatccctgccacgctggagcgcattcgcgccagcaagcgcatcgccttgatgggccagcacgccatcgtcttcgacgaaaagcgcgacttgccgatgaacaagcggcagaagctgccgtaccacaccaacggcatgcgctttacggcctatgacgccgacgaagcggtcatcgccacacgcgattactattcggtcggtggcggctttgtcgtcaaccaggacgacgcggccgacgatcgcatcgtggccgacgaaacgccgctgccctacccgttcctcagcggcgacgaactgctggcgcagtgcgcgcgcagcggcctgagcattgccgcactcatgttcgaaaacgagaaaagctggcgcagcgaagacgagatccgtgctggcctgcgcgaactgtggaatgcgatgcagtcctgcgtgacgcgcggcatccgcgaagaaggcacgctaccgggcggcctgaatgtctcccgccgcgcacctgcgctgtatcgcgaactctcctccaagcccgaagcggccatgcgcgatccgttgaccacgctggattgggtcaacctgtacgccctggcagtgaacgaagaaaacgccgccggcggccgggtggtcaccgcgccgaccaatggcgcggccggcatcattcccgcggtgctgcattatttcgaccgtttctgcgcgggcgcctccgagcaacgcatcttcgacttcctgctcactgctgccgccatcggcatcctctacaaggagaacgcctcgatttccggcgccgaagtcggctgccagggcgaagtgggcgtggcctgttcgatggccgcaggcggcctggttgccgcgcttggcggcaacccggggcagatcgaaaacgccgcggagatcggcatggagcacaacctcggcctgacctgcgacccgatcggcgggctggtacagattccgtgcatcgaacgcaacgccatgggcgcagtgaaagccatcaacgccagccgcatggccatgcgcggcgacggcaagcacaaggtctcgctggacaaggtcatcaagaccatgcgcgacaccggtcgcgacatgcaggacaagtacaaggaaaccagccgcggcggcctggcggtgaacgtcatcgaatgctga

SEQ ID NO: 8082 - protein, 460 aa, Xanthomonas axonopodis pv. citri str. 306
MAVSTFDLFKIGIGPSSSHTVGPMRAAERFVHRWLLDAGRLQDVVRIRAEVFGSLALTGRGHGTDKAVLLGLEGHRPNVIDPDIIPATLERIRASKRIALMGQHAIVFDEKRDLPMNKRQKLPYHTNGMRFTAYDADEAVIATRDYYSVGGGFVVNQDDAADDRIVADETPLPYPFLSGDELLAQCARSGLSIAALMFENEKSWRSEDEIRAGLRELWNAMQSCVTRGIREEGTLPGGLNVSRRAPALYRELSSKPEAAMRDPLTTLDWVNLYALAVNEENAAGGRVVTAPTNGAAGIIPAVLHYFDRFCAGASEQRIFDFLLTAAAIGILYKENASISGAEVGCQGEVGVACSMAAGGLVAALGGNPGQIENAAEIGMEHNLGLTCDPIGGLVQIPCIERNAMGAVKAINASRMAMRGDGKHKVSLDKVIKTMRDTGRDMQDKYKETSRGGLAVNVIEC

SEQ ID NO: 8083 - DNA, 1404 bp, Brucella suis 1330
  CDS (1)..(1404): transl_table=11
atgtttctgtcggtttttgatctttacaagattggcatcgggccttccagctcgcataccatggggccgatgacggctgccaatatgttcctcgacgaaattatcggtggggactggccaaagccggccaatgcgaaaatctaccgtctcaaggccagcctgcacggttcgcttgcctataccggcatcggccatgccaccgaccgcgcggtcatccttggcctttgtggataccggcccgatacgatcgatcccgacatcatggatgcggaagtcgcccgtgtggctgcggaaaagacagtgcagccggaaggccatcccgcttatcatttcgatccgaaaaccgatctggtcatggatcgcaagacgccgcttcccggacacgccaacgggatggcattcgaggcttatgaccgggacgaccggcttttgctgcgccgtgcctatttttccattggcggcggtttcgtcgttacagcggaagaactgagccgcgtgcagaccagtggcaacaaggtcgacaacggggccaatgtgccttatccgttccgcaatgcagccgaaatgctcgaaatggctcacgccagcggtctttcgattgcagagatgaagcgcgcaaacgaagaatgttgcatggcgcgcgttgatctggatcatggcctggaccggatatggggcgcgatgcgcgattgcattgagcgtgggctcagccgcgatggtgtcatgccgggcgggttgaatgtgcggcggcgcgcgcgccagttgcatgacaagcttcaggaagactggcgcaacaatcgcagcaacccgctgctcgccaatgactggctgtcggtttacgccatggccgtcaacgaggagaacgcttccggtggcagggtggtgacggcgcccacaaacggagctgcgggtgtggttcccgcagtgctgcgttattatctccatttccatagcgatgcggacgagaagggcattcgcgattttctgctgacatctgccgctattggcggcgtcatcaagcacaatgcatccatttccggtgcggaagtggggtgtcagggcgaagtcggctcggcatcggccatggcggctgcgggccttgcggccgttctgggcggctcgccggagcagattgaaaatgcggcggaaattgcgctggaacatcaccttggcatgacatgcgatccgattgccgggctggttcaggtgccgtgcatcgagcgcaatgcgcttggtgcggtcaaggccgttacggctgcttctcttgcggtcaagggggatggcaagcatttcgtgcctcttgatgcctgcattgaaacaatgcgccagaccggacacgatatgagcgagcgttacaaggaaacgagccagggcgggctggcggtcaacgttgttgcctgctga

SEQ ID NO: 8084 - protein, 467 aa, Brucella suis 1330
MFLSVFDLYKIGIGPSSSHTMGPMTAANMFLDEIIGGDWPKPANAKIYRLKASLHGSLAYTGIGHATDRAVILGLCGYRPDTIDPDIMDAEVARVAAEKTVQPEGHPAYHFDPKTDLVMDRKTPLPGHANGMAFEAYDRDDRLLLRRAYFSIGGGFVVTAEELSRVQTSGNKVDNGANVPYPFRNAAEMLEMAHASGLSIAEMKRANEECCMARVDLDHGLDRIWGAMRDCIERGLSRDGVMPGGLNVRRRARQLHDKLQEDWRNNRSNPLLANDWLSVYAMAVNEENASGGRVVTAPTNGAAGVVPAVLRYYLHFHSDADEKGIRDFLLTSAAIGGVIKHNASISGAEVGCQGEVGSASAMAAAGLAAVLGGSPEQIENAAEIALEHHLGMTCDPIAGLVQVPCIERNALGAVKAVTAASLAVKGDGKHFVPLDACIETMRQTGHDMSERYKETSQGGLAVNVVAC

SEQ ID NO: 8085 - DNA, 1365 bp, Shigella flexneri 2a str. 301
  CDS (1)..(1365): transl_table=11
gtgattagtctattcgacatgtttaaggtggggattggtccctcatcttcccataccgtagggcctatgaaggcgggtaaacagttcgtcgatgatctggtcgaaaaaggcttactggatagcgttactcgcgttgccgtggacgtttatggttcactgtcgctgacgggtaaaggccaccacaccgatatcgccattattatgggtcttgcaggtaacgaacctgccaccgtggatatcgacagtattcccggttttattcgcgacgtaaaagagcgcgaacgtctgctgctggcacagggacggcatgaagtggatttcccgcgcgacaacgggatgcgttttcataacggcaacctgccgctgcatgaaaacggtatgcaaatccacgcctataacggcgatgaagtcgtctacagcaaaacttattattccatcggcggcggttttatcgtcgatgaagaacactttggtcaggatgctgccaacgaagtgagcgtgccgtatccgttcaaatctgccaccgaactgctcgcgtactgtaatgaaaccggctattcgctgtctggtctcgctatgcagaacgaactggcgctgcacagcaagaaagagatcgacgagtatttcgcgcatgtctggcaaaccatgcaggcatgtatcgatcgcgggatgaacaccgaaggtgtactgccaggcccgctgcgcgtgccacgtcgtgcgtctgccctgcgccggatgttagtttccagcgataaactgtctaacgatccgatgaatgtcattgactgggtaaacatgtttgcgctggcagttaacgaagaaaacgccgccggtggtcgtgtggtaactgcgccaaccaacggtgcctgcggtatcgttccggcagtgctggcttactatgaccactttattgaatcggtcagcccagacatctatacccgttactttatggcagcgggcgcgattggtgcattgtataaaatgaacgcctctatttccggtgcggaagttggttgccagggcgaagtgggtgttgcctgttcaatggctgctgcgggtcttgcagaactgctgggcggtagcccggaacaggtttgcgtggcggcggaaattggcatggaacacaaccttggtttaacctgcgacccggttgcagggcaggttcaggtgccgtgcattgagcgtaatgccattgcctctgtgaaggcgattaacgccgcacggatggctctgcgccgcaccagtgcaccgcgcgtctcgctggataaggtcatcgaaacgatgtacgaaaccggtaaggacatgaacgccaaataccgcgaaacctcacgcggtggtctggcaatcaaagtccagtgtgactaa

SEQ ID NO: 8086 - protein, 454 aa, Shigella flexneri 2a str. 301
MISLFDMFKVGIGPSSSHTVGPMKAGKQFVDDLVEKGLLDSVTRVAVDVYGSLSLTGKGHHTDIAIIMGLAGNEPATVDIDSIPGFIRDVKERERLLLAQGRHEVDFPRDNGMRFHNGNLPLHENGMQIHAYNGDEVVYSKTYYSIGGGFIVDEEHFGQDAANEVSVPYPFKSATELLAYCNETGYSLSGLAMQNELALHSKKEIDEYFAHVWQTMQACIDRGMNTEGVLPGPLRVPRRASALRRMLVSSDKLSNDPMNVIDWVNMFALAVNEENAAGGRVVTAPTNGACGIVPAVLAYYDHFIESVSPDIYTRYFMAAGAIGALYKMNASISGAEVGCQGEVGVACSMAAAGLAELLGGSPEQVCVAAEIGMEHNLGLTCDPVAGQVQVPCIERNAIASVKAINAARMALRRTSAPRVSLDKVIETMYETGKDMNAKYRETSRGGLAIKVQCD

SEQ ID NO: 8087 - DNA, 1368 bp, Shigella flexneri 2a str. 301
  CDS (1)..(1368): transl_table=11
atgattagcgtattcgatattttcaaaatcggcattggcccttccagttctcataccgttggaccaatgaaagcgggtaaacaatttaccgacgatctgattgcccgtaacctgcttaaagacgtgacccgcgtggtggttgacgtgtacggctcgctctctctgactggtaaaggccaccacacagatatcgccattattatgggcctggcgggtaacctgccggataccgtggatatcgattccatccccggttttattcaggatgtgaatactcatggtcgcctgatgctggcaaacggtcagcatgaagtggagttcccggttgatcagtgcatgaacttccatgcagacaacctttctctgcatgaaaacggtatgcgcattaccgcgctggcgggcgataaagtcgtttacagccagacttactactctattggcggtggctttatcgttgatgaagagcattttggccagcaggatagcgcaccggttgaagttccttatccgtacagttcagcagccgatctgcaaaaacattgtcaggaaaccgggctgtcactctctggcctgatgatgaaaaacgagctggcgctgcacagtaaagaagagctggaacagcacctggcgaacgtctgggaagtcatgcgtggcggtattgagcgcggtatttccaccgaaggcgtgttgcctggcaaactgcgcgttccacgccgtgctgcggcactacgccggatgctggtcagccaggataaaaccaccactgacccgatggcggttgttgactggatcaacatgtttgcactggcagtgaacgaagagaacgctgctggcggtcgcgtggtgactgcgccgactaacggtgcgtgcgggattatcccggctgtgctggcgtactacgataagtttatccgcgaagtgaacgctaactcactggctcgttacctgctggtagccagcgccattggttctctttataagatgaacgcgtcgatttctggtgccgaagtgggttgccagggtgaagttggcgtggcgtgctctatggcggcagctggtctggcagaactgttaggcgcaagcccggcgcaggtttgcatcgcagcggaaatcgcgatggagcacaacctcggtctgacttgtgacccggtcgcggggcaggttcaggtaccgtgcattgagcgtaacgccattgcagcagtgaaagcggtgaacgccgcgcgtatggcactgcgccgtaccagcgaaccgcgcgtctgcctcgataaagttatcgaaaccatgtacgaaacaggtaaagacatgaacgccaagtaccgcgaaacctctcgcggcggcctggcgatgaagatcgttgcctgcgattaa

SEQ ID NO: 8088 - protein, 455 aa, Shigella flexneri 2a str. 301
MISVFDIFKIGIGPSSSHTVGPMKAGKQFTDDLIARNLLKDVTRVVVDVYGSLSLTGKGHHTDIAIIMGLAGNLPDTVDIDSIPGFIQDVNTHGRLMLANGQHEVEFPVDQCMNFHADNLSLHENGMRITALAGDKVVYSQTYYSIGGGFIVDEEHFGQQDSAPVEVPYPYSSAADLQKHCQETGLSLSGLMMKNELALHSKEELEQHLANVWEVMRGGIERGISTEGVLPGKLRVPRRAAALRRMLVSQDKTTTDPMAVVDWINMFALAVNEENAAGGRVVTAPTNGACGIIPAVLAYYDKFIREVNANSLARYLLVASAIGSLYKMNASISGAEVGCQGEVGVACSMAAAGLAELLGASPAQVCIAAEIAMEHNLGLTCDPVAGQVQVPCIERNAIAAVKAVNAARMALRRTSEPRVCLDKVIETMYETGKDMNAKYRETSRGGLAMKIVACD

SEQ ID NO: 8089 - DNA, 1377 bp, Shewanella oneidensis MR-1
  CDS (1)..(1377): transl_table=11
atgattagcgtattcgatatgttcaaaatcggtattggcccttcgagttcacatactgttggccccatgaaagcgggcaaaatttttatgcaacaccttgctgattcagggcagattggccaaattgatgaattaagggcagaactgtttggttcactgggccaaacgggtaaaggccacggcacgggtaaagcagttattttaggattaatgggtgaagatcctgaaaccgtcgatacagatagcatcgatggcattctggaacacgtctcaaaatcggagaccctgacgataagctgcggcaaagtcgttaagtttacccgtgaagacggcatcacctaccacagacgtaaaagtctccctgcccatgccaatgccatgacgctgtatgcctatagcaagggcgaatgtatttttgagcgcacctactactccgttggtggtggctttatcttagatgaagatgaaatcaatcagcgcaatgcctcgcctgcatcgcaaatagaatcggcgccctacgattttaatagcagcgcgcagttactcgaactctgtactgaacatggtctgagtatttcttccttaatgatggcgaacgaattaagccttgccagtgaagaagaagtcaaagccaagctgtggaatatttggcaaaccatgaagacctgtatcgaacgtggttaccaaaaagaaggcattttgccaggcggcctaaaactgcgtcgccgagctccggccctgtatcgtcgtcttaaagcggaaggtcgcaacaatgttgatccattaaccgcaatggattgggtcgacttattcgccttatcggttaatgagcaaaatgcggccggcgatcgcgtcgtcaccgccccgactaacggtgcggcgggcattattcctgcggtgctttgttactacgataccttcgtacaagaagtcgatatcgatgtatgcgcccgttacctattaaccgccgcagcgattggtattctgtacaagaaaaatgcctcgatctccggtgcagaagtgggctgtcaaggtgaagtcggcgttgcctgctctatggcagcaggtgccttaaccgagattatgggcggcacagttgagcatgttgaaaacgcggccgaaatcgggatggagcacaacctaggtttaacctgcgatcccgttggcggcttggtacaagtcccttgtattgaacgtaatgccatgggcgccatcaaggcgattaacgcatcacgtatggcgctacgcggcgacggtaaccacaaggtgtcactggataaagtgatcaaaaccatgatggacaccggtaaagatatgcgtagtaaatacaaagaaaccgctaagggtggcctcgcggtaaatattgtagagtgttaa

SEQ ID NO: 8090 - protein, 458 aa, Shewanella oneidensis MR-1
MISVFDMFKIGIGPSSSHTVGPMKAGKIFMQHLADSGQIGQIDELRAELFGSLGQTGKGHGTGKAVILGLMGEDPETVDTDSIDGILEHVSKSETLTISCGKVVKFTREDGITYHRRKSLPAHANAMTLYAYSKGECIFERTYYSVGGGFILDEDEINQRNASPASQIESAPYDFNSSAQLLELCTEHGLSISSLMMANELSLASEEEVKAKLWNIWQTMKTCIERGYQKEGILPGGLKLRRRAPALYRRLKAEGRNNVDPLTAMDWVDLFALSVNEQNAAGDRVVTAPTNGAAGIIPAVLCYYDTFVQEVDIDVCARYLLTAAAIGILYKKNASISGAEVGCQGEVGVACSMAAGALTEIMGGTVEHVENAAEIGMEHNLGLTCDPVGGLVQVPCIERNAMGAIKAINASRMALRGDGNHKVSLDKVIKTMMDTGKDMRSKYKETAKGGLAVNIVEC

SEQ ID NO: 8091 - DNA, 1377 bp, Pseudomonas putida KT2440
  CDS (1)..(1377): transl_table=11
atggccatcagcgtgttcgacctgttcaagatcggtgtcgggccctccagctcccacaccgtcggccccatgcgtgctggcgccctgttcgttcagggcctgcgcgaacgcggtgagctggagcgtgtaaaacggatcgaagtgcgcctgtatggctcgctgtcagccaccggtatcggccatggcaccgacaacgccaccatcatgggcctgatgggcgagtggcctgacgccattgacccgacccagatcgtgccgcgtatcgccgacctgcgcgaaaccaacaccctgcagctggatagccgcttgcccatcgagtttgtctgggcccgcgacatgctgctgctggacgagaacctgccctatcaccccaacgccatgaccctaattgccgaaggcgagcagggcgagttgcaccgcgacacctattactcggtgggcggcggctttgtggtcgatgcagcccaagccgccagcggtgtgctggatgctgaccagacagtgctgccgtacgacttcaacagcgccgccgaactgctgcgcctgtgcaagcaaaacgacctcagcgtgtcgcaattgatgatggccaacgagaaggtctggcgcagcgaggaagacatccgcgctggcctgcacaagctctgggaagccatgcaggaatgcgtcaacaacggcctcaagtacgagggcacgctacccggcgggctgaacgtgcgccgccgtgccgccaagctgcaccgcagcctgcaggaaatcggcaagcccaacgtgatcggctcgaccatgagtgccatggaatgggtcaacctgttcgccttggcggtcaatgaagaaaacgccgccggtgggcgcatggtgaccgcgcctaccaacggcgcggcgggcatcatcccggcagtgctgcattactacatgcgcttcagcgatgcggtggatgaatccagcgttgtcgattacttcctggctgccgccgctgtgggcatcctgtgcaagaagaacgcttcgatctctggtgccgaagtgggctgccagggggaagtcggctcggcctgcgcgatggccgcagcggggcttgccgaagtgctcggcgccaccccgccacaggttgagaacgccgctgaaattgccctggaacacaaccttggcctgacctgcgacccggtgggtgggttggtgcaagtgccctgcatcgagcgcaacgcgattgctgcggtgaaggccatcaacgcggtgcagatggccttgcgcggcgatggtgagcacttcatttccctcgaccaggtaatccgcaccatgcgcgataccggcgccgatatgcacgacaagtacaaagagacctcgcgcggcggcctggcggtcagcgctatcgagtgctga

SEQ ID NO: 8092 - protein, 458 aa, Pseudomonas putida KT2440
MAISVFDLFKIGVGPSSSHTVGPMRAGALFVQGLRERGELERVKRIEVRLYGSLSATGIGHGTDNATIMGLMGEWPDAIDPTQIVPRIADLRETNTLQLDSRLPIEFVWARDMLLLDENLPYHPNAMTLIAEGEQGELHRDTYYSVGGGFVVDAAQAASGVLDADQTVLPYDFNSAAELLRLCKQNDLSVSQLMMANEKVWRSEEDIRAGLHKLWEAMQECVNNGLKYEGTLPGGLNVRRRAAKLHRSLQEIGKPNVIGSTMSAMEWVNLFALAVNEENAAGGRMVTAPTNGAAGIIPAVLHYYMRFSDAVDESSVVDYFLAAAAVGILCKKNASISGAEVGCQGEVGSACAMAAAGLAEVLGATPPQVENAAEIALEHNLGLTCDPVGGLVQVPCIERNAIAAVKAINAVQMALRGDGEHFISLDQVIRTMRDTGADMHDKYKETSRGGLAVSAIEC

SEQ ID NO: 8093 - DNA, 1377 bp, Pseudomonas putida KT2440
  CDS (1)..(1377): transl_table=11
atgtcactgagcgtcttcgacctgttcaagatcggcatcggcccctccagctcccacacggtcggcccgatgcgcgccgctgcgcggtttgccgaagggctgcgccgtgacggcctgctggcccgcaccgccagcgtcaaagccgagctgtatggctcactgggcgccacaggcaaaggccacggcagtgacaaagccgtgctgctgggccttgaaggcgaacacccggacattatcgacaccgacagcattcccgcccgcctgcaggtcatccgcgacagcggacacatcaacctgctgggcgaacacagcattgcgttcatcgaaaagcagcacctggcgatgatccgcaagccgttggactaccaccccaacggcatgatcttccgcgcgttcgacgacgcaggcctgcaaatccgaagccgcgagtattactcggtaggcggtggtttcgtggtcgacgaggacgctgccggccatgaccgcatcgtcgaagacaccacggtgctggcctatccgttcaagaccgccaaggcgctcctcggccactgcaccgcgcatgacctgtcggtgagccaggtgatgctggccaatgagtccgcctggcgcccagaagcagaaacccgggccgggctgctgcgcatctggcaggtgatgcaagattgcgtcgcggcaggttgccagcatgagggcatattaccgggagggctcaaggtcaagcgccgcgcgccggccctgtaccgccaactgagcggccacccggaagccagcctgcgtgacgccctgtccgtgctcgactgggtcaacctctacgccttggcggtgaacgaggaaaacgcctacggcggtcgtgtggtcaccgcccctaccaacggcgcagcgggcatcgtcccggcagtccttcactactacatgcgcttcgtcccgggggccagcgaggatggggtggtgcgctttctgctcaccgccgcagccatcggcatcctgtacaaggagaacgcctccatctccggcgccgaagtgggctgccagggcgaggtcggcgtcgcctgctcgatggccgccggggcgctgtgcgaagtgatgggcggcagcgtgcagcaggtggagaacgccgccgaaataggcatggaacacaacctgggcctgacctgcgacccgatcggcggcctcgtacaggtgccctgtatcgagcgcaatgcgatgggctcggtgaaggccatcaacgcggtacgcatggccctgcgcggcgacgggcagcactacgtgtcgctggacaaggtcatccgcaccatgcgccagaccggcgccgacatgaaaagcaaatacaaagagaccgcccgtggcggcctggccgtcaacatcatcgaatgttga

SEQ ID NO: 8094 - protein, 458 aa, Pseudomonas putida KT2440
MSLSVFDLFKIGIGPSSSHTVGPMRAAARFAEGLRRDGLLARTASVKAELYGSLGATGKGHGSDKAVLLGLEGEHPDIIDTDSIPARLQVIRDSGHINLLGEHSIAFIEKQHLAMIRKPLDYHPNGMIFRAFDDAGLQIRSREYYSVGGGFVVDEDAAGHDRIVEDTTVLAYPFKTAKALLGHCTAHDLSVSQVMLANESAWRPEAETRAGLLRIWQVMQDCVAAGCQHEGILPGGLKVKRRAPALYRQLSGHPEASLRDALSVLDWVNLYALAVNEENAYGGRVVTAPTNGAAGIVPAVLHYYMRFVPGASEDGVVRFLLTAAAIGILYKENASISGAEVGCQGEVGVACSMAAGALCEVMGGSVQQVENAAEIGMEHNLGLTCDPIGGLVQVPCIERNAMGSVKAINAVRMALRGDGQHYVSLDKVIRTMRQTGADMKSKYKETARGGLAVNIIEC

SEQ ID NO: 8095 - DNA, 1377 bp, Pseudomonas putida KT2440
  CDS (1)..(1377): transl_table=11
atggctatcagtgttttcgaccttttcaaaattggcatcgggccgtccagttcccataccgtcggcccgatgcgcgcggcggccacctttgcccaggctttgcgtgagcaggggctgctggcccaggtaacgcgcgtgcaagtgcggctgtatggctcgctgtcggccactggggttggccatgccaccgaccgcgcgtgcctgctaggcttgatgggccagtggccggactgtatcgacccgtccacgatcgaatcgcgcatcggccaggtcctgcaagagcactgcctgatgctcgacggcagccatccgctggccttcgactacggccgtgacatgctgctgctcgacgagagcctgccttatcaccccaatgccatgagcctggaagccatggacgggcagcgcagcctgttgagccagacctatttttcggtgggcggcggcttcatcgtcgagcaagccgagatcgatgcgccggcaagcgaaatgaatgccgtgatgctgccttatgagttcgacagtggtgcgcaactgctggtgttgtgcaaggcccacaacctgagcgtggcgcaactgatgatggccaacgaatgcgcctggcgcccggaggccgaggtgcgcgaaggcttgttgcgcatctgggcggccatgcgtgagtgcgtggcgaacggcctgcgcaacgagggcatcctgccgggcggcttgcacgtcaagcgccgcgccgcgcggttgcatcgcagcctgcaggagctgggcaagcccaacgtgatcggctcgacccttggtgccatggagtgggtcaacctgttcgccttggcggtcaatgaagaaaatgctgccggtgggcgtatggttaccgcgcccaccaacggggcagccggcattatcccggcggtgttgcactactacatgaagttcaaccccaatgcctgcgatgctgatgtggtggacttcctgcttggcgcagcggcggttggcatcctgtgcaaaaagaacgcctcgatttccggtgccgaggtgggttgtcagggggaggtgggctcggcctgttcgatggctgctgccggcctggcgcaggtactgggcgctacgccgccccagcttgaaaacgccgccgaaattgccctggagcacaaccttgggctgacctgcgacccggtgggcggcctggtgcaggtgccgtgcatcgagcgcaatgcgattgctgcggtcaaggcgatcaacgctgtgcagatggcgctgcggggggatggcgagcacttcatctcgctcgatcgggtgatccgcaccatgcgtgatactggcgcggacatgcatgccaattacaaggaaacctcgcgcggcggtttggcggtcgcttttgtcgagtgctga

SEQ ID NO: 8096 - protein, 458 aa, Pseudomonas putida KT2440
MAISVFDLFKIGIGPSSSHTVGPMRAAATFAQALREQGLLAQVTRVQVRLYGSLSATGVGHATDRACLLGLMGQWPDCIDPSTIESRIGQVLQEHCLMLDGSHPLAFDYGRDMLLLDESLPYHPNAMSLEAMDGQRSLLSQTYFSVGGGFIVEQAEIDAPASEMNAVMLPYEFDSGAQLLVLCKAHNLSVAQLMMANECAWRPEAEVREGLLRIWAAMRECVANGLRNEGILPGGLHVKRRAARLHRSLQELGKPNVIGSTLGAMEWVNLFALAVNEENAAGGRMVTAPTNGAAGIIPAVLHYYMKFNPNACDADVVDFLLGAAAVGILCKKNASISGAEVGCQGEVGSACSMAAAGLAQVLGATPPQLENAAEIALEHNLGLTCDPVGGLVQVPCIERNAIAAVKAINAVQMALRGDGEHFISLDRVIRTMRDTGADMHANYKETSRGGLAVAFVEC

SEQ ID NO: 8097 - DNA, 1365 bp, Escherichia coli CFT073
  CDS (1)..(1365): transl_table=11
gtgattagtctattcgacatgtttaaggtggggattggtccctcatcttcccataccgtagggcctatgaaggcgggtaaacagttcgtcgatgatctggtcgaaaaaggcttactggatagcgttactcgcgttgccgtggacgtttatggttcactgtcgctgacgggtaaaggccaccacaccgatatcgccattattatgggtcttgcaggtaacgaacctgccaccgtggatatcgacagtattcccggttttattcgcgacgtagaagagcgcgaacgtctgctgctggcacagggacggcatgaagtggatttcccgcgcgacaacgggatgcgttttcataacggtaacctgccgctgcatgaaaacggtatgcaaatccacgcctataacggcgatgaagtcgtctacagcaaaacttattattccatcggcggcggttttatcgtcgatgaagaacactttggtcaggatgctgccaacgaagtgagcgtgccgtatccgttcaaatctgccaccgaactgctcgcgtactgtaatgaaaccggcttttcgctgtctggtctcgctatgcaaaacgaactggcgctgcacagcaagaaagagatcgacgagtatttcgcgcatgtctggcaaaccatgcaggcatgtatcgatcgcgggatgaataccgaaggcgtactgccaggcccgttgcgcgtgccacgtcgtgcgtcggccctgcgccggatgctggtttccagcgataaactgtctaacgatccgatgaatgtcattgactgggtaaacatgtttgcgctggcagttaacgaagaaaacgccgccggtggccgtgtggtaactgcgccaactaacggtgcctgcggtatcgttccggcagtgctggcttactatgaccactttattgaatcagttagcccggacatctatacccgttactttatggcagcgggcgcgattggtgcactgtataaaatgaacgcgtctatttccggtgcggaagtcggttgccagggcgaagtaggtgttgcctgttcaatggctgctgcgggccttgccgagctgttgggcggtagcccggaacaggtttgtgtggcagcggaaattggcatggagcacaacctcggtctgacctgcgaccccgttgcagggcaagttcaggtgccgtgcattgaacgtaatgccattgcctctgtgaaggcgattaacgccgcacggatggctctgcgccgcaccagtgcaccgcgcgtctcgctggataaggtcatcgaaacgatgtacgaaaccggtaaggacatgaacgctaaataccgcgaaacctcacgcggtggtctggcaatcaaagtccagtgtgactaa

SEQ ID NO: 8098 - protein, 454 aa, Escherichia coli CFT073
MISLFDMFKVGIGPSSSHTVGPMKAGKQFVDDLVEKGLLDSVTRVAVDVYGSLSLTGKGHHTDIAIIMGLAGNEPATVDIDSIPGFIRDVEERERLLLAQGRHEVDFPRDNGMRFHNGNLPLHENGMQIHAYNGDEVVYSKTYYSIGGGFIVDEEHFGQDAANEVSVPYPFKSATELLAYCNETGFSLSGLAMQNELALHSKKEIDEYFAHVWQTMQACIDRGMNTEGVLPGPLRVPRRASALRRMLVSSDKLSNDPMNVIDWVNMFALAVNEENAAGGRVVTAPTNGACGIVPAVLAYYDHFIESVSPDIYTRYFMAAGAIGALYKMNASISGAEVGCQGEVGVACSMAAAGLAELLGGSPEQVCVAAEIGMEHNLGLTCDPVAGQVQVPCIERNAIASVKAINAARMALRRTSAPRVSLDKVIETMYETGKDMNAKYRETSRGGLAIKVQCD

SEQ ID NO: 8099 - DNA, 1371 bp, Escherichia coli CFT073
  CDS (1)..(1371): transl_table=11
gtggatatgattagtgcattcgatattttcaaaattgggattggtccctccagttcgcatactgtggggccaatgaatgccggaaaaagttttattgatcggctggaaagtagcggcttattaaccgcgacgagccatattgtggtcgatctgtacgggtcgttgtcactgacgggcaaaggccatgccacggatgtcgccatcatcatgggactggcaggaaacagtccgcaggatgttgtcattgatgagatccctgcatttatagagttagtgacgcgcagcgggcggttgccggtgacttctggcgcgcatattgttgattttcctgtagcaaagaacattatcttccatcccgaaatgttgcctcgccatgagaacggaatgcggatcactgcctggaagggacaggaagagctattaagcaaaacctattactctgtcggcggcgggtttattgtcgaagaagaacacttcggcctgtcgtacgatgtcgaaacacccgtaccttacgatttccactcagcaggtgaactgctgaaaatgtgtgattacaacggcctgtctatatctggcctgatgatgcacaacgagctggcgctgcgcagtaaagcggaaattgacgcagggtttgcccgtatctggcaagtgatgcatgacggtattgaacgtggaatgaatactgaaggcgtgctgcctggtccgctcaatgtgccgcgccgtgccgtagcgctgcgtcgtcaactggtttccagcgataacatctctaacgatccgatgaatgtcatcgactggatcaacatgtacgcgctagcggttagtgaagaaaacgcagctggcgggcgcgtggtaacggcaccgactaacggtgcgtgcggcattattccggcagtgctggcttattacgataagttccgtcgtccggtaaacgagcggtcaattgcccgctattttctggcagcgggggctattggcgcgctgtataaaatgaacgcctccatctctggcgcggaagtcggctgtcagggggagattggcgtggcctgttcaatggcggcggcagggttaactgaactactgggcggcagtccggcgcaggtatgcaatgcggcggaaatcgcgatggagcataaccttgggctgacctgcgatccggttgccggacaggtacaaatcccgtgcattgaacgtaatgccattaatgccgtgaaagcagtaaacgccgcgcggatggcgatgcgccgcacctcggcaccgcgtgtttcactcgataaagtgatcgagacgatgtatgaaaccggcaaagatatgaacgataaataccgcgaaacatcacgcggaggactggctattaaagtggtctgcggctga

SEQ ID NO: 8100 - protein, 456 aa, Escherichia coli CFT073
MDMISAFDIFKIGIGPSSSHTVGPMNAGKSFIDRLESSGLLTATSHIVVDLYGSLSLTGKGHATDVAIIMGLAGNSPQDVVIDEIPAFIELVTRSGRLPVTSGAHIVDFPVAKNIIFHPEMLPRHENGMRITAWKGQEELLSKTYYSVGGGFIVEEEHFGLSYDVETPVPYDFHSAGELLKMCDYNGLSISGLMMHNELALRSKAEIDAGFARIWQVMHDGIERGMNTEGVLPGPLNVPRRAVALRRQLVSSDNISNDPMNVIDWINMYALAVSEENAAGGRVVTAPTNGACGIIPAVLAYYDKFRRPVNERSIARYFLAAGAIGALYKMNASISGAEVGCQGEIGVACSMAAAGLTELLGGSPAQVCNAAEIAMEHNLGLTCDPVAGQVQIPCIERNAINAVKAVNAARMAMRRTSAPRVSLDKVIETMYETGKDMNDKYRETSRGGLAIKVVCG

SEQ ID NO: 8101 - DNA, 1371 bp, Vibrio vulnificus CMCP6
  CDS (1)..(1371): transl_table=11
atgctgtcgatttttgatatttttaagattggcgttggcccttcaagctctcacaccaatggtcccatgattgcgggttatcagtttacgcaattgttggcaaatgatcttgataaagtgcaacgaattcaggtcgatctctacggttctttatcgctaacaggaaaaggccaccacaccgatcgcgcggtcattttagggctgttaggcaatcgccctgataccatccgtattagcagtgccaatcaagcgatgcgccaagccattcacgaagggcaactctcgctacgtggcgagcgctttattgaattcgactttgccagtgacattctcttccataccgaaaacctaccactgcacgaaaatggcatgaccatcagtgccttcgatgaacagcagcagcgccttcacttcgagacctactactccattggcggcggctttattgcgaccgaagatgaactgaaaaatggcaagcaagaatccgctgtgaaggtggatttcccctttagaaatgccgatgaaatgctagaaatggcggaaaagaacgggcttagccttggaggaatggtgctgcgcaatgagcaaatgttccacaatatggacaccatcgatgccaaagctgagcaaatttggaaagtgatgagcctgtgcatgaagcgcggttttgaaaccgaaggcattcttgacggtggcttgagtgtcactcgccgtgcacccaacttgctgaaaaagctcgaagccaatgccgcgattgaaaatgatccaatggaaatcatggattggattaacttgtttgcctttgccgtcagcgaagaaaacgcggccggtggccaagtggtcacctccccgaccaacggcgcagcaggtgtgattccagcggtgttaatgtactaccacaagttcatcaaagaactcgatactaagcagttgaaagacttccttgccgtatctggtgccattggcattttatacaaaaccaatgcttcgatttcaggagcagaagtgggctgccaaggtgaaattggtgtttcctcctcaatggctgcggcgggattgaccgcattacgcggtggcagcaacgagcaaatttgcattgcagcagaaatcgcgatggaacattcactcggcatgacgtgcgatccgattggtggcttggttcaagtgccgtgcattgaacgcaatgcgatgggcgcaatgaaagcgataaacgcttcgcgcatggccttaaagcgcacaagtaagtgcctcatctcattagataaagttatcgagaccatgtaccaaacgggtaaagatatgaataaaaaatatcgagaaacctcgctcggcggtttggctctgattcacatggcgcctccgtgtgaatag

SEQ ID NO: 8102 - protein, 456 aa, Vibrio vulnificus CMCP6
MLSIFDIFKIGVGPSSSHTNGPMIAGYQFTQLLANDLDKVQRIQVDLYGSLSLTGKGHHTDRAVILGLLGNRPDTIRISSANQAMRQAIHEGQLSLRGERFIEFDFASDILFHTENLPLHENGMTISAFDEQQQRLHFETYYSIGGGFIATEDELKNGKQESAVKVDFPFRNADEMLEMAEKNGLSLGGMVLRNEQMFHNMDTIDAKAEQIWKVMSLCMKRGFETEGILDGGLSVTRRAPNLLKKLEANAAIENDPMEIMDWINLFAFAVSEENAAGGQVVTSPTNGAAGVIPAVLMYYHKFIKELDTKQLKDFLAVSGAIGILYKTNASISGAEVGCQGEIGVSSSMAAAGLTALRGGSNEQICIAAEIAMEHSLGMTCDPIGGLVQVPCIERNAMGAMKAINASRMALKRTSKCLISLDKVIETMYQTGKDMNKKYRETSLGGLALIHMAPPCE

SEQ ID NO: 8103 - DNA, 1362 bp, Vibrio parahaemolyticus RIMD 2210633
  CDS (1)..(1362): transl_table=11
atgattagtgtttttgatatctataaaatcggtgttggtccttcaagctcacacactgtaggcccaatgaaagcgggtaaagagtttattgatgatcttcgtgcaatgggaaaactgcgcgacatcactaaaatcaccgttgacgtttatggatcactatcactgacagggaaaggtcaccacacagatattgctatcatcatgggtcttgcgggcaactcccctgagaaagttgatatcgattctattccgggcttcatcgctcgcgtagaagaaactgagcgccttcctgttggcatgcactgtcatacagtatcgttcccacgtgaaggtggaatgaacttccacaaaacgaaccttgagctacacgaaaacggcatgcaaatccacgcttggattgatgacgaaaaagtgtactcaaaaacttactactctatcggtggtggcttcatcgttgatgaagagaacttcggtaaagaagctgagaacccaatcaaggttccttacgagttcacaacagctgaagagctggttaaccagtgtaaagaaagcggtctttctatcagcgcgctagtgatgaagaacgaacaagcacttcactcagacgaagaaactcgtacttacttcgcgaacatctggcgcacgatgcgcgaatgtatggatcgcggtatgaacgaagaaggcattctgcctggtccactacgtgtacctcgccgcgcagctgcacttcgtcaacaactgcttacttcagaaaaaaccaccaacgacccaatgtctgttgttgactgggtaaacatgttcgctttcgcagtaaacgaagagaacgcagccggtggccgtgttgttaccgcaccgactaacggcgcttgtggcatcatccctgcggtactggcttactacgataagttcatccaaactgtgactgaaaaagattacatccgttactttgctgcttctggtgcaattggtggtctttacaagcgcaacgcgtcaatctctggtgcagaggttggctgtcagggtgaagttggtgtggcatgttctatggcggcggctggtcttgcagagcttatgggtggtagcccagagcaagtatgtatggcagcagaaatcgcgatggagcacaacctaggtctaacttgtgacccagttgcaggtcaggttcaagttccatgtatcgagcgtaacggtatcgcagctgtaaaagcgatcaactcaactcgtatggcactacgtcgttcttctgctcctactgtatctctagataaagttatcgaaacaatgctagagactggtaaagacatgaacgcgaaataccgcgaaacttctcaaggcggtctagcgatcaaagtgatttgctaa

SEQ ID NO: 8104 - protein, 453 aa, Vibrio parahaemolyticus RIMD 2210633
MISVFDIYKIGVGPSSSHTVGPMKAGKEFIDDLRAMGKLRDITKITVDVYGSLSLTGKGHHTDIAIIMGLAGNSPEKVDIDSIPGFIARVEETERLPVGMHCHTVSFPREGGMNFHKTNLELHENGMQIHAWIDDEKVYSKTYYSIGGGFIVDEENFGKEAENPIKVPYEFTTAEELVNQCKESGLSISALVMKNEQALHSDEETRTYFANIWRTMRECMDRGMNEEGILPGPLRVPRRAAALRQQLLTSEKTTNDPMSVVDWVNMFAFAVNEENAAGGRVVTAPTNGACGIIPAVLAYYDKFIQTVTEKDYIRYFAASGAIGGLYKRNASISGAEVGCQGEVGVACSMAAAGLAELMGGSPEQVCMAAEIAMEHNLGLTCDPVAGQVQVPCIERNGIAAVKAINSTRMALRRSSAPTVSLDKVIETMLETGKDMNAKYRETSQGGLAIKVIC

SEQ ID NO: 8105 - DNA, 1371 bp, Vibrio parahaemolyticus RIMD 2210633
  CDS (1)..(1371): transl_table=11
atgctgtcgattttcgatatttttaaggtcggtgttgggccatccagctcccacactaacggtcctatgctcgccggattccatttcactcaactacttagcgactctatggcgaaagtacgtcgggtgcaagttgacttatatggctctttatcactgactggtagaggacaccacaccgaccgagccacggtgctagggttgatgggcaataagcccgataccatcaaaatgaccagtgccaaaagtgcactgcaacacaccatcgaaaaccataccttatcgttagctggctctcatcaaattgagtttagctacgaccacgacattgtatttcacagcgacaacctgccgctgcatgaaaatggtatgacgatcaccgcgctagatgccgcaggagctcaagtcgcctttgagacgtactactctatcggtggtggctttattgcgacagcggcagagctcgaacatggcggccaacaagccagcgcagaagtacctttccctttttcatccgcagacgaaatgttggaaaaagcagagaaaaatggcctcagccttggtggtatgattctgcaaaatgagctggcatttcgagagcaagaagaaattgaccaaagagctgaacaaatttggaaagtgatgtcactgtgtatgcagcgtggtttcgatactgaagggatccttgaagggggcttgaacgtcactcgccgagctccgaatctgttgaaaaaactagaagcgaatgcagcagttgaaaatgatccaatggagatcatggactggattaacttgtttgcctttgcggtcagcgaagagaacgctgcaggcgggcaagtcgtcacatcaccaactaacggtgccgcaggcgttatcccagcagtattgatgtactaccatcgattcatcaaagagctggatcttaagcaattaaaagactttctcgccgttgctggagcgattggtattttatacaaaaccaacgcgtccatttctggggcggaagtcggctgtcaaggtgaggtgggagtttcctcttctatggcagcggctggcctaaccgccttgcgaggaggcagcaacgagcaaatttgtatcgcagctgaaattgcaatggaacactctctcggtatgacctgcgacccaataggaggactggttcaagtgccttgtattgaacgcaatgcgatgggcgcagtaaaagcgattaacgcatcacgaatggcactaaaacgcactagcaaatgtcttatttcattagataaagttatcgaaaccatgtaccaaactggtaaagacatgaataagaaatatcgcgagacatctctaggtggtttggcaatcatccatatggcaccaccatgtgaataa

SEQ ID NO: 8106 - protein, 456 aa, Vibrio parahaemolyticus RIMD 2210633
MLSIFDIFKVGVGPSSSHTNGPMLAGFHFTQLLSDSMAKVRRVQVDLYGSLSLTGRGHHTDRATVLGLMGNKPDTIKMTSAKSALQHTIENHTLSLAGSHQIEFSYDHDIVFHSDNLPLHENGMTITALDAAGAQVAFETYYSIGGGFIATAAELEHGGQQASAEVPFPFSSADEMLEKAEKNGLSLGGMILQNELAFREQEEIDQRAEQIWKVMSLCMQRGFDTEGILEGGLNVTRRAPNLLKKLEANAAVENDPMEIMDWINLFAFAVSEENAAGGQVVTSPTNGAAGVIPAVLMYYHRFIKELDLKQLKDFLAVAGAIGILYKTNASISGAEVGCQGEVGVSSSMAAAGLTALRGGSNEQICIAAEIAMEHSLGMTCDPIGGLVQVPCIERNAMGAVKAINASRMALKRTSKCLISLDKVIETMYQTGKDMNKKYRETSLGGLAIIHMAPPCE

SEQ ID NO: 8107 - DNA, 1368 bp, Salmonella enterica subsp. enterica serovar Typhi Ty2
  CDS (1)..(1368): transl_table=11
atggagagttgccttgatatattcaaaatagtaataggtccatccagctcacgtaccgtagggccgatgcgcgccgcctgtcactttatttcattgctcagagaacaagagacgttgccgctaattcgggaaattgaaatcgagctgtatggcgcgttatcgttaagccgcaagtgccacaatgtggataccgccctgtatcttgggctgctgggttgccagccggagaatgtcgatctccgttcgcatatggcggtgattaagcgtgcggaaaatgaaaacaaaatcgaactcccgctctctgacgcgggcggaatcacgataaaagtcaagattatcgccaatcaccaggcgcatccaggccatccttatgccatgacgttttgcgccagggatgattattttacggtgtatgaagagacctggttttctaccggcgccgggcaggttcgtaaacatggcgagccgctgacgccatcgcttcctttgcgtacagtgtcgccctttgaatttagtcatgccgcgcagttgctggcgctgtgtcggcgtaacggcctgtccgtggcggcgctgatgatgaaaaatgagctgtgccgccactcgccacagacgttgcagaattatctggcgcaaatatgggacgtgatgcagcaggcggtttatcgcggcctgcatactgagggggtattacccggtccctatcaggtaccgcggcgcgcctgtgcgttacataagacgttacaggctaaccgctccgccagcgattttttaaccgcgctgaactgggtcaatgccttcgcgattgcggtaagcgaagaaaatgccagcggcggacagattgttaccgcgccaaccaatggcgcgtgcggcatcattccggcagcgctctgctggtatgataaatttgtcacgccgctggagcccggtgctctgacccgtttcttcctgaccgccgccgctatcgcgatgctgtttaaacaaaacgcctctattctgggatctgaagttggctgtcagggggaaatcggcgtggcgtgctcaatggcggcggcgggcctggctgaactgatgggtgcatccgtggagcaaacgctgagcgccgctgaaattgccatggaacatcatctgggattgacctgcgatccgctgggcgggcaggtacaaattccctgcatagagagaaatgccatctctgccgtgaaagcgataaacgcggcgacgatggcgatgagtcgcgtaagcgaaccctgtatttcgctcgatgagatcattgctgcgatgtacgagaccggtaaagacatgagcgctaaataccgtgaaacgtatcatggttcgctggggaaaattcagccgcgcaagagagggtaa

SEQ ID NO: 8108 - protein, 455 aa, Salmonella enterica subsp. enterica serovar Typhi Ty2
MESCLDIFKIVIGPSSSRTVGPMRAACHFISLLREQETLPLIREIEIELYGALSLSRKCHNVDTALYLGLLGCQPENVDLRSHMAVIKRAENENKIELPLSDAGGITIKVKIIANHQAHPGHPYAMTFCARDDYFTVYEETWFSTGAGQVRKHGEPLTPSLPLRTVSPFEFSHAAQLLALCRRNGLSVAALMMKNELCRHSPQTLQNYLAQIWDVMQQAVYRGLHTEGVLPGPYQVPRRACALHKTLQANRSASDFLTALNWVNAFAIAVSEENASGGQIVTAPTNGACGIIPAALCWYDKFVTPLEPGALTRFFLTAAAIAMLFKQNASILGSEVGCQGEIGVACSMAAAGLAELMGASVEQTLSAAEIAMEHHLGLTCDPLGGQVQIPCIERNAISAVKAINAATMAMSRVSEPCISLDEIIAAMYETGKDMSAKYRETYHGSLGKIQPRKRG

SEQ ID NO: 8109 - DNA, 1365 bp, Salmonella enterica subsp. enterica serovar Typhi Ty2
  CDS (1)..(1365): transl_table=11
gtgattagcctattcgacatgtttaaggtagggattggtccctcctcttcccacactgttggcccgatgaaggccggtaaacagttcgtcgatgacctagtcgaaaaaggattactggataacgttacccgcgtcgctgtcgatgtctacggctcgctgtcgctgacggggaaaggtcaccataccgatatcgccattattatgggtctggcgggtaatgaacccgctaccgtggatattgatagtatccccggttttattcgcgacgtcgaaacgcgcgagcgtctgttactggcccagggacgtcacgaagtcgacttcccgaaagatgacggaatgcgttttcacaacggcaatttgccgctgcatgaaaacgggatgcagatccacgcctggcatgacgacacggtcatttatagcaagacgtactattccatcggcggcggctttatcgttgatgaagcgcatttcggccaggaagcgacgaatgaggttactgtaccttatccgtttaaatcggcgaaagaaatgctggagtattgcaacagcaccggcctttcactctccggcatggtgatgcaaaacgaactggcgctgcatagcaagaaagagattgaagagtatttcggtcacgtctggcaaaccatgcaggcttgtattgatcgcggtatgaataccgaaggcgttctgccggggccgctgcgcgtaccgcgtcgcgcctctgcgctgcgtcgtatgctggtttccagcgataagctttccagcgatccgatgaacgtcattgactgggtgaacatgtttgctctggcggtgaacgaagagaacgccgcaggcggtcgcgtcgtgacggcgccaaccaacggcgcgtgcggcatcgttcctgcggtactggcttactacgaccattttattgagtctgtcagcccggatatttacacccgctacttcctggcggcaggcgctattggcgcgctgtataagatgaacgcgtctatttccggcgcggaagtcggctgtcagggcgaagtcggggtcgcctgttcgatggcggcggcaggccttgctgaactgttgggcgccagcccggaacaggtttgcgttgccgctgaaatcggcatggagcataacctggggctgacctgcgacccggttgccggtcaggtgcaggtgccgtgtatcgagcgtaacgccattgcttcggttaaagcgatcaacgctgcgcgtatggccatgcgtcgaaccagcgcgccgcgcgtctcgctggataaagtcatcgaaacgatgtacgagaccggaaaagacatgaacgccaaataccgcgaaacgtcgcgcggcgggttggctattaaagtccagtgtgattaa

SEQ ID NO: 8110 - protein, 454 aa, Salmonella enterica subsp. enterica serovar Typhi Ty2
MISLFDMFKVGIGPSSSHTVGPMKAGKQFVDDLVEKGLLDNVTRVAVDVYGSLSLTGKGHHTDIAIIMGLAGNEPATVDIDSIPGFIRDVETRERLLLAQGRHEVDFPKDDGMRFHNGNLPLHENGMQIHAWHDDTVIYSKTYYSIGGGFIVDEAHFGQEATNEVTVPYPFKSAKEMLEYCNSTGLSLSGMVMQNELALHSKKEIEEYFGHVWQTMQACIDRGMNTEGVLPGPLRVPRRASALRRMLVSSDKLSSDPMNVIDWVNMFALAVNEENAAGGRVVTAPTNGACGIVPAVLAYYDHFIESVSPDIYTRYFLAAGAIGALYKMNASISGAEVGCQGEVGVACSMAAAGLAELLGASPEQVCVAAEIGMEHNLGLTCDPVAGQVQVPCIERNAIASVKAINAARMAMRRTSAPRVSLDKVIETMYETGKDMNAKYRETSRGGLAIKVQCD

SEQ ID NO: 8111 - DNA, 1368 bp, Salmonella enterica subsp. enterica serovar Typhi Ty2
  CDS (1)..(1368): transl_table=11
atgattagcgtattcgatatttttaaaatcggcattggcccttccagttctcacaccgtcggaccaatgaaagcaggcaagcagttcacggacgatctgattgcccgccatattcttacagatgtcacccgcgtcgtggtggatgtctacggctctctgtcattgacgggtaaaggccaccacactgatatcgccattattatgggcctggcggggaatctgccggacaccgtcgatatcgacgccattccgtcctttatccaggatgtgaacacccatgggcgtttactactggccaatgggcagcatgaagtcgaatttccggtcgataagtgcatgaatttccacgccgacaacctgtctctgcatgagaacgggatgcgtattaccgcgctggcgggcaataaagtgctctacagccaaacctactactccattggcggcggctttatcgtcgatgaagagcactttggtttgacaaatagcgaacccgttaacgtaccgtatccttataaaaccgccgcggatttacagcgccattgccaggagacgggtctgtcgctctccggtctgatgatgcaaaacgaactggctctgcacagtaaagaagcgctggagcagcacttcgccaaggtctgggaggtgatgcgcagcggtattgagcgcggtatcaccaccgagggcgtattgccgggcaaactgcgcgttccgcgtcgcgcggcggcgctgcgtcggatgctggtcagtcaggataagaccaccaccgatccgatggcggtcgtcgactggatcaatatgttcgcgctggcggtgaacgaagagaatgccgcaggcggacgagtagtcactgccccgactaacggcgcatgtggtattgtgccggcggtgctggcgtactatgacaaatttatccgcgaagtaaatgctaactcacttgctcgctatatgctggtcgccagcgcgattggctcgctgtataagatgaacgcctctatttccggcgccgaagtgggttgtcagggagaggtcggcgtggcctgttccatggcggcagcgggtctggccgagctgctgggcggtagtccggcgcaggtgtgtatcgccgcagaaatcgccatggagcataatctggggctaacttgcgatccggttgccggtcaggtccaggttccctgcattgagcgtaacgcgattgcttcagtcaaagcggtcaacgccgcgcgtatggcgctgcgccgaaccagcgaaccgcgcgtatgcctcgataaagtgattgagaccatgtacgaaaccggtaaagacatgaacgctaagtaccgcgaaacttcgcgcggcggcctggcgatgaagatcgttacctgcgattaa

SEQ ID NO: 8112 - protein, 455 aa, Salmonella enterica subsp. enterica serovar Typhi Ty2
MISVFDIFKIGIGPSSSHTVGPMKAGKQFTDDLIARHILTDVTRVVVDVYGSLSLTGKGHHTDIAIIMGLAGNLPDTVDIDAIPSFIQDVNTHGRLLLANGQHEVEFPVDKCMNFHADNLSLHENGMRITALAGNKVLYSQTYYSIGGGFIVDEEHFGLTNSEPVNVPYPYKTAADLQRHCQETGLSLSGLMMQNELALHSKEALEQHFAKVWEVMRSGIERGITTEGVLPGKLRVPRRAAALRRMLVSQDKTTTDPMAVVDWINMFALAVNEENAAGGRVVTAPTNGACGIVPAVLAYYDKFIREVNANSLARYMLVASAIGSLYKMNASISGAEVGCQGEVGVACSMAAAGLAELLGGSPAQVCIAAEIAMEHNLGLTCDPVAGQVQVPCIERNAIASVKAVNAARMALRRTSEPRVCLDKVIETMYETGKDMNAKYRETSRGGLAMKIVTCD

SEQ ID NO: 8113 - DNA, 1365 bp, Salmonella enterica subsp. enterica serovar Typhi Ty2
  CDS (1)..(1365): transl_table=11
atgattagcgcatttgatatttttaagattggcattggaccttcaagctcccataccgtagggccaatgaatgcaggaaaatgttttatcgatcggctgatcgacagcggcgacctgccgcgaacgacgcgcatcacggttgatctttacggatcgctatcgctgacgggcaaaggccacgcgaccgataccgccatcattatgggtcttgcgggcaatacgccgcaggatgtcaatattgatagcattccggcgtttatccaggaggttgcccgcagcagccgtttatcggtggcgggtggcgcgcatgtggtggattttcccgtcgccgacagtattctctttcacgctgaaaccctggcgcgccatgaaaacggtatgcgaattaccgcctggcacgggcaaacgccgcttttacacaaaacgtattactctattggcggcggctttattgtcgaagaggaacgttttggtcagtcgcacgacgtagaaaaatcggtgccgtatgattttcattccgccagcgaactgctgacgctgtgtgaaaggcaggggctctcggtttccggcctgatgatgcaaaatgaactggcgttgcggagcaaagagcagattgacgctggctttgcccgcatttggcaggtgatggcgaccggaattgaacgtggcatgaatactgagggcgtgctgccggggccgctgaacgtcccacgccgcgcggtagcgttacggcgtctgctggtctccagcgataatctctcccgcgatccgatgaacgtcatcgactggattaacatgttcgccctggccgtgagcgaagagaacgcggcgggcgggcgagtggtcaccgcgctgaccaacggcgcgtgcggcattattcccgcggtgctggcctattacgacaaattccgtcgtccggtcaatgccaactctatcgcccgttatctgctgtcggcgggggcaattggcatgctgtacaagatgaacgcctcgatatccggcgcggaagtggggtgtcagggcgaggttggcgtcgcgtgttcgatggcggcggcggggctgacagaactgctgggcggcagcccggcgcaggtctgtattgcggcggaaattgcgatggagcataaccttggcctcacctgtgacccggtggcgggtcaggtgcaaatcccttgtattgaacgtaatgcgattaacgccgttaaagcggtaaatgcggcgcgaatggcgctacgccgtacctctgagccgcgggtttcgctcgataaagtgatcgaaaccatgtacgaaacgggtaaagacatgaacgacaaatatcgcgagacgtcgcgcggcggtctggcgattaaagtcgtttgtggatag

SEQ ID NO: 8114 - protein, 454 aa, Salmonella enterica subsp. enterica serovar Typhi Ty2
MISAFDIFKIGIGPSSSHTVGPMNAGKCFIDRLIDSGDLPRTTRITVDLYGSLSLTGKGHATDTAIIMGLAGNTPQDVNIDSIPAFIQEVARSSRLSVAGGAHVVDFPVADSILFHAETLARHENGMRITAWHGQTPLLHKTYYSIGGGFIVEEERFGQSHDVEKSVPYDFHSASELLTLCERQGLSVSGLMMQNELALRSKEQIDAGFARIWQVMATGIERGMNTEGVLPGPLNVPRRAVALRRLLVSSDNLSRDPMNVIDWINMFALAVSEENAAGGRVVTALTNGACGIIPAVLAYYDKFRRPVNANSIARYLLSAGAIGMLYKMNASISGAEVGCQGEVGVACSMAAAGLTELLGGSPAQVCIAAEIAMEHNLGLTCDPVAGQVQIPCIERNAINAVKAVNAARMALRRTSEPRVSLDKVIETMYETGKDMNDKYRETSRGGLAIKVVCG

SEQ ID NO: 8115 - DNA, 1236 bp, Bacteroides thetaiotaomicron VPI-5482
  CDS (1)..(1236): transl_table=11
atggtattaactaaagcgcacccatccatgaaatcaataaaagaattatacagaatcggcacaggtccttccagcagtcatacaatgggccctcgtaaagctgcagaaatgtttgttgaacgtcacccggatgccgcatctttcaaagtaaccctttatggaagtttggcagctacaggcaaagggcacatgacggatgtggctatcatagatactttacaacctgccgctccggtagaaatcgtatggcaacccaaagttttcctccccttccatccgaacggaatgacgtttgctgctctggatgcagacaacaagatattggaaaactggacggtttacagtatcggtggcggagctttggcagagaataatgacaacccgacaatcgaaagcccggaagtatacggcatgaacaacatgaccgaaatcctgcaatggtgtgaacgtaccggaaaaagttattgggagtatgtcaaggaatgtgagaacgaggatatatgggactatctggcagaagtatgggacacaatgaaagacgctatccaccgaggtctggaagcggaaggtgtattgcccggaccgctgaacttacgtagaaaagcttccacctattatatacgtgctaccggatacaaacaatctctgcaatccagaggactcgttttctcttacgcactggcagtcagcgaagaaaacgcttccggtggaaagatcgtgactgcccctacctgtggttcctgcggagtgatgccggcagtactttatcatttacaaaaaagccgtgacttcagtgacatgcggattcttcgcgccttggctacagctgggctaattggaaacattgtcaagttcaatgcgtccatctccggtgcggaagtaggatgtcagggagaagtcggcgttgcctgcgcgatggcatcagcagcagccaatcaattattcggaggaagtccggcacagattgaatatgctgcggaaatggggctggaacaccacctggggatgacttgcgaccccgtatgcggtctcgttcaaatcccttgtatcgagcggaatgcttatgctgctgcccgtgcactggatgccaatctttattcagcttttacagacggtatgcaccgtgtttctttcgacaaagtggtacaggtaatgaaacaaaccggacatgacctgccctcactgtataaggaaaccagcgaaggaggactggccaaagattatcaacaaatgtaa

SEQ ID NO: 8116 - protein, 411 aa, Bacteroides thetaiotaomicron VPI-5482
MVLTKAHPSMKSIKELYRIGTGPSSSHTMGPRKAAEMFVERHPDAASFKVTLYGSLAATGKGHMTDVAIIDTLQPAAPVEIVWQPKVFLPFHPNGMTFAALDADNKILENWTVYSIGGGALAENNDNPTIESPEVYGMNNMTEILQWCERTGKSYWEYVKECENEDIWDYLAEVWDTMKDAIHRGLEAEGVLPGPLNLRRKASTYYIRATGYKQSLQSRGLVFSYALAVSEENASGGKIVTAPTCGSCGVMPAVLYHLQKSRDFSDMRILRALATAGLIGNIVKFNASISGAEVGCQGEVGVACAMASAAANQLFGGSPAQIEYAAEMGLEHHLGMTCDPVCGLVQIPCIERNAYAAARALDANLYSAFTDGMHRVSFDKVVQVMKQTGHDLPSLYKETSEGGLAKDYQQM

SEQ ID NO: 8117 - DNA, 1368 bp, Coxiella burnetii RSA 493
  CDS (1)..(1368): transl_table=11
atgatcagcgtttttgacttattctccatcgggatcggcccttccagttcgcacacggttggccccatgcgggcagcgaatgaatttgctcgggaattagtgcatcggatgtcggatatcgaccggttgacgattactttgtatggctcattggcttttaccggaaaaggacatggaacggataaggcggttgttatcgggttaatgggggaaagtcccgaaacggtcaatccggactccattgagaatcggataaggaacgttgaaacggaaggccaagtggctttattaaatcaatatcctctcaatttttcccttgcggatgacattatttttaattatcaggaagcttttgatttccatcccaatgccgtggagttcagagcttatgataaaaatgccgccctcatccaaaaatccctttatttttctgtcggtggcggctttattgttaatgatgaacggcgaaatgaattagtaaaaaccgaagatgatgctccctatccgtttaattccgccgcagaactgatggcgcattgccaacagcaatcgctttccattgcagcggttatgctagcgaatgaaaaaacgcgccgcgatgaaaaaaccatttttatgggattaatgcacattgcgacagtgatggaaaattgtattaacaaaggttgccaaacggatggtttcctcgctgggccgctcaatgtgcgtcgccgcgctccctcgctgtatcgcaaattacttgccatcggcccaccgggtgccgcgcatccgcagacgatgaattggttgaatgtgtatgccatggctgttaatgaagaaaatgcggccggcggtcgtgttgtcaccgcgccaactaacggagccgctggcattattcccgccgttttgaattattataaatatttttgtaaggacgcgagcgaaaaaggcgtgattgactttttattaacagccggcgctactggcatgctctacaaaaaaaatgcttctatttctggagcggaaatgggatgccaaggcgaagtgggcgtggcttgttctatggccgccgccggtttagcggctgctttaggcggaactatttttcaagtggaaaatgcagcagaaatcgggatggagcataatttgggactcacgtgcgatcctgttgcaggacttgtgcaaattccttgtatcgaacgcaatgcgatgggttcggtaaaagctgtcaatgcagcgcgtttggcgctggctgaggatggagagcataaaatttcattagatatggtgatcgacaccatgcgtgaaatcggccgtaacatgaatactatttacaaagaaacctcgaaaggcggtttggccgtggcggtgaatatcacggaatgttag

SEQ ID NO: 8118 - protein, 455 aa, Coxiella burnetii RSA 493
MISVFDLFSIGIGPSSSHTVGPMRAANEFARELVHRMSDIDRLTITLYGSLAFTGKGHGTDKAVVIGLMGESPETVNPDSIENRIRNVETEGQVALLNQYPLNFSLADDIIFNYQEAFDFHPNAVEFRAYDKNAALIQKSLYFSVGGGFIVNDERRNELVKTEDDAPYPFNSAAELMAHCQQQSLSIAAVMLANEKTRRDEKTIFMGLMHIATVMENCINKGCQTDGFLAGPLNVRRRAPSLYRKLLAIGPPGAAHPQTMNWLNVYAMAVNEENAAGGRVVTAPTNGAAGIIPAVLNYYKYFCKDASEKGVIDFLLTAGATGMLYKKNASISGAEMGCQGEVGVACSMAAAGLAAALGGTIFQVENAAEIGMEHNLGLTCDPVAGLVQIPCIERNAMGSVKAVNAARLALAEDGEHKISLDMVIDTMREIGRNMNTIYKETSKGGLAVAVNITEC

SEQ ID NO: 8119 - DNA, 1368 bp, Streptomyces avermitilis MA-4680
  CDS (1)..(1368): transl_table=11
gtggccatctccgtcttcgacctgttctcgataggcatcggcccgtccagctcccacacggtgggcccgatgcgggcggcgcgcatgttcgcccgccggctgcgcaacgaggagctgctggacccggtggcctcggtccgcgccgagctgtacggctcgctgggcgcgaccgggcacggtcacggcacgcccaaggcggtgctgctcggcctcgagggcgcgtccccgcggacggtcgacgtggagggcgcggacgaccgggtggcgacgatcaaggagtcggggcggatcaggctcctcggcgagcacgagatcgcgttcgacttctccgaggacctggtcctgcaccgccgcaagacgctcccgtaccacgcgaacggcatgaccctgtgggcgtacgacgcctcgggcgccgaactgctgtcgaagacgtactactcggtgggcggcggcttcgtcgtcgacgaggacgcggtgggcgaggaccgcatcaagctggacgacacggtcctcaagtaccccttccggaccggtgacgagctgctgcggctcacccgggagacgggtctgtcgatctccgcgctgatgctggagaacgagcgggcgtggcgcaccgaggaggagatccgcgaggggctcctcggcatctggcgggtcatgcaggcgtgtgtgtcgcgcggcatgtcgcgcgagggcatcctgccgggcggtctgaaggtgcgccgccgggcggcggtctcggcccgccagctgcgcgccgagggtgacccgctggcccgtgccatggagtggatcacgctctacgcgatggcggtgaacgaggagaacgcggccggcggccgggtcgtgacggccccgacgaacggcgccgcgggcatcatcccggccgtgctgcactactacatcaacttcgtgccgggcgcggacgaggacggggtcgtacgcttcctgctcgcggccggcgccatcgggatgctcttcaaggagaacgcgtccatctccggcgcggaggtcggctgccagggggaggtcggctcggcctgctcgatggcggccggcgcactggccgaggtcctcggcggcactcccgaacaggtcgagaacgcggccgagatcggcatggagcacaacctcggcctcacctgcgaccccgtcggcggcctggtccagatcccgtgcatcgagcgcaacggcatggccgcggcgaaggcggtcaccgccgcccgcatggccatgcgcggcgacggctcccacaaggtgtccctcgacaaggtcatcaagacgatgaaggagaccggcgcggacatgtcggtcaagtacaaggagacggcgcggggcggcctcgcggtgaacatcatcgagtgctga

SEQ ID NO: 8120 - protein, 455 aa, Streptomyces avermitilis MA-4680
MAISVFDLFSIGIGPSSSHTVGPMRAARMFARRLRNEELLDPVASVRAELYGSLGATGHGHGTPKAVLLGLEGASPRTVDVEGADDRVATIKESGRIRLLGEHEIAFDFSEDLVLHRRKTLPYHANGMTLWAYDASGAELLSKTYYSVGGGFVVDEDAVGEDRIKLDDTVLKYPFRTGDELLRLTRETGLSISALMLENERAWRTEEEIREGLLGIWRVMQACVSRGMSREGILPGGLKVRRRAAVSARQLRAEGDPLARAMEWITLYAMAVNEENAAGGRVVTAPTNGAAGIIPAVLHYYINFVPGADEDGVVRFLLAAGAIGMLFKENASISGAEVGCQGEVGSACSMAAGALAEVLGGTPEQVENAAEIGMEHNLGLTCDPVGGLVQIPCIERNGMAAAKAVTAARMAMRGDGSHKVSLDKVIKTMKETGADMSVKYKETARGGLAVNIIEC

SEQ ID NO: 8121 - DNA, 1386 bp, Nitrosomonas europaea ATCC 19718
  CDS (1)..(1386): transl_table=11
atgttcatcagcgtactcgatctgttcaaaattggtattggcccttccagttctcacaccatggggccaatgacggcagcaaatgttttccgtgatcatgtcgatcagttggtctcgcagactccagacgatctcaactatcgtgtctattgtgtgctcaagggttcgcttgcctttaccggcagagggcatgcaacggacagggcagtggctttgggattgcacggccatagccccgtctcgcttgccggagaggatgtcaatgcactgacggcaaaactctgggccaccgatacgttgcaacttaccagcgggagagagattggtttcaaccctgaggatgatatcgtttttgataaatcggacccattgccgcaacaccccaatggcatgattttttatctgctggatgaagaggggaaaaaaattctgtcagaaacctttttttccatcgggggcgggttcatctgcaccctggcagaaatcaaccagctgaatgctccgctcaaaatggaatctgccgggttgtatccctatccgttcgattctgcgatcggcatgctagaaatgtctcagcagagcggcttatccatcgccgaaatgaagcgtgccaatgagttgaccagaatgtcggcgcaggagcttgaacaagggttggatagtatctggaaagccatgtgtcactgtgtcgagcagggattgacggcagaaggccgtctcccgggcgggttgagtatacgcagacgtgcaaaagatttgtacgaacaactgcagatgcatccggaaaaggccacactgaacgattggttatgtgcttacgctatggcagtcaatgaagaaaatgctgcagggcacatggtcgttacagcacccaccaacggtgctgccggggttattccggcagtcatttactatctgctcaaacatgaaggcggtactgaacagcaggtacgggatctcctgctgacagctgcggccattggcgggctgatcaagcacctcagctctatttccggtgccgaagtaggttgccagggagaagtaggttcagcagcagccatggctgcggccggtctctgtgcggtacgaggaggtactaccgagcaggtcgaaaatgccgctgaaattgcgctggaacatcacctgggtatgacctgtgacccggtcggtgggctggttcaggtgccttgcatcgaacgcaatggctttggcgcaatcaaggcacacactgccgctgcgcttgcctgtcgcggtactggcgagcatttcatcccccttgataactgtatcaatgcaatgaagcagactggcctggagatgtcgcacaaatacaaggaaacttcactgggcggcctggctgtcagtgtcagtatcactgaatgttga

SEQ ID NO: 8122 - protein, 461 aa, Nitrosomonas europaea ATCC 19718
MFISVLDLFKIGIGPSSSHTMGPMTAANVFRDHVDQLVSQTPDDLNYRVYCVLKGSLAFTGRGHATDRAVALGLHGHSPVSLAGEDVNALTAKLWATDTLQLTSGREIGFNPEDDIVFDKSDPLPQHPNGMIFYLLDEEGKKILSETFFSIGGGFICTLAEINQLNAPLKMESAGLYPYPFDSAIGMLEMSQQSGLSIAEMKRANELTRMSAQELEQGLDSIWKAMCHCVEQGLTAEGRLPGGLSIRRRAKDLYEQLQMHPEKATLNDWLCAYAMAVNEENAAGHMVVTAPTNGAAGVIPAVIYYLLKHEGGTEQQVRDLLLTAAAIGGLIKHLSSISGAEVGCQGEVGSAAAMAAAGLCAVRGGTTEQVENAAEIALEHHLGMTCDPVGGLVQVPCIERNGFGAIKAHTAAALACRGTGEHFIPLDNCINAMKQTGLEMSHKYKETSLGGLAVSVSITEC

SEQ ID NO: 8123 - DNA, 1503 bp, Rhodopirellula baltica SH 1
  CDS (1)..(1503): transl_table=11
atgcccgctttcgcccagcaccacggcctcgtgccgtggctgcgtccatcgaacaggaagctcatcctcgtgaatcgccccgctgaatccgtcgacactgtggttccgtactttggcgtttttgacctgttcaaaatcggaatcggcccctccagctcccactcggtgggcccaatgcgggctgcggaagccttcctcaccgagctcgatgattccgacctgctgaaaagcgtttcgcgggtccaaatcgatctctacggttcgcttgcgctgaccggtctgggacaccaaaccgacgtcgcattgttgatgggattgctgggcgaaacccccgaccaaatcgacaccgaaactattggcgagaagctttcgtcgatccgcgaatcaaaaaggttgctgctcaacggcgaacggccaatcgacttttgcgaatcaaccgatctgatcttgcatcgtcgaacagtcaaaggaatgcaccccaacacgatgcggttctctgcattcacggacatcgacagccagaccgccgcaatcgaagcaacctacctttccgttggcggtggcttcatcatccgcgaaggacaaaccagcaattctaaaaaggacaacacaaaaacgaattgctcctccgatgtgcctcacccattcacatcagccagcgagctgctgaatcaatgcgacacgcatcagatttcgatccacgagctcgccctcaaaaacgagctaacatttcgaacttccgaagaaatccgtgagggacttcagcgaatctggaaagtgatgcaagaatgcgtcgagaaagggtgccgaaccaaaggaatcttgcccggaggactgaacgtcgaacgacgtgcaccagacttgtttcaaacactgaccgaacgtagcgaaccactggatcgcgacccgctgtgcgtcttggactgggtcgatctgtatgcactcgcggtcaatgaagagaatgccgccggtgggcgcgtcgtgaccgcgccgaccaatggcgccgcgggaatcatccccgcggtgctgcactacctgcaacgtttttgcccaaacgtcaccgacgaaaccatcgaacgttttctactgaccgcggcggtgattggatcgctgtataaacgaaacgcgtcaatctccggtgcagaggttggttgccagggcgaagtgggcgtcgcatgctcgatggccgccggagctttaaccgaagcattgggcggaacaccccaccaagtcgaagaagccgccgagatcggaatggaacacaacttgggtctaacgtgcgacccgatcaaaggcttggttcaggtcccttgcatcgaacgcaacgccatgggagcagtgaaggcgatcaacgcaagtcgcttagcgctccgcggagatggcaagcacttcgtttcccttgaccgtgtcattcgggtgatgaaacgcacaggcgccgacatgtcagctcgctacaaagagacctcccgcggcggtttggccgtcaacatcagcgaatgttaa

SEQ ID NO: 8124 - protein, 500 aa, Rhodopirellula baltica SH 1
MPAFAQHHGLVPWLRPSNRKLILVNRPAESVDTVVPYFGVFDLFKIGIGPSSSHSVGPMRAAEAFLTELDDSDLLKSVSRVQIDLYGSLALTGLGHQTDVALLMGLLGETPDQIDTETIGEKLSSIRESKRLLLNGERPIDFCESTDLILHRRTVKGMHPNTMRFSAFTDIDSQTAAIEATYLSVGGGFIIREGQTSNSKKDNTKTNCSSDVPHPFTSASELLNQCDTHQISIHELALKNELTFRTSEEIREGLQRIWKVMQECVEKGCRTKGILPGGLNVERRAPDLFQTLTERSEPLDRDPLCVLDWVDLYALAVNEENAAGGRVVTAPTNGAAGIIPAVLHYLQRFCPNVTDETIERFLLTAAVIGSLYKRNASISGAEVGCQGEVGVACSMAAGALTEALGGTPHQVEEAAEIGMEHNLGLTCDPIKGLVQVPCIERNAMGAVKAINASRLALRGDGKHFVSLDRVIRVMKRTGADMSARYKETSRGGLAVNISEC

SEQ ID NO: 8125 - DNA, 1380 bp, Haemophilus ducreyi 35000HP
  CDS (1)..(1380): transl_table=11
atgattagtgtatttgatatttttaaagtgggcattggtccttctagttcgcatactgttgggccaatgaaagcagcaaagcaatttgttgatgaattaagtgagcataaacttttagctaaaacggatcgcttagttgccgatgtttatggttctttatcgttaaccggtcgaggccacagcaccgatattgcaatagtaatggggttaatgggctatttaccagataacgtagatatagaacgaatagatagcgtcattcaacaagtaaaacaagagcataaacttgtacttgccgaagccaatccagcggaaaccaaaataattgattttgatttctataatgatatgccattccatagcacgttcttagcacgccacgaaaatggtatgacattaaaagcctttgcgggtgaaacactgctatacgaaaaaaccttttattctattggcggtggctttatcgttgatgatgaacactttgagcaacaaactaacgccgatgtgaatgtgccttttccttataaaaatgcggaagatttacttaagcattgccatgatcaaggtttaccgctttctagcttagtttggaaaaatgaaatggcattacatcataaacaagccatatcagattatttaaccaagatttggaaaacaatggaagcctgtattgagcacggtttacacactgagggcttattaccaggcccattaaaagttattcgccgagcgccatcattacgccataccctagaatcaaccggtaaatttaacaccgatccaatgcaaattattgactgggttaatatgtttgcccttgcggttaatgaagaaaatgcagccggtggccgtgtcgttactgcgccaactaacggtgcttgcggtattgtccccgcagtattagcgtattatcagcaatttattgccccattaaatcaagaaaaaattgagcgttatttattagtatgcagtgtaattggttcactctacaaaatgaatgcctctatttcaggtgctgaagtcggttgccaaggcgaagtgggagtagcttgttcaatggctgcggctggtttaactgaaattatgggcggaacgcctgaacaagtatgtatggcagctgaaattggtatggaacataatctaggcttaacttgcgatcctgtcagtggccaagtgcaagtcccttgtatcgaacgtaatgccatcgcatcagttaaagcaatcaatgctagccgtatggctctacgccggactacacaaccgcgtgtcagtctagataaagtgatcgaaacaatgtacgaaaccggtaaagatatgaatgctaaataccgagaaacctcaaccggtggtttagccattaaaattttaccttgtgattaa

SEQ ID NO: 8126 - protein, 459 aa, Haemophilus ducreyi 35000HP
MISVFDIFKVGIGPSSSHTVGPMKAAKQFVDELSEHKLLAKTDRLVADVYGSLSLTGRGHSTDIAIVMGLMGYLPDNVDIERIDSVIQQVKQEHKLVLAEANPAETKIIDFDFYNDMPFHSTFLARHENGMTLKAFAGETLLYEKTFYSIGGGFIVDDEHFEQQTNADVNVPFPYKNAEDLLKHCHDQGLPLSSLVWKNEMALHHKQAISDYLTKIWKTMEACIEHGLHTEGLLPGPLKVIRRAPSLRHTLESTGKFNTDPMQIIDWVNMFALAVNEENAAGGRVVTAPTNGACGIVPAVLAYYQQFIAPLNQEKIERYLLVCSVIGSLYKMNASISGAEVGCQGEVGVACSMAAAGLTEIMGGTPEQVCMAAEIGMEHNLGLTCDPVSGQVQVPCIERNAIASVKAINASRMALRRTTQPRVSLDKVIETMYETGKDMNAKYRETSTGGLAIKILPCD

SEQ ID NO: 8127 - DNA, 1392 bp, Bordetella pertussis Tohama I
  CDS (1)..(1392): transl_table=11
gtggcagtttccgttttcgaccttttcaagataggcatagggccgtccagttcgcatacggtgggcccgatgcgggcggcgctcctgttcgtgcaggggctggagcgcgatggcctgctggcgcgcgtggccagcgtgcgcgccgagctctatgggtcgctgggcgcgaccggcaaggggcacggcaccgacaagggcgtgctgctggggttcatgggccaggcgcccgatacggtcgaccccgcggccatcgccggcatgctgcaggccgtgcgcgccaatcggcgcgtgttgttgctgggtcggcatgatgtgccgttcgtcgaaaaagagcatatgttgttctatcgccgcgaggcgttggccgaacatcctaacgggatgaagtttcacgcttttgacgccgatggccaaccgttgcgcgaatcgcgctatctgtcggtgggcggcggtttcgtggtcacggccggcgcggccaatgcccaggtcatcggcgcgcacgaccagctgccgtacccgtttcgcaccggacgcgagctgctggacatgtgccgcgccagcggccactcggtggcgggcctgatgatgcgcaacgagctgacctggcgcggcgccgccgagatcgagcaggggctggaccgtatctgggaagtcatgcaggagtgcgtggcccgcggctgcggcatcggccatccggaggccgacggcgacctgccgggcccgctcaaggtgcgccggcgcgcgccggagctgtatcgcgcgctgacgcagcgcgccgagcgcacgctgtccgaccccttgtcggtgatggactgggtgaacctgtacgccatggccgtcaacgaggaaaacgccgcgggcggcagggtggtgacggcgccgaccaatggcgcggccggcatcattccggcggtgctgcattattacgaccgttttgtcccggccgccaaccgggcgggcgtgcacgatttcctgctgacggcggcggccatcggcctgctgtacaagtacaacgcctcgctgtcgggcgccgaggtgggctgccagggcgaggtgggcgtggcctgttcgatggcggccggcgcgctggccgccgtgcagggcggcagcgtcgaacaagtcgagaacgccgccgagatcggcatggagcacaacctgggcctgacctgcgacccggtgggcgggctggtgcagattccgtgcatcgaacgcaacgccatggcctcggtcaaggccgtcaacgcggcgcgcatggcgttgcgcggcgacggacatcactacgtatcgctggattccgtcatcaagaccatgcgcgaaaccggcgccgacatgaagaccaaatacaaggaaaccgcgcgcggcgggttggcggtgaatatcgtggagtgctga

SEQ ID NO: 8128 - protein, 463 aa, Bordetella pertussis Tohama I
MAVSVFDLFKIGIGPSSSHTVGPMRAALLFVQGLERDGLLARVASVRAELYGSLGATGKGHGTDKGVLLGFMGQAPDTVDPAAIAGMLQAVRANRRVLLLGRHDVPFVEKEHMLFYRREALAEHPNGMKFHAFDADGQPLRESRYLSVGGGFVVTAGAANAQVIGAHDQLPYPFRTGRELLDMCRASGHSVAGLMMRNELTWRGAAEIEQGLDRIWEVMQECVARGCGIGHPEADGDLPGPLKVRRRAPELYRALTQRAERTLSDPLSVMDWVNLYAMAVNEENAAGGRVVTAPTNGAAGIIPAVLHYYDRFVPAANRAGVHDFLLTAAAIGLLYKYNASLSGAEVGCQGEVGVACSMAAGALAAVQGGSVEQVENAAEIGMEHNLGLTCDPVGGLVQIPCIERNAMASVKAVNAARMALRGDGHHYVSLDSVIKTMRETGADMKTKYKETARGGLAVNIVEC

SEQ ID NO: 8129 - DNA, 1398 bp, Bordetella parapertussis 12822
  CDS (1)..(1398): transl_table=11
gtgcgcgtggcagtttccgttttcgaccttttcaagataggcatagggccgtccagttcgcatacggtgggcccgatgcgggcggcgctcctgttcgtgcaggggctggagcgcgatggcctgctggcgcgcgtggccagcgtgcgcgccgagctctatgggtcgctgggcgcgaccggcaaggggcacggcaccgacaagggcgtgctgctggggttcatgggccaggcgcccgatacggtcgaccccgcggccatcgccggcatgctgcaggccgtgcgcgccaatcggcgcgtgtcgttgctgggtcggcatgacgtgccgttcgtcgaaaaagagcatatgttgttctatcgccgcgaggcgttggccgaacatcctaacgggatgaagtttcacgcttttgacgccgatggccaaccgttgcgcgaatcgcgctatctgtcggtgggcggcggtttcgtggtcacggccggcgcggccaatgcccaggtcatcggcgcgcacgaccagctgccgtacccgtttcgcaccggacgcgagctgctggacatgtgccgcgccagcggccactcggtggcgggcctgatgatgcgcaacgagctgacctggcgcggcgccgccgagatcgagcaggggctggaccgtatctgggaagtcatgcaggagtgcgtggcccgcggctgcggcatcggccatccggaggccgacggcgacctgccgggcccgctcaaggtgcgccggcgcgcgccggagctgtatcgcgcgctgacgcagcgcgccgagcgcacgctgtccgaccccttgtcggtgatggactgggtgaacctgtacgccatggccgtcaacgaggaaaacgccgcgggcggcagggtggtgacggcgccgaccaatggcgcggccggcatcattccggcggtgctgcattattacgaccgttttgtcccggccgccaaccgggcgggcgtgcacgatttcctgctgacggcggcggccatcggcctgctgtacaagtacaacgcctcgctgtcgggcgccgaggtgggctgccagggcgaggtgggcgtggcctgttcgatggcggccggcgcgctggccgccgtgcagggcggcagcgtcgaacaagtcgagaacgccgccgagatcggcatggagcacaacctgggcctgacctgcgacccggtgggcgggctggtgcagattccgtgcatcgaacgcaacgccatggcctcggtcaaggccgtcaacgcggcgcgcatggcgttgcgcggcgacggacatcactacgtctcgctggattccgtcatcaagaccatgcgcgaaaccggcgccgacatgaagaccaaatacaaggaaaccgcgcgcggcgggttggcggtgaatatcgtggagtgctga

SEQ ID NO: 8130 - protein, 465 aa, Bordetella parapertussis 12822
MRVAVSVFDLFKIGIGPSSSHTVGPMRAALLFVQGLERDGLLARVASVRAELYGSLGATGKGHGTDKGVLLGFMGQAPDTVDPAAIAGMLQAVRANRRVSLLGRHDVPFVEKEHMLFYRREALAEHPNGMKFHAFDADGQPLRESRYLSVGGGFVVTAGAANAQVIGAHDQLPYPFRTGRELLDMCRASGHSVAGLMMRNELTWRGAAEIEQGLDRIWEVMQECVARGCGIGHPEADGDLPGPLKVRRRAPELYRALTQRAERTLSDPLSVMDWVNLYAMAVNEENAAGGRVVTAPTNGAAGIIPAVLHYYDRFVPAANRAGVHDFLLTAAAIGLLYKYNASLSGAEVGCQGEVGVACSMAAGALAAVQGGSVEQVENAAEIGMEHNLGLTCDPVGGLVQIPCIERNAMASVKAVNAARMALRGDGHHYVSLDSVIKTMRETGADMKTKYKETARGGLAVNIVEC

SEQ ID NO: 8131 - DNA, 1398 bp, Bordetella bronchiseptica RB50
  CDS (1)..(1398): transl_table=11
gtgcgcgtggcagtttccgttttcgaccttttcaagataggcatagggccgtccagttcgcatacggtgggcccgatgcgggcggcgctcctgttcgcgcaggggctggagcgcgatggcctgctggcgcgcgtggccagcgtgcgcgccgagctctatgggtcgctgggcgcgaccggcaaggggcacggcaccgacaagggcgtgctgctggggttcatgggccaggcgcccgatacggtcgaccccgcggccatcgccggcatgctgcaggccgtgcgcgccaatcggcgcgtgtcgttgctggggcggcatgacgtgccgttcgtcgaaaaagagcatatgttgttctatcgccgcgaggcgttggccgaacatcctaacgggatgaagtttcacgcttttgacgccgatggccaactgttgcgcgaatcgcgctatctgtcggtgggcggcggcttcgtggtcacggccggcgcggccaatgcccaggtcatcggcgcgcacgaccagctgccgtacccgtttcgcaccggacgcgagctgctggacatgtgccgcgccagcggccactcggtggcgggcctgatgatgcgcaacgagctgacctggcgcggcgccgccgagatcgagcaggggctggaccgtatctgggaggtcatgcaggagtgcgtggcccgcggctgcggcatcggccatccggaggccgacggcgacctgccgggcccgctcaaggtgcgccggcgcgcgccggagctgtatcgcgcgctgacgcagcgcgccgagcgcacgctgtccgaccccttgtcggtgatggactgggtgaacctgtacgccatggccgtcaacgaggaaaacgccgcgggcggcagggtggtgacggcgccgaccaatggcgcggccggcatcattccggcggtgctgcattattacgaccgttttgtcccggccgccaaccgggcgggcgtgcacgatttcctgctgacggcggcggccatcggcctgctgtacaagtacaacgcctcgctgtcgggcgccgaggtgggctgccagggcgaggtgggcgtggcctgttcgatggcggccggcgcgctggccgccgtgcagggcggcagcgtcgaacaagtcgagaacgccgccgagatcggcatggagcacaacctgggcctgacctgcgacccggtgggcgggctggtgcagattccgtgcatcgaacgcaacgccatggcctcggtcaaggccgtcaacgcggcgcgcatggcgttgcgcggcgacggacatcactacgtctcgctggattccgtcatcaagaccatgcgcgaaaccggcgccgacatgaagaccaaatacaaggaaaccgcgcgcggcgggttggcggtgaatatcgtggagtgctga

SEQ ID NO: 8132 - protein, 465 aa, Bordetella bronchiseptica RB50
MRVAVSVFDLFKIGIGPSSSHTVGPMRAALLFAQGLERDGLLARVASVRAELYGSLGATGKGHGTDKGVLLGFMGQAPDTVDPAAIAGMLQAVRANRRVSLLGRHDVPFVEKEHMLFYRREALAEHPNGMKFHAFDADGQLLRESRYLSVGGGFVVTAGAANAQVIGAHDQLPYPFRTGRELLDMCRASGHSVAGLMMRNELTWRGAAEIEQGLDRIWEVMQECVARGCGIGHPEADGDLPGPLKVRRRAPELYRALTQRAERTLSDPLSVMDWVNLYAMAVNEENAAGGRVVTAPTNGAAGIIPAVLHYYDRFVPAANRAGVHDFLLTAAAIGLLYKYNASLSGAEVGCQGEVGVACSMAAGALAAVQGGSVEQVENAAEIGMEHNLGLTCDPVGGLVQIPCIERNAMASVKAVNAARMALRGDGHHYVSLDSVIKTMRETGADMKTKYKETARGGLAVNIVEC

SEQ ID NO: 8133 - DNA, 1401 bp, Chromobacterium violaceum ATCC 12472
  CDS (1)..(1401): transl_table=11
atgttcagcatgagcgacatctacaaaatcggcgtaggcccctccagctcccacaccgtcggcccgatgaaggccggccaccagttcctcggcgcgctcaaggaaaccggcaagttcaaccaggtcaaccgcgtccatgtcgactgctacggctcgctcgccctcaccggcaagggccactgcaccgaccaggccatcatcctcggcctcgccggcaatctgcccgacaccgtggacccggacgccagcgccagcctgatcgcagacgtggagcaaaccagccagctgacgctgggccgcacccaccagcgcgtggccttcggcatggacttccacaccgccaatctgccgctgcacgaaaacggcatgcagatccacgccttcgtcgacgacgaaaaagtcctgaccaagacctactattcgatcggcggcggcttcatcgtcgacgaagagcacttcaaccagtccagctgcagcgacaccccggtgccctaccatttcgtcaccgcccagcagctgatcgacatgtgcgaggaaaccggcctgtccatcgccgcgctggtgatggaaaacgagaaagccttccacgacgtcaaggacacccaggcccacttccgccgcgtgtgggaagtgatgaagagcagcatcgagcgcggcatgcgcaccgaaggcaacctgcccggcccgatgcgcatcccccgccgcgcgcccgcgctgcaccggatgctgaccagctcgctcaccgtggccaaggacccgatgagcgtgatggactgggtcaatatgtacgcgatggcgatgtccgaggaaaacgcggccggcggccgcgtggtcaccgcgccgaccaacggcgcctgcggcatcgtgccggccgtgctcgcctactacaaccacttcatccagccgctggacgacgacagctgcctgcgcttcttcctgtcctccggcgccatcggctgcctgttcaagctgaacgcgtcgatctccggcgccgaagtcggctgccagggcgaggtgggcgtcgcctgttcgatggcggccgccggcctgaccgaactgatgggcggcagcccgtcccaggtatgcatggcggccgagatcgccatggagcacaacctgggcctgacttgcgacccggtgggcggccaggtgcagatcccctgcatcgagcgcaacgccatcgccgcggtcaaggccatcaacgccgcccgcatggccatgcaccgcgtcagcagccccaaggtgtcgctggacaaggtgatcgccgcgatgtacgaaaccggcaaggacatggacgccaagtaccgcgaaacctcctgcggcggcctcgcgctgcagatcaaggcggaaaacaaggtggtgccgacccaggccatccgctggatcgacgacgcggcctga

SEQ ID NO: 8134 - protein, 466 aa, Chromobacterium violaceum ATCC 12472
MFSMSDIYKIGVGPSSSHTVGPMKAGHQFLGALKETGKFNQVNRVHVDCYGSLALTGKGHCTDQAIILGLAGNLPDTVDPDASASLIADVEQTSQLTLGRTHQRVAFGMDFHTANLPLHENGMQIHAFVDDEKVLTKTYYSIGGGFIVDEEHFNQSSCSDTPVPYHFVTAQQLIDMCEETGLSIAALVMENEKAFHDVKDTQAHFRRVWEVMKSSIERGMRTEGNLPGPMRIPRRAPALHRMLTSSLTVAKDPMSVMDWVNMYAMAMSEENAAGGRVVTAPTNGACGIVPAVLAYYNHFIQPLDDDSCLRFFLSSGAIGCLFKLNASISGAEVGCQGEVGVACSMAAAGLTELMGGSPSQVCMAAEIAMEHNLGLTCDPVGGQVQIPCIERNAIAAVKAINAARMAMHRVSSPKVSLDKVIAAMYETGKDMDAKYRETSCGGLALQIKAENKVVPTQAIRWIDDAA

SEQ ID NO: 8135 - DNA, 1401 bp, Chromobacterium violaceum ATCC 12472
  CDS (1)..(1401): transl_table=11
atggcaatcagtgttttcgacctgttcaaaatcggcatcggcccgtccagctcccacaccgtgggcccgatgcgcgccgcccgccaattcatcagccgcctggaaaaggacggccagctggacgccactgtccgcgtcagcgccgagatgttcggttcgctgggcgccaccggcaagggccacggcaccgatgtggcggtgctgctgggcctgcagggcgagcaacctgacctggtcgacaccgatgcagtggacggcatgctggccgccatccgcgagcagcgcaaactgaagctgctgggcaagcgcgagatcgatttcgtcgaaagcgagcacctgatcctgcacaaaaagaaaaccctgccctaccaccccaacggcatgatcttcgaggccttcgacgccgccggcgaaagcctgtccaagcgcgcctactattcggtaggcggcggcttcgtggtcgacgaagcggcgatcgacgccggcttcgtcccgccgggcgtcaccgagctgaagcacccgttcaagagcgcggccgagctgttggcgctgtgccagcgccacggcaagagcatcagccagatcatgctggagaacgagctgtcctggcgcagcgaggaagaagtgcgcgccggcctgctcaacatctggaacgtgatgcaggcctgcgtgaagcgcggctgcgaacgcgaaggcatcctgccgggcggcatgaaggtgaagcgccgcgccgccgacatgcaccgcaaactgctggcttctccggaagccgcgatgcgcgacccgctgacggtgatggactgggtgaacctgtacgccttggccgtgaatgaagaaaacgccgccggcggccgtgtggtgaccgctccgaccaatggcgccgccggcatcatcccggccgtgatgcactactacgcccgcttcgtgccgggcgccagcgacgacggcatcgtccgcttcctgctgaccgccggcgccatcggcatcctgttcaagctgaacgcgtccatttccggcgccgaagtcggctgccagggcgaagtgggttcggcttgctcgatggccgccggcgcgctgtgcgaagtgatgggcggcacgccggaacaagtggaaaacgccgcggagatcggcatggagcacaatctgggcctgacctgcgacccggtgggcggcctggtgcaagtgccctgcatcgagcgcaacgcgatggcttcggtgaaggcgatcaacgcggtgcggatggcgctgcgcggcgacggccagcacttcgtgtcgctggaccgcgtgatcaagaccatgcgcgacaccggcatggacatgagcaccaagtacaaggaaaccgcgcgcggcggcctggcgatcaatgtgatcgaggtgccggtcaacatcgtcgagtgctga

SEQ ID NO: 8136 - protein, 466 aa, Chromobacterium violaceum ATCC 12472
MAISVFDLFKIGIGPSSSHTVGPMRAARQFISRLEKDGQLDATVRVSAEMFGSLGATGKGHGTDVAVLLGLQGEQPDLVDTDAVDGMLAAIREQRKLKLLGKREIDFVESEHLILHKKKTLPYHPNGMIFEAFDAAGESLSKRAYYSVGGGFVVDEAAIDAGFVPPGVTELKHPFKSAAELLALCQRHGKSISQIMLENELSWRSEEEVRAGLLNIWNVMQACVKRGCEREGILPGGMKVKRRAADMHRKLLASPEAAMRDPLTVMDWVNLYALAVNEENAAGGRVVTAPTNGAAGIIPAVMHYYARFVPGASDDGIVRFLLTAGAIGILFKLNASISGAEVGCQGEVGSACSMAAGALCEVMGGTPEQVENAAEIGMEHNLGLTCDPVGGLVQVPCIERNAMASVKAINAVRMALRGDGQHFVSLDRVIKTMRDTGMDMSTKYKETARGGLAINVIEVPVNIVEC

SEQ ID NO: 8137 - DNA, 1200 bp, Porphyromonas gingivalis W83
  CDS (1)..(1200): transl_table=11
atggaatcgataacccaaatatatcgcatcggctacggtccgagcagtagccacacgattggcccacgtcgggctgctgagatgtttctcgatcggaacccccgggcgacctctttccgtgttacgctatacggcagccttgctgccacgggcaaaggacacctcacggatgcagctatccttgccgtcttggaagcaaaggctccgaccgaaatcgtttggaaaccggagatcttccaaaattttcaccccaacggcatgctcttcgagagcttcgacaaagagggcaagcagctcgacgactggctcatctatagcatcggcggcggagtcttggccaacgaacacttcaacgaacagcgaggtcgcgaggtatatccgctcagcaagatggcagatattctcgacgaactgaacaggcgcggcctaagctattgggagtatgtggaagaaaacgaagatcccgatatatgggactatttggctgaggtctggtcggtaatgcggagcgccattcaggaggggctcgatgctgagggggtgctgccgggtggactgggcgttcgccggaaggcagccagctatctgattcgtgcgcaggggtattcgccgggtgtacgaagccgaggcaatgtatatgcctatgctttggctgtgagcgaacagaatgcatcgggtggcaagatcgtaacggcgccgacatgtgggtcgtgcggcgttgtaccggcggtactccaccacctccaacagactcgtgacttcagcgataagcgcatattgcgtgcactggctacggccggcctttttgctaatgtggtacgcaccaatgcttctatttcgggtgcagaagtcggctgtcagggcgaagtgggagtggcttgtgccatgggagcggcagccagcagccagctattcgggggtaccctgtcccaaatcgaatatgctgcagagatggctttggagcatcacctcggactgacctgcgaccctgtatgcggattggtgcaggtaccttgtatcgaacgaaatgcctttgcggcagcacgagctttggatgccaatacttatgccaatttcagcgatggcagacaccgcatttcgttcgatcaggtcgtggaagtgatgcgtcagacgggcaaggatttgccgagtctatataaggaaacctctcagggtggattggccatagtacactgctga

SEQ ID NO: 8138 - protein, 399 aa, Porphyromonas gingivalis W83
MESITQIYRIGYGPSSSHTIGPRRAAEMFLDRNPRATSFRVTLYGSLAATGKGHLTDAAILAVLEAKAPTEIVWKPEIFQNFHPNGMLFESFDKEGKQLDDWLIYSIGGGVLANEHFNEQRGREVYPLSKMADILDELNRRGLSYWEYVEENEDPDIWDYLAEVWSVMRSAIQEGLDAEGVLPGGLGVRRKAASYLIRAQGYSPGVRSRGNVYAYALAVSEQNASGGKIVTAPTCGSCGVVPAVLHHLQQTRDFSDKRILRALATAGLFANVVRTNASISGAEVGCQGEVGVACAMGAAASSQLFGGTLSQIEYAAEMALEHHLGLTCDPVCGLVQVPCIERNAFAAARALDANTYANFSDGRHRISFDQVVEVMRQTGKDLPSLYKETSQGGLAIVHC

SEQ ID NO: 8139 - DNA, 1371 bp, Gloeobacter violaceus PCC 7421
  CDS (1)..(1371): transl_table=11
atgggtgcaatcaccacttcgattttcgagctgttcaaagtcggtccggggccttcgagttcccacacgatcgggccgatgaaggcggctttcgattttttgattcgcatcaacgccctggacgacactcaggtgctcgcggcttcggcggtcgaagcgtttttattcggctctctcagtgccaccggcaaaggccacggtaccgaccgggcggtgattgcggggctgttgggctggacacccgaggggtgcgatccggttgctttttcagccctgctcagtgacgacaatgaacactactttgtcgctatccatgatcgccgcatcccgataagtgccgccaatattcactttgtcaaaggccagcaggactttcccttcagcaacacgatgattctgcggctgatgggcgatgattcagtacttttcgagcaagaatattactcgataggcggtggtttcatccagcgcaagggcgaagatgcgcaggccggcccccctgtcgagccgccctacggctatggaacgatgaaggaactcaaagcgcagatgaccacccacagcctggggctcgacgaagtgatcctggccaacgagatggtgatcactggccagggccgcaagcagatttatcggcgcatcgacgatattttcgactttatgcaccgggcggtgcgccggggcctcaaaagcgaaggcatcctgcccggcaccatccggttggagcgcaaggcccccggcctccaccgcaccgcccgcgccctgcggggcaacccggatagctttctggtctttctcaacgcctacagtctggcggcttccgaagaaaacgccgccggccgcatcgtggtcaccgcccccacctcgggcgcttcgggggtgattcccggtgtcagttatctactcaagaagcactaccgctacgacaagcagaagctgcgctcgggcctgcttgccgccgccgccgtcggatttctggtcaagcacaacgccagcatctcgggggcggagatgggctgcatgggggaagtgggcaccgccgcggcgatgggggcggcgatgctcgcccactgcgccggccacccgatcgaagtggtggaggccgccgctgagattgccatcgagcaccacctgggcatgacctgcgatccgatcggcggctacgtgcagattccctgcatcgagcgcaacgccatgggagcggtcaaggcctacaacgcctatttgctcgcctcggcgggaagctccagcaagcaaaaaatttccctggacaatgtcatccgggtgatgcgcgccaccggcctcgacatgtccagaaagtacaaagaaacctccgaggcgggccttgccctcagcagtaccgagtgctga

SEQ ID NO: 8140 - protein, 456 aa, Gloeobacter violaceus PCC 7421
MGAITTSIFELFKVGPGPSSSHTIGPMKAAFDFLIRINALDDTQVLAASAVEAFLFGSLSATGKGHGTDRAVIAGLLGWTPEGCDPVAFSALLSDDNEHYFVAIHDRRIPISAANIHFVKGQQDFPFSNTMILRLMGDDSVLFEQEYYSIGGGFIQRKGEDAQAGPPVEPPYGYGTMKELKAQMTTHSLGLDEVILANEMVITGQGRKQIYRRIDDIFDFMHRAVRRGLKSEGILPGTIRLERKAPGLHRTARALRGNPDSFLVFLNAYSLAASEENAAGRIVVTAPTSGASGVIPGVSYLLKKHYRYDKQKLRSGLLAAAAVGFLVKHNASISGAEMGCMGEVGTAAAMGAAMLAHCAGHPIEVVEAAAEIAIEHHLGMTCDPIGGYVQIPCIERNAMGAVKAYNAYLLASAGSSSKQKISLDNVIRVMRATGLDMSRKYKETSEAGLALSSTEC

SEQ ID NO: 8141 - DNA, 1365 bp, Photorhabdus luminescens subsp. laumondii TTO1
  CDS (1)..(1365): transl_table=11
gtgattagcgttttcgacatgtttaaggtcggtattggcccatctagctctcatacggttggcccgatgaaagccggcaaacagtttgtcgacgatctggtaaaccagggattaatgccttctatcacgcgtgtagccgtcgatgtttacggctcactctcattaaccggcaagggtcatcatacggatatcgccattatcatgggtctggcaggtaatttacccgccaccgttgatattgattcgatccccggttttattcgtgatgtagagcaaacacagcgtattaaactagccaacggtttacatgaagtcgatttcccacgtgatagcggcatggttttccgaagtgataatctgtcattacatgaaaacggcatgcaaattcacgcattcgcgggggacaaaaaagtttatagcaaaacctactactcgattggtggtggttttattgttgatgaagagcactttggtaaaccctctcaggataccaaaccggtttcatatccattcaattcagcaaaagaattactgatgaattgtaataaaaccgggttatctatttccggtttaatgatgaaaaacgaactggatctccacagcaaagaagaaattaatgcctattttgccgatgtctgggataccatgcaggcttgtattgaacgtggtttgaacaccgaagggattttacctggcccactgcgtgtaccacgccgggcagcggcattacatcgtatgctgacctcatcaaacaatttgtctaatgatccaatgaatgtcgtggatttggtgaatatgtttgccttggcagtcaatgaagaaaatgctgcgggtgggcgtgttgttaccgcaccaaccaacggcgcttgtggcattgttcctgccgtactcgcttattacaaccattgtattgaacctgtaacaccagagctctatatccgctatttcctggcttctggcgctattggcatcctatataaaatgaatgcatcgatatctggcgctgaagtgggttgccaaggggaagtaggtgttgcctgctcaatggccgctgccggccttgctgaactgctcggtggcagcgctgaacaggtctgtattgcggctgaaatcggtatggaacataacctcggccttacctgtgacccggtggcaggccaagtacaagtaccttgtattgaacgaaatgccattgcttcagtaaaagcaatcaatgctgcacgcatggctttgcgccgtaccagcgaaccgcgcgtttctctcgataaagttattgaaaccatgtacgaaacaggcaaagacatgaacgccaaatatcgtgaaacatcccgcggtgggttagcaattaaggttcagtgtgattaa

SEQ ID NO: 8142 - protein, 454 aa, Photorhabdus luminescens subsp. laumondii TTO1
MISVFDMFKVGIGPSSSHTVGPMKAGKQFVDDLVNQGLMPSITRVAVDVYGSLSLTGKGHHTDIAIIMGLAGNLPATVDIDSIPGFIRDVEQTQRIKLANGLHEVDFPRDSGMVFRSDNLSLHENGMQIHAFAGDKKVYSKTYYSIGGGFIVDEEHFGKPSQDTKPVSYPFNSAKELLMNCNKTGLSISGLMMKNELDLHSKEEINAYFADVWDTMQACIERGLNTEGILPGPLRVPRRAAALHRMLTSSNNLSNDPMNVVDLVNMFALAVNEENAAGGRVVTAPTNGACGIVPAVLAYYNHCIEPVTPELYIRYFLASGAIGILYKMNASISGAEVGCQGEVGVACSMAAAGLAELLGGSAEQVCIAAEIGMEHNLGLTCDPVAGQVQVPCIERNAIASVKAINAARMALRRTSEPRVSLDKVIETMYETGKDMNAKYRETSRGGLAIKVQCD

SEQ ID NO: 8143 - DNA, 1362 bp, Vibrio vulnificus YJ016
  CDS (1)..(1362): transl_table=11
atgattagtgtatttgatatctataagatcggcgttggtccttcaagctcacacactgtaggtccaatgaaagcgggtaaagagtttattgatgatcttcgcgcaatgggaaaattacgtgacatcactaaaatcaccgttgatgtttatggttcattatcactgacagggaaaggtcaccatacggatatcgccatcatcatgggtcttgctggtaatacaccagagaaggtggatatcgattccattccgggctttattgctcgtgtagaagaaactgaacgcctgccagttggcatgcattgtcataccgtttcattccctcgtgaaggcggaatgaacttccacaagaccaatcttgagttgcacgaaaacggcatgcaaatccacgcttggattgatgacgaaaaagtatactcaaaaacctactactcaatcggtggtggtttcatcgtggatgaagagaactttggtaaagacaacaacagctctatcaaagtcccttatgagtacatctcagcggaagagttagtcaaccagtgtaaagagcacggtttgtctatcagcgcacttgtgatgaaaaacgagcacgctctgcactcagatgaagagactcgtacttacttcgcaaacatttggcgcaccatgcgtgagtgtatggatcgtggtatgaacgaagaaggcattctgcctggtccactgcgcgttcctcgtcgtgcggcagcacttcgccagcaactgctaacctcagaaaaaacctcgaacgatcctatggccgtggttgactgggtaaacatgttcgcttttgcggtaaacgaagagaacgctgcgggcggtcgagtcgtaacagcacccactaacggtgcatgtggcatcatcccagccgttcttgcgtactacgacaagttcatccaaacagtgacagagaaagattacatccgttactttgctgcatcgggtgcgattggcggtctgtacaaacgtaacgcttctatctctggcgctgaagttggctgtcaaggcgaagtaggcgtggcttgttctatggcagcagctggccttgctgagcttatgggcggtagcccagagcaagtgtgtatggcagcagaaatcgctatggagcacaaccttggcctaacgtgtgacccagttgcaggtcaggtacaggttccatgtatcgagcgtaatggtattgcggcggtgaaagcgattaactcaacgcgtatggcacttcgtcgctcttctgcacctcgtgtctctttggataaagtgattgagacgatgctggaaacaggcaaagacatgaacgcgaaataccgtgaaacatcacaaggtggcctagccattaaagtgatttgctaa

SEQ ID NO: 8144 - protein, 453 aa, Vibrio vulnificus YJ016
MISVFDIYKIGVGPSSSHTVGPMKAGKEFIDDLRAMGKLRDITKITVDVYGSLSLTGKGHHTDIAIIMGLAGNTPEKVDIDSIPGFIARVEETERLPVGMHCHTVSFPREGGMNFHKTNLELHENGMQIHAWIDDEKVYSKTYYSIGGGFIVDEENFGKDNNSSIKVPYEYISAEELVNQCKEHGLSISALVMKNEHALHSDEETRTYFANIWRTMRECMDRGMNEEGILPGPLRVPRRAAALRQQLLTSEKTSNDPMAVVDWVNMFAFAVNEENAAGGRVVTAPTNGACGIIPAVLAYYDKFIQTVTEKDYIRYFAASGAIGGLYKRNASISGAEVGCQGEVGVACSMAAAGLAELMGGSPEQVCMAAEIAMEHNLGLTCDPVAGQVQVPCIERNGIAAVKAINSTRMALRRSSAPRVSLDKVIETMLETGKDMNAKYRETSQGGLAIKVIC

SEQ ID NO: 8145 - DNA, 1371 bp, Vibrio vulnificus YJ016
  CDS (1)..(1371): transl_table=11
atgctgtccatctttgatatttacaagattggtgtgggcccttctagctctcacactaatggtccaatgatcgcgggttaccacttcactcgtttgattgaattgaacttggcaaaagtggttcgtattcaagtcgatttatatggctcactctcgttaacggggattggtcaccatactgaccgtgcaacgattttgggtctgttgggtaacaaaccagataccatcaaaatcgcttctgcgaacaaggcgatgcgcaaggcgattgaagagggcatgatgtcggtcgatggtcgtcatgaaatcgaattcaactacaaaacggatatgttgttccatgaagagaaccttcctctgcatgagaatggtatgacgattactgcgttagatgcgcatggcaatcaggttgggtttgaaacttactactctatcggtggtggtttcatcgcaacggcggatgaactgcaaaatggcagcgcgacttcacccgtagacgttgagttcccattctccagtgcagacgaaatgttggcacaggcagagaagaacggcatgagccttggcggcatgattctgaaaaacgaacaagcgtttcaggatatggaagccatcaatcaacgcgcagaacagatctggcgcgtgatgacgcgttgcatggagcgtggtttcgaaacagaaggtatcttggatggcggtttgaacgtgacccgccgtgcgcctaacttgctgaagaagcttgaagcaaatgcagcaatcgaaaacgatccaatggaaatcatggattggattaacctgtttgcttttgctgtgagtgaagaaaacgccgctggtggacaagtcgtaacatcaccaaccaatggtgcggcaggtgtgattccggcggtattgatgtactaccatcgcttcatcaaagagctcgataccaaacagattaaagactttcttgctgtatccggtgcgattggcattttgtacaaaaccaatgcgtctatctcgggggccgaagtgggttgtcagggcgaagttggcgtgtcttcttccatggcggcagctggcttgaccgcgctacgtggtggtagcaatgagcaaatttgtattgcggccgagatcgccatggagcactcactaggaatgacttgtgaccccatcggtggcttagtgcaagtaccgtgtattgagcgtaatgcaatgggcgcaatgaaagcgatcaatgcatctcgcatggcattgaagcgtaatagtaaatgtttgatctcgttggataaggtgattgaaaccatgtaccaaacgggcaaagacatgaacaagaaatatcgcgaaacgtcactgggtggactggcaatcattcaccttggctcgccttgtgagtaa

SEQ ID NO: 8146 - protein, 456 aa, Vibrio vulnificus YJ016
MLSIFDIYKIGVGPSSSHTNGPMIAGYHFTRLIELNLAKVVRIQVDLYGSLSLTGIGHHTDRATILGLLGNKPDTIKIASANKAMRKAIEEGMMSVDGRHEIEFNYKTDMLFHEENLPLHENGMTITALDAHGNQVGFETYYSIGGGFIATADELQNGSATSPVDVEFPFSSADEMLAQAEKNGMSLGGMILKNEQAFQDMEAINQRAEQIWRVMTRCMERGFETEGILDGGLNVTRRAPNLLKKLEANAAIENDPMEIMDWINLFAFAVSEENAAGGQVVTSPTNGAAGVIPAVLMYYHRFIKELDTKQIKDFLAVSGAIGILYKTNASISGAEVGCQGEVGVSSSMAAAGLTALRGGSNEQICIAAEIAMEHSLGMTCDPIGGLVQVPCIERNAMGAMKAINASRMALKRNSKCLISLDKVIETMYQTGKDMNKKYRETSLGGLAIIHLGSPCE

SEQ ID NO: 8147 - DNA, 1377 bp, Corynebacterium diphtheriae NCTC 13129
  CDS (1)..(1377): transl_table=11
atgttcatcagctgcttcgatatgttcaagattggtatcggcccatcgagttctcacacgcttggccctatgaaggctggcaaggcattcgtcgatacgcttgaagagcgtgacctgcttgatcgagtcacccgcgtgcgtgccgacgtctacggctcactgtcgctgaccggcatcggccacgcgaccgacaaggccatcatcatgggattagcaggattcgagccagaaaccgtggacatcgacgccatgccaggattcctcgaaatcgtcgcctccttgcaacgccttgcactagcaggcgggaagaagacggtggacttcagccgaaccgaaggcatcgtcttccacaacacctgcctgcaactgcacgaaaacggcatgaccatcaccgcatttgaaggcgacgaggtcttgttgaccaaggcatatttctccatcggcggtggatttatcgtcgataaagagcactttggcctacctgtcgaagacaccgccgtagtacctttcccttacaacaccgccgaggaagtgctcgcacactgcgatcgcgaggggatgagcattccagagttcgcatggcgcaatgaggttgcggcaaacggtgaagaagccgtgcgcgaacacctagctaaggtatggaaagtcatgcaaagcggcatcgagcgtggttcctcagcagaaggaatcctgccaggtgacctacgagtaccacgccgtgccaaggcacttcgtgagcgcctcgaagccaccagcgaaaatgaaccactacgcatgatgagctggcttaacatgttcgccatggccgtcaacgaggaaaatgcctccggtggccgtgtagtgacctcgcctacaaacggtgcctgcggcgttcttcctgctgtgttgtcctactgggatcgattggtcaaaccagttggtgagcaagaagtgattgactacctgctgacctgcggcgtggtgggcgctttgtacaagaagaacgcctccatctcgggtgctgaggtcggttgccaaggtgaggtcggcgtggcctgctcaatggcagcggcaggtattgcacaactcatgggagcaactcctgcgcaggctttcgccgcagcggagatcgccatggaacataatttgggtcttacctgtgatccagtgtgcggccaagtccaagttccttgcatcgaacgcaatgcaattgctgctgtgacctcggttaatgcggcaaatatgtcgctacagcgtggttctacccctaccgtctcgctggatcaggttatccagacgatgtaccaaaccggtaaggatatggactccaaataccgtgagacgtcccttggtggcctcgctaaagtcttaatgccacgacttatgccgtgtagctga

SEQ ID NO: 8148 - protein, 458 aa, Corynebacterium diphtheriae NCTC 13129
MFISCFDMFKIGIGPSSSHTLGPMKAGKAFVDTLEERDLLDRVTRVRADVYGSLSLTGIGHATDKAIIMGLAGFEPETVDIDAMPGFLEIVASLQRLALAGGKKTVDFSRTEGIVFHNTCLQLHENGMTITAFEGDEVLLTKAYFSIGGGFIVDKEHFGLPVEDTAVVPFPYNTAEEVLAHCDREGMSIPEFAWRNEVAANGEEAVREHLAKVWKVMQSGIERGSSAEGILPGDLRVPRRAKALRERLEATSENEPLRMMSWLNMFAMAVNEENASGGRVVTSPTNGACGVLPAVLSYWDRLVKPVGEQEVIDYLLTCGVVGALYKKNASISGAEVGCQGEVGVACSMAAAGIAQLMGATPAQAFAAAEIAMEHNLGLTCDPVCGQVQVPCIERNAIAAVTSVNAANMSLQRGSTPTVSLDQVIQTMYQTGKDMDSKYRETSLGGLAKVLMPRLMPCS

SEQ ID NO: 8149 - DNA, 2139 bp, Gibberella zeae PH-1
  CDS (1)..(2139)
atgagtcgcgctgggttcaagcagctttcgctgtttcgggcgtcaaagcaatgcttatcgactcgatccctagcaaccattgcgaggtggccgaaccacaatgcagttgcaaggtcagcacctgtttctgcaaccaagctgagagctcgacctttcagcacaacacggccccgacgaacgcaagatgaaatggaggatgaatcaagctcatacagtgaagctgatcatgagcatgctgtcatttccacatttgatctcttctccatcggcattggcccttcctcatctcacaccgttggacccatgcgagctggcaacatttttgtcaacgatcttatcgaggccaatctactccccaaagtcaacaagatccgtgttgccatttatggaagtcttgccctcactggcgagggccacatgacaccttcagctctgttgctgggtcttgaaggcaacgacgtggaaaccgttgataccgcatacgtgcccacccgctttaatgacatcaaaactaccaagaagatctttctcggccgcggtctagcagctgatggatcaaagggtaaggagatcgatttcgactacgagaaggagttcatctgggagtggggacgcaaattgccccaacacagcaacggcatgcgattcacagtctttgacaaagagggctacgtcctcgcaaccaacgacatgttcagcgtcggaggcggcttcgtcgtcaacggtgctctcagcatagcaccccaacaaactctttctccaaatgaccccgcgcaactcgaggaccccgaattggagtcggcggcccatccggctgatttggccgaaaatttgtactacaaggagattcggcgctccgatgccgcaggggatcgcaggacaggttccgaggtcaaggctctagacgaagccaatgcgggaccgacagctctcctcggagagtcagctgaaccaaccggactctctacagacgtcaagtcagagaccaagagcaccagctcatcgccgcatccgcggtatgcattccgagatgccgctagtctactttctctatgtcgcaagcacaacctcaccatcgctcagctggtctatgagaacgagaagagtctgggttacacggatgaggacatttatcgcaagatctttaagatctggggcgtcatggatgccagtattctggagagtgtacaggcggcccctggaacaaaactccctggatctttgaagctgcatcgacgagcgcccgcgctttaccgtcgcttgacccgaggactgtacccttcatctactgcggatacatctgctgctcagcttgagcacaagttctcagcacctgaccccaacattggtgaggatggcgcttctccgcaacctggcgctcttacttcgccatcaggtattctgagcgcttcgccaccagacaagtttgtggctggagctctccgaaagcgtggacctccacggatacacggttctttgacccatcctatcgctccagctccatcgcgcagaacgacattcccaaccatggattacctctccgtttatgccattgctgtcaacgaaaccaacgctgacggtggccgaatcgtcactgcgcccacaaacggtgccgcgggtatcattcctgctgtgctcaagtacacgactgagttcatcagtgatgatcctgagcgagatattcccaccttcctgcttacagctgctgcgatcggtatgctttacaagcgaggtgcaactatctctgctgccgaaggaggatgcatggccgaagtaggtgttgcctgctctatggctgccggtgcctttgcagcgtgtatgggcgccagcccagagaccattgagcaagccgccgagattggtatcgagcacaacctcggactgacttgtgatcccattggtggtcttgtccaagccccttgcattgagagaaacgcgctgggggctacaaaggctatttccagtgccaacttggccctgagtagcgagacaggtactcagcgagtgagactggatgatgctatccgtgcgatgcgtctgacagccaagggcatgagaaacgaattcaaggagacgagtttgagtggactggccacaagtgttcacattaatattcccgtcagcgtccccgactgctag

SEQ ID NO: 8150 - protein, 712 aa, Gibberella zeae PH-1
MSRAGFKQLSLFRASKQCLSTRSLATIARWPNHNAVARSAPVSATKLRARPFSTTRPRRTQDEMEDESSSYSEADHEHAVISTFDLFSIGIGPSSSHTVGPMRAGNIFVNDLIEANLLPKVNKIRVAIYGSLALTGEGHMTPSALLLGLEGNDVETVDTAYVPTRFNDIKTTKKIFLGRGLAADGSKGKEIDFDYEKEFIWEWGRKLPQHSNGMRFTVFDKEGYVLATNDMFSVGGGFVVNGALSIAPQQTLSPNDPAQLEDPELESAAHPADLAENLYYKEIRRSDAAGDRRTGSEVKALDEANAGPTALLGESAEPTGLSTDVKSETKSTSSSPHPRYAFRDAASLLSLCRKHNLTIAQLVYENEKSLGYTDEDIYRKIFKIWGVMDASILESVQAAPGTKLPGSLKLHRRAPALYRRLTRGLYPSSTADTSAAQLEHKFSAPDPNIGEDGASPQPGALTSPSGILSASPPDKFVAGALRKRGPPRIHGSLTHPIAPAPSRRTTFPTMDYLSVYAIAVNETNADGGRIVTAPTNGAAGIIPAVLKYTTEFISDDPERDIPTFLLTAAAIGMLYKRGATISAAEGGCMAEVGVACSMAAGAFAACMGASPETIEQAAEIGIEHNLGLTCDPIGGLVQAPCIERNALGATKAISSANLALSSETGTQRVRLDDAIRAMRLTAKGMRNEFKETSLSGLATSVHINIPVSVPDC

SEQ ID NO: 8151 - DNA, 2250 bp, Ustilago maydis 521
  CDS (1)..(2250)
atgttgcggatagggtcatctgcatctctgttgctgcgtactcccagatgtacggctacggcagctcaaagcagccttgctattcacacttgcatcgcgcatcgaaaaaactgtacgatttcgcaggctcactccctcattgccccatctgtgctggcccacacccgtaccacttgccccgacggctcaaggcatgcaactcgtcatgtacgatctttgcacaccacaaaaacttcggcctcgacagtagaggctgcagccgcacagaacgatccagcaccaagcgaagcgagcgagaccgagcatgccgtcatttccaccttcgatctgttctccgtcggcattggcccatcttcctctcacactgttggtccaatgcgtgctggtgttatcttcgtctcagacctggccgacatggatctgctcgatcgcgtacacacaatcaagatcaacctctacgggtcgcttgctctgacaggtgcagggcatatgacaccacaagcgctgctgggcggtcttgagggcgatgactgcgaaaccgtcgatcctccttcggttccggttcgattcgaagagatcaagcaggcaaagaaactctatcttggcaaaaacctcttcaaaacgctgggtgaaggaaccacagattctggaaagccgatcacgaagggaaagatgatcgatttcgattatgatcgagatctcaagtggatgtttggtcaggtgctgcctcatcactccaacgggataaggatgagcgtgtttgacagtgatggagagatgctcgccaccaacgactattactcggtcggaggcggatttgtagtcaatggcgcgcttgctacgccatcgtcgtctgcgaccttgtccaaagccaagcccgagatggaacatgtcaaggatgtcaagcatagccattcgactgctgctacgccactgcacgacgagacactcgaggtctcggcgcatcctatcgactggggtgaaaacgtgttctacaaacagattcgtcgtagtgacgccgaagctgcacgtcgagctgggtccgcgcccaccgtcgaaggactcttgcctcaagtagaagctccaaccccggcgcttgattctaactctgcatgcgtgccctccacgacgcccgaatcgcactcgccggaaaagctcacatcgcgacccgcgacaggcccgccattcccgttccacaacgcggctagcttgctgcgacaatgcaagacgcgcaacctgacgatcgcacaagtggtgtacgaaaatgaactgacgtggaatccgcccgaggtggtgcatgagaagctggtcaagatttggactacgatggacgagtgcatcagggcaggtgttgaaaatgaggaaaaaatattgccgggcccgctggcggtgagaaggagggcgccgcagttgtatgcgcggctgttgaggggtgtctatcgcggcggagcttcgctccacggtggaggggcagggtatgccaagctggatgatggcgcaccggggattgattccactgcacctgtcaaacgtacacagtcgacgtcgctcgatctgagcacgcctaagctgcgcacgcgcatgatcggcaacttcaaccacgccatcatgccgtgtccaccgcgccgcaccaactttcccgcaatcgactatctgacgtgctacgcgatcgctaccaacgagcagaacgccgcgggtgggcgcatcgtgaccgcgcccaccaatggcgccgctggcgttctgccgtcagtgctcaaatactgcttcgagttcatctttgacgatgatcccgtgcgcgacctgaccaactttctgctcaccgcttccgccattggtatgctcttcaaacgtggtgctacgttatctgctgccgaaggcgggtgtatggccgaagtcggggtagccaccgcgatggcagccgctgggtttgtcgccgtgctgggcggtagtcctgagaaggtgctccaggctagcgtgatcggcatagagcacaatcttggcttgacgtgcgatccgctcaatggccaggtccagatcccgtgcatcgaacgaaacgcgctcggcgctgtcaaggcggtcactgctgcccaacttgcgctcgcaggcgacggaaaacactcggtcagcctcgacgatgccatcaccgcaatgcgcgaaacagccagagacatgcataccagctacaaggagacgagcttgggcggattggctactgcagtcaaggtacccgttgccatcccggattgctga

SEQ ID NO: 8152 - protein, 749 aa, Ustilago maydis 521
MLRIGSSASLLLRTPRCTATAAQSSLAIHTCIAHRKNCTISQAHSLIAPSVLAHTRTTCPDGSRHATRHVRSLHTTKTSASTVEAAAAQNDPAPSEASETEHAVISTFDLFSVGIGPSSSHTVGPMRAGVIFVSDLADMDLLDRVHTIKINLYGSLALTGAGHMTPQALLGGLEGDDCETVDPPSVPVRFEEIKQAKKLYLGKNLFKTLGEGTTDSGKPITKGKMIDFDYDRDLKWMFGQVLPHHSNGIRMSVFDSDGEMLATNDYYSVGGGFVVNGALATPSSSATLSKAKPEMEHVKDVKHSHSTAATPLHDETLEVSAHPIDWGENVFYKQIRRSDAEAARRAGSAPTVEGLLPQVEAPTPALDSNSACVPSTTPESHSPEKLTSRPATGPPFPFHNAASLLRQCKTRNLTIAQVVYENELTWNPPEVVHEKLVKIWTTMDECIRAGVENEEKILPGPLAVRRRAPQLYARLLRGVYRGGASLHGGGAGYAKLDDGAPGIDSTAPVKRTQSTSLDLSTPKLRTRMIGNFNHAIMPCPPRRTNFPAIDYLTCYAIATNEQNAAGGRIVTAPTNGAAGVLPSVLKYCFEFIFDDDPVRDLTNFLLTASAIGMLFKRGATLSAAEGGCMAEVGVATAMAAAGFVAVLGGSPEKVLQASVIGIEHNLGLTCDPLNGQVQIPCIERNALGAVKAVTAAQLALAGDGKHSVSLDDAITAMRETARDMHTSYKETSLGGLATAVKVPVAIPDC

SEQ ID NO: 8153 - DNA, 1194 bp, Clostridium difficile 630
  CDS (1)..(1194): transl_table=11
atggatactttaaaggaactttttaaaataggaagtggaccttcaagttctcatactatgggaccacaaagagcagcagagagatttaagaatgaaaacccagatgcagaaagttttagagcaatattatatggtagtttggcagccacagggaaaggtcatttaactgactatataattgaaaaaactatagcacctaaaaaagtcgaaattgtttgggaagaagatattataaaagattttcacccaaatgggatgaagtttgaagctttagataaagataaaaatgtaacagctgaatggactgtatattctgtaggtggagggactatagcagaagaaggccaaagaaacagtaaaagcaatagtatatatcacttagatactatggatgagatagtaaaatggtgcaaagaaaataataagactttggtagattttgtgttggaatgtgaaccaaaagacataaaagattatataaaaactataaaagatgctatgagaaaatctattgatgatggactaagtacagatgaaataataccaggcaagttattattaaaaagaagagcaagtacattttataatgcatataaaaaagataagagcttctcaacacttgtatatgcatatgcactagcagcttcagagcaaaacgcttctggtaatataatagttacagcaccaacttgtggttctgctggagtaataccaggaatattctttgcaatgcaggatttctataattatgatgacgaaaaaataattgaagcactacttgtagctggaataataggtaatataataaaaactaacgcttcaatatctggagcagaggtagggtgtcaaggtgaagttggagccgcttgttctatggcagcagcagcagtagcatacttaaaaggtggaactatagaccatattgaatatgcggcagaaatagcacttgaacatcatttaggaatgacttgtgaccctgtatatggatatgttcaaattccatgtatagaaagaaatgcaatggcagctcaaagagcttatgatgcagctaattatgcattattaactgatggctcacattctgtctccttagaccaagttgttgaaacaatgaaagaaactggtatagatatgatggataagtacaaagaaacagctaagggtggacttgctaaacatttcttctcttgctaa

SEQ ID NO: 8154 - protein, 397 aa, Clostridium difficile 630
MDTLKELFKIGSGPSSSHTMGPQRAAERFKNENPDAESFRAILYGSLAATGKGHLTDYIIEKTIAPKKVEIVWEEDIIKDFHPNGMKFEALDKDKNVTAEWTVYSVGGGTIAEEGQRNSKSNSIYHLDTMDEIVKWCKENNKTLVDFVLECEPKDIKDYIKTIKDAMRKSIDDGLSTDEIIPGKLLLKRRASTFYNAYKKDKSFSTLVYAYALAASEQNASGNIIVTAPTCGSAGVIPGIFFAMQDFYNYDDEKIIEALLVAGIIGNIIKTNASISGAEVGCQGEVGAACSMAAAAVAYLKGGTIDHIEYAAEIALEHHLGMTCDPVYGYVQIPCIERNAMAAQRAYDAANYALLTDGSHSVSLDQVVETMKETGIDMMDKYKETAKGGLAKHFFSC

SEQ ID NO: 8155 - DNA, 1377 bp, Burkholderia vietnamiensis G4
  CDS (1)..(1377): transl_table=11
atgaacgtcagcaccttcgacctcttcaaggtcggcatcgggccctcgagctcgcataccgtcggtccgatgatcgccgcgagccgcttcgcgacgcgcatgcgcgagagcggcgtgctcgagcaggtgcgcacgctgcgcatcgagctgtacggctcgctcggtgccacgggcaagggccacggcaccgacaaggccgtgctgctcgggctcgaaggcaacctgcccgatacggtcgatcccgattacgtcgagcagcggctcgtccacattcgcacggcccggtcgctcgacctcgctggtgtgcatcggattgacttcgacgagaagacgcagctggccttcctgcggcgcgaggtgctgccgctccatccgaacgggatgcgcttcactgcactcgacgagcggggcgcgatcgtcgatgcacaggcgtactactcggtcggcggtggctttgtcgtcgacgacgagggcgaacgtctgaacggcagaacgagcgtccaggaggtgccttatccgttccgcaccggcgtggatctgttgcgtctctgcggcgaaagcggcctgtcgattgccgacgtgatgctggccaacgagacgacgtggcgcaatccgcaggcggtgcgcgccgggctgctgacaatccgcgacgtgatggcggcgtcgatcgcgcgcggctgctcgatcgaggggaccttgccggggccgctgaaggtgcggcggcgcgcatcggccgtgtatcggcaactgaaggcgcaatcggaggagagcctgcgcgatccgctgtcgatgatcgactggatcaacctttatgcgatggcggtcaatgaggagaacgcggcgggcggccgcatcgtcaccgcaccgaccaacggcgcggcaggaatcatcccggcagtgttgcagtactacacgaagttcgtggcgggatcgaacgacgacggcgtggtgacgtttctgctgaccgccgcggcgatcggcctgctctacaaggaaaacgcgtcgatttcaggcgcggaggtcggctgccagggcgaagtgggcgtcgcctgctcgatggccgccggcgcgctcgccgccgtgctggggggcacgccggagcaggtcgagaacgcggccgagatcggcatggaacacaacctggggatgacctgcgacccggtcggcgggctcgtgcagattccgtgcatcgaacgcaacgcgatgggtgcggtgaaggcggtcaacgcggcccgcatggcgctgcgaggcaatggcaagcattacgtgtcgctcgacaaagtcatcaagacgatgcgggagacgggtgccgacatgaagacgaagtacaaggaaacgtcgcgcgggggcctcgcggtcaacgtgatcgagtgttga

SEQ ID NO: 8156 - protein, 458 aa, Burkholderia vietnamiensis G4
MNVSTFDLFKVGIGPSSSHTVGPMIAASRFATRMRESGVLEQVRTLRIELYGSLGATGKGHGTDKAVLLGLEGNLPDTVDPDYVEQRLVHIRTARSLDLAGVHRIDFDEKTQLAFLRREVLPLHPNGMRFTALDERGAIVDAQAYYSVGGGFVVDDEGERLNGRTSVQEVPYPFRTGVDLLRLCGESGLSIADVMLANETTWRNPQAVRAGLLTIRDVMAASIARGCSIEGTLPGPLKVRRRASAVYRQLKAQSEESLRDPLSMIDWINLYAMAVNEENAAGGRIVTAPTNGAAGIIPAVLQYYTKFVAGSNDDGVVTFLLTAAAIGLLYKENASISGAEVGCQGEVGVACSMAAGALAAVLGGTPEQVENAAEIGMEHNLGMTCDPVGGLVQIPCIERNAMGAVKAVNAARMALRGNGKHYVSLDKVIKTMRETGADMKTKYKETSRGGLAVNVIEC

SEQ ID NO: 8157 - DNA, 1386 bp, Burkholderia vietnamiensis G4
  CDS (1)..(1386): transl_table=11
atgaacgtcagcgcgttcgacctgttcaagatcggcatcggcccgtcgagttcgcatacggtcggcccgatgatcgccgcgtgccgcttcgcgtcgcacatcgacgatgcgaacctgctcggcttcgtgcgccgcgtgcgggtcgaactatacgggtcgctcggtgccaccggcaagggccacggcaccgacaaggcggtgctgctcggcctcgaaggccatctgccggacacgatcgatcccgacctgatcgagccgcggctcgcggcgatccgcgcggagaagtcgctgacgctgctcggccggcagacgatccgcttcgaggagaaggagcatatcggcttcttccgcaagatgatgagcggcaccagcatcgttcacccgaacgggatgcgcttccaggccttcgacgagcacgggcagttgctcgtcgagaaagagtattactcgatcggcggcggcttcgtcgtgaaccgcgacggcgatcgcgtgaacggcgtgcgtgcggcggccgacgtgccgtatccgttccgcaccggcgacgacctgatgcgccagtgccgcgagcacgggctgtcgatcgccgagctgatgctgcgcaacgaagccgcgctgcgcccggccgacgaagtgcgcgcggggctgctcgcgatctggcgcacgatggccgcgtgcgtcgagcgcggctgcaaggtcgagggcgagctgcccggcccgatgcgcgtgaagcgtcgtgcggccgagctgaacggccgcctgcgggcgcgctcggaggagtcgctgcgcgatccgctgtcgatgctcgactgggtcaacctgtacgcgatggccgtcaacgaggagaacgcggcgggcggccgcgtcgtcaccgcgcctaccaacggcgcggccggcgtgatccccgcggtgctgcactactacgtgaagttcgtgccgggctcgaacgaagccggcatcctcgaattcctgctgacggccgcggcgatcggcatcatctacaaggaaaccgcgtcgatctccggcgccgaagtcggctgccagggcgaagtgggcgtcgcgtgctcgatggccgcggccgcgctcgcggcggtgatgggcggcacgccggaccaggtcgagaacgcggccgagatcggcatggagcacaacctcgggatgacttgcgacccggtcggcgggctcgtgcagattccgtgcatcgaacgcaacgcgatgggcgcgatcaaggcgctgaacgcgtcgcgcatggcgctcaaaggtaacggccagcactacgtgtcgctcgattcggtcatcaagacgatgcgcgagaccggtgccgacatgaagacgaaatacaaggaaacgtcgcgcggcggcctcgccgtgaacgtcatcgaatgctaa

SEQ ID NO: 8158 - protein, 461 aa, Burkholderia vietnamiensis G4
MNVSAFDLFKIGIGPSSSHTVGPMIAACRFASHIDDANLLGFVRRVRVELYGSLGATGKGHGTDKAVLLGLEGHLPDTIDPDLIEPRLAAIRAEKSLTLLGRQTIRFEEKEHIGFFRKMMSGTSIVHPNGMRFQAFDEHGQLLVEKEYYSIGGGFVVNRDGDRVNGVRAAADVPYPFRTGDDLMRQCREHGLSIAELMLRNEAALRPADEVRAGLLAIWRTMAACVERGCKVEGELPGPMRVKRRAAELNGRLRARSEESLRDPLSMLDWVNLYAMAVNEENAAGGRVVTAPTNGAAGVIPAVLHYYVKFVPGSNEAGILEFLLTAAAIGIIYKETASISGAEVGCQGEVGVACSMAAAALAAVMGGTPDQVENAAEIGMEHNLGMTCDPVGGLVQIPCIERNAMGAIKALNASRMALKGNGQHYVSLDSVIKTMRETGADMKTKYKETSRGGLAVNVIEC

SEQ ID NO: 8159 - DNA, 1389 bp, Burkholderia vietnamiensis G4
  CDS (1)..(1389): transl_table=11
atggcagtcagcgtgtttgacctcttcaagatcggcatcggcccgtccagctcgcatacggtcggcccgatgcgcgcggcgctgatgttcgttcagggcctggagcgcgacgggctgctcgacgcgaccgcccacgtgaaggtcgagctgtacggctcgctcggggcgaccggcaagggccacggcaccgaccgcggcgtgatgctcgggctgctcggcgacgcgcccgacaccgtcgatccggacaccatcgacgcgcggctcgaacagatccgcacgtcgaagcagctcgcgctgctcggcaggcatcctgtgccgttcgtgctgaaggagcacatcgcgttctaccggcaggcgctgccggagcatccgaacgggatgaaactgcgcgccgccgacgcggcgggcgcggtgctcgccgagcgcacctatctgtcggtcggcggcggcttcgtcgtgacggccggcgcgccgaacacgaaggtgctgagcgcggccgagcagatgacgcatccgtttcgcaccggcgccgagctgctcgcgctggccgagtcgaccggcaagtcgatcgcgcagttgatgtgggaaaacgagcgcgcgtggcacaccgaggaacagacgcgcgacggcctgctgaagatctgggcggtgatgcagtcgtgcgtatcgcgcggctgcgggatcggcaacccgaacgccgacggcaacctgcccggcccgttccaggtcaagcgccgcgcgccgcagctgtatcgcgcgctgaccggcaaccccgagcgcgcgctgcaggacccgctgtcgatggtcgactggatcaacctgtatgcgatcgcggtcaacgaggagaacgcggccggcggccgcgtcgtgaccgcgccgaccaacggcgcggccggcatcgttcccgcggtgctgcattactacacgcgcttcacgccgggcgcgaacgaacagggcgtgatcgacttcctgctgacggccgcggcgatcggcatcctgtacaagctcaacgcgtcgatttccggcgcggaagtgggctgtcagggcgaagtgggcgtcgcgtgctcgatggcggccggcgcgctcgccgccgtgctcggcggcacgccgcgccaggtcgagaacgcggccgagatcgggatggagcacaacctcggcctcacctgcgacccggtcggcgggatggtgcagatcccgtgcatcgagcgcaacgcgatggcgtcggtgaaggccgtcaacgcggcgcgcatggcgctgcgcggcgacggctcgcactacgtgtcgctcgattcggtgatcaagacgatgcgcgagacgggcgccgacatgaagacgaagtacaaggaaacgtcgcgcggcgggctcgccgtgaacatcgtcgagtgctga

SEQ ID NO: 8160 - protein, 462 aa, Burkholderia vietnamiensis G4
MAVSVFDLFKIGIGPSSSHTVGPMRAALMFVQGLERDGLLDATAHVKVELYGSLGATGKGHGTDRGVMLGLLGDAPDTVDPDTIDARLEQIRTSKQLALLGRHPVPFVLKEHIAFYRQALPEHPNGMKLRAADAAGAVLAERTYLSVGGGFVVTAGAPNTKVLSAAEQMTHPFRTGAELLALAESTGKSIAQLMWENERAWHTEEQTRDGLLKIWAVMQSCVSRGCGIGNPNADGNLPGPFQVKRRAPQLYRALTGNPERALQDPLSMVDWINLYAIAVNEENAAGGRVVTAPTNGAAGIVPAVLHYYTRFTPGANEQGVIDFLLTAAAIGILYKLNASISGAEVGCQGEVGVACSMAAGALAAVLGGTPRQVENAAEIGMEHNLGLTCDPVGGMVQIPCIERNAMASVKAVNAARMALRGDGSHYVSLDSVIKTMRETGADMKTKYKETSRGGLAVNIVEC

SEQ ID NO: 8161 - DNA, 1392 bp, Candidatus Protochlamydia amoebophila UWE25
  CDS (1)..(1392): transl_table=11
atggctgtcagtgtgtttaatttattttcgattggtattggcccttcgagttcgcacacagttggacccatgcgcgcagcgcgacagtttgtggtcaatttacagttaaacgatatgttagtggatgtccacagaataaaaatggagctttatggctcattggctttaacaggaaaaggacactccacagatattgctgttttgcttggcgtagaaggaaatgctccggaaggaatcgacccaagagatgtagagccacgcattaaatggattcgggaaaattgcaaaatctctttacttaattctcgattgattgagtttcaagaagaagttgatttaattttccattctgataaacagcttccttttcatcccaatggaatgcgatttacagcctttaatacctgccatcgagaaatatctcaagaagttttttattcagtaggcggtggctttattgtcgatcatcatgcagccatgaaagatgaaacaatttgtcaaaatgatcatcatttaccttatccttttaaaacggcggatgaattattacttctttgtaaaaaacataatttttcaattgctgaattgatgtgggaaaacgaaaaatcttggcgtacagaagaagaaattgaaataggacttctcaatatttggaatgtcatgcagacttgtgtaaagcatggctgcgaaaaagaaggggtattacctgggggcctaaatgttaaaagacgcgcagcaagtatctatcgatatttacaagaacaagaattaaaacctttagaaaagcgagatcgtgctgaagttatagattgggtcagtctgtgggcattggctgtcaatgaagaaaatgcagcaggagggcgtgttgtcacagctccaacgaacggagcagccggagtcattcccgctgtgcttcattactatgaaaaatttataaaaaattcaaattctaaaggaattatcacttttttattagttgctggagcaattggaattttatacaaagaaggagcttcgatttcagcggcagaaatggggtgtatgggagaagttggggttgcgtgttcaatggcagcagctggccttgcagccgctcttggtgcaagcaatgaacaaattgaaaatgcagcagaaatcggaatggaacataatttgggattaacctgtgatcccattaaaggtttagtgcaaattccttgtattgaaagaaatacaatgggggctactaaagcgattaatgcagaaagattagctagactacatggagatggtacgcaccgagtaactttagatcaagtaatcgccacaatgaaacaaactggccatgatatgatgtctatttataaagaaacatctcaaggtgggctggctgttaatgtaccagaatgttag

SEQ ID NO: 8162 - protein, 463 aa, Candidatus Protochlamydia amoebophila UWE25
MAVSVFNLFSIGIGPSSSHTVGPMRAARQFVVNLQLNDMLVDVHRIKMELYGSLALTGKGHSTDIAVLLGVEGNAPEGIDPRDVEPRIKWIRENCKISLLNSRLIEFQEEVDLIFHSDKQLPFHPNGMRFTAFNTCHREISQEVFYSVGGGFIVDHHAAMKDETICQNDHHLPYPFKTADELLLLCKKHNFSIAELMWENEKSWRTEEEIEIGLLNIWNVMQTCVKHGCEKEGVLPGGLNVKRRAASIYRYLQEQELKPLEKRDRAEVIDWVSLWALAVNEENAAGGRVVTAPTNGAAGVIPAVLHYYEKFIKNSNSKGIITFLLVAGAIGILYKEGASISAAEMGCMGEVGVACSMAAAGLAAALGASNEQIENAAEIGMEHNLGLTCDPIKGLVQIPCIERNTMGATKAINAERLARLHGDGTHRVTLDQVIATMKQTGHDMMSIYKETSQGGLAVNVPEC

SEQ ID NO: 8163 - DNA, 1509 bp, Desulfovibrio vulgaris subsp. vulgaris str. Hildenborough
  CDS (1)..(1509): transl_table=11
atgcagcctctcgtcccatgttccgccatcgccatatcgcttttcgacctgttcgaggccggacccggcccctccagttcacataccatcggtcccatgaaggcgggttacgacttcgcgcagcggtgcgccaccctgccggacgacatcctgtgccgtgccgcaggggtgcgtgtgcgccttttcggttcgctgagcgccacgggctatggtcatggaaccgatatggctgttctggcagggcttgcggggcagcttcctgcgtcgtgcccgccggagtaccttgtgcggcccgaaggcgcgggagaggaacgccctgccaccgacacgaccttggcggatggtcgctacgccagccttctggggtgcgagggggtcgtccccgtccccgtcgcagggcaagggcaggggcactccgcatccggtgccgtggtgcggtacatgatgcttcgtgacgggctgcggttgccgctcacttcggcctgtgtcgtgcacgacgccgtgcagcatgagcatccgttcagcaatacgcttgtgctggagttgcttggtgatacaggggcgtcgctcttctcgtatacctactattccgtcgggggcggcttcatccagtgggagggctggcagcccgaagaacgcggtgcgcctgtccatccgtactgcaccatgcgccagttgcgcgaatgcatggacgacacggggctggccctgcatgagatcatcctcgagaacgagatggcggtgacgggggcctcgcgcgcatccatcgtggcgcggctggacaccatcataggcctcatggaggcgagtgtggagcgcggactggcgacgacaggacgcctgccgggtacgctgggcgtgtttcgcaaggccagtacattgatggcgcgtgccggaaagctgccgcatgccgttgatgccttcctgtgccgactcaacgcctatgccttcgccgtgtcggaggagaatgcctccggcggggtcatcgtcaccgcgcctacctgcggggctgcgggggtgatgcctgccgtgctgtacgccatgcgtaacgatttcagcatcggtgacagggccgtgcgcgaaggcgtgctggcgtcggcggctgtgggctttctcgccaagcagaatgcgggcatcgcgggcgcggaggtgggttgtcagggcgaggtgggggtggcttcggccatggctgccgccatgctggcacacgctagaggcaacgccgtgcgcgtggtggagaatgccgctgaaatcgcgctggaacaccaccttggcctcacctgcgaccccgtgggcggctacgtgcagataccgtgcatcgaacgcaacgccgtgggcgcggtgaaagcctacaacgcctgccttgtggctacctgcgaagaccccaagcaccaccgcgtgacgctggataacgtcatccgcgccatggccgagataggccacgacatgaacgccaagttcaaggagacctcagcgggtggacttgcggtgagtgtggttgaatgttga

SEQ ID NO: 8164 - protein, 502 aa, Desulfovibrio vulgaris subsp. vulgaris str. Hildenborough
MQPLVPCSAIAISLFDLFEAGPGPSSSHTIGPMKAGYDFAQRCATLPDDILCRAAGVRVRLFGSLSATGYGHGTDMAVLAGLAGQLPASCPPEYLVRPEGAGEERPATDTTLADGRYASLLGCEGVVPVPVAGQGQGHSASGAVVRYMMLRDGLRLPLTSACVVHDAVQHEHPFSNTLVLELLGDTGASLFSYTYYSVGGGFIQWEGWQPEERGAPVHPYCTMRQLRECMDDTGLALHEIILENEMAVTGASRASIVARLDTIIGLMEASVERGLATTGRLPGTLGVFRKASTLMARAGKLPHAVDAFLCRLNAYAFAVSEENASGGVIVTAPTCGAAGVMPAVLYAMRNDFSIGDRAVREGVLASAAVGFLAKQNAGIAGAEVGCQGEVGVASAMAAAMLAHARGNAVRVVENAAEIALEHHLGLTCDPVGGYVQIPCIERNAVGAVKAYNACLVATCEDPKHHRVTLDNVIRAMAEIGHDMNAKFKETSAGGLAVSVVEC

SEQ ID NO: 8165 - DNA, 1398 bp, Bartonella quintana str. Toulouse
  CDS (1)..(1398): transl_table=11
gtgtttttatccgtttttgaactttttaaaattggtattggtccttccagttcacatacaatggggccgatgactgctgctaatatgtttttgcaagagattattgcacgggatttttttcggtcatcttatgctggagtttctcatatacgtgtatatctttatggttcattggctttcacgggaattggccatgctacagatagagctattgtattaggacttttgggagaaggggcctctactgtggatcctgataaaatggggatgctgttagaaaaggttaaacgggaaaaaaaagtacaaccggaaggccatcccgcttatcagtttaattcgcatagagatcttatttttgaacgaaagacagtcttgcctggacatcctaatgggcttgcatttgaggggcttgatgctgatggaaatgttcttttacggcagatttattattctattggcggtggttttgttgtgactgaggatgaattaagccgtatgaatggcaacacacaaccagaaacatctaaggtgccatatccctttgattctgcaagtaaaatgttattaatggctgaaaagtcaggactttcaattgctgaaatgaagcgttttaatgaagaaacaaagatggagcgttctgctcttgatactgggcttgatgaaattttttcagctatgataaattgtattgatagagggctttcacaagaaggtgagttgccgggcggattgcgcgttccaaggcgtgctaaaaaattgcacgataagcttttggaaaatcgcaaaaagaatcgaaatcaccctatctgggcaaacgactggctttctgtgtacgctatagcggtgaatgaggaaaatgcagcaggtggtcgtgttgttactgcacccacgaatggcgcagctggtattgtgcctgcagttttgcgttattatcttcaatttaatgatggttcagatcgagagggaatacataattttttattgacagcagcagctattggtggtgtcattaaacacaatgcttctatttctggtgcagaagttggttgtcaaggagaagttggaacggcatcttcaatggcagccgcagggttgactgcggcgttgggtggtacaccggctcaaattgaaaatgccgcggagattgcacttgagcatcatttgggaatgacatgtgatccagttgcaggtcttgtacaggttccttgtattgagcgcaacgcaatgggtgctgttaaggcggtgactgcttcttctcttgcgttgcatggtaatggaaggcattttgtttctcttgatgcttgtatagaaacaatgcgccagaccggatatgatatgaatgaacgctataaagaaacgagtaaaggtggcctcgcagtcaatgcaatatcctgttaa

SEQ ID NO: 8166 - protein, 465 aa, Bartonella quintana str. Toulouse
MFLSVFELFKIGIGPSSSHTMGPMTAANMFLQEIIARDFFRSSYAGVSHIRVYLYGSLAFTGIGHATDRAIVLGLLGEGASTVDPDKMGMLLEKVKREKKVQPEGHPAYQFNSHRDLIFERKTVLPGHPNGLAFEGLDADGNVLLRQIYYSIGGGFVVTEDELSRMNGNTQPETSKVPYPFDSASKMLLMAEKSGLSIAEMKRFNEETKMERSALDTGLDEIFSAMINCIDRGLSQEGELPGGLRVPRRAKKLHDKLLENRKKNRNHPIWANDWLSVYAIAVNEENAAGGRVVTAPTNGAAGIVPAVLRYYLQFNDGSDREGIHNFLLTAAAIGGVIKHNASISGAEVGCQGEVGTASSMAAAGLTAALGGTPAQIENAAEIALEHHLGMTCDPVAGLVQVPCIERNAMGAVKAVTASSLALHGNGRHFVSLDACIETMRQTGYDMNERYKETSKGGLAVNAISC

SEQ ID NO: 8167 - DNA, 1398 bp, Bartonella henselae str. Houston-1
  CDS (1)..(1398): transl_table=11
gtgtttttatctgtttttgaactttttaaaattggtattggtccatccagctcccatacgatggggccgatgactgctgctaatatgtttttgcgagagattatgagatgcaattttttaagatcatctcatactgggatttctcatatacgtgtctatctttatggttcattagcttttacgggagttggtcatgctacagatagagctgttatattaggacttttaggagaagaagccgcaactgttaatcctgataatatagatatactgttagaaaaggttacacgtgaaaagaaagtgcaaccagacggccatcctgcttattggtttaatttgcaaagtgatcttatttttaaacgaaaggaagttttacctggacatactaatggacttgcgtttgaagggcttgatgctgatgggaacgttcttttgaggcagacttattattctatcggtggtggttttgtggtgactgaggatgaattaaactgtataaatggtaatacgcaatcaaaaacttctaaggtaccatatccttttgattctgcgcgtaaaatgttatcaatggcagaaaaatcagggttatcaattgctgaaatgaagcgcttaaatgaagagacaaagatggagcgttctgcgcttaatacaggccttgataatattttttcagcgataacaaaatgcattgatagaggtctttcacaagaaggtgagttaccaggtggattgcgtgtttcaaggcgtgctaaaaaactatatgaaacgcttttggaaaaccagaagaaaaatcgcaattatccacttttagcaaatgattggctttcagtatatgccatagcagtgaatgaggaaaacgccgctggtggtcgtgttgttacggcaccgacgaatggtgcagctggtgttgtgcctgcagttttgcgttattatcttcagtttaatgataattcagatcaagaaggaatacataattttttgttgacagcagcagctattggtggtgtcatcaagcataatgcctctatttctggtgcagaagtgggttgtcaaggtgaagtgggaacagcatcttcaatggcagctgcaggattgacagctgtgttaggtggtacaccggctcaaattgaaaacgcagcagagattgcacttgagcatcatttgggaatgacgtgtgatccggttgcaggtcttgtacagattccttgcattgaacgcaatgcgatgggggccgttaaggcggtaacagcttcttctcttgcgttgcatggtaatgggaagcattttgtttctcttgatgcttgtatagaaacaatgcgtcagaccggacatgatatgagtgaacgctataaagaaacgagtaaagctggtctcgcagttaatgcaatatcctgttaa

SEQ ID NO: 8168 - protein, 465 aa, Bartonella henselae str. Houston-1
MFLSVFELFKIGIGPSSSHTMGPMTAANMFLREIMRCNFLRSSHTGISHIRVYLYGSLAFTGVGHATDRAVILGLLGEEAATVNPDNIDILLEKVTREKKVQPDGHPAYWFNLQSDLIFKRKEVLPGHTNGLAFEGLDADGNVLLRQTYYSIGGGFVVTEDELNCINGNTQSKTSKVPYPFDSARKMLSMAEKSGLSIAEMKRLNEETKMERSALNTGLDNIFSAITKCIDRGLSQEGELPGGLRVSRRAKKLYETLLENQKKNRNYPLLANDWLSVYAIAVNEENAAGGRVVTAPTNGAAGVVPAVLRYYLQFNDNSDQEGIHNFLLTAAAIGGVIKHNASISGAEVGCQGEVGTASSMAAAGLTAVLGGTPAQIENAAEIALEHHLGMTCDPVAGLVQIPCIERNAMGAVKAVTASSLALHGNGKHFVSLDACIETMRQTGHDMSERYKETSKAGLAVNAISC

SEQ ID NO: 8169 - DNA, 1365 bp, Erwinia carotovora subsp. atroseptica SCRI1043
  CDS (1)..(1365): transl_table=11
gtgataagcgttttcgacatgtttaagatcggtattggcccctctagctctcatacggttggaccgatgaaagccggtaagcaatttgtcgatgaattgatcaatcagaatttactgactgcgaccacgcgtattgccgtcgatgtttatggctctctgtcgctgacgggtaaaggccaccatacggatatcgctatcatcatgggtctggcgggcaacatgccggataccgttgatattgatgcgattcccggatttatccgtgatgttgagcaacgccaacgtctgctgctggctaacgggcagcatgaggtcgatttcccacgcgaaggcggcatggttttccgcagcgagaatctgccactgcacgaaaacggcatgactatcaccgcctttgccagcaataaagaaatttatagtaaaacctattactccatcggcggtggcttcatcgttgatgcagagaattttggcaaagacgccactaccgatgtctccgttccctatacattcaattccgccaaagagatactggatcactgcaagcagagtggtctgtcactttccgggatggtcatgcggaacgagctggcgctgcacagtcgtcaggatattgacgcctattttgctgatatctggcagacgatgcgtgcctgtatcgatcgcggtataaataccgaaggcgttttgcccggcccgctgcgcgtaccacgccgtgcctctgcgctgcgtcgtatactggtgtcttccgataagctgtccaacgacccgatgaacgtggtggactgggttaatatgttcgcgctagcggtaaatgaagaaaacgccgctgggggccgggtggtgacggcaccaacgaacggcgcgtgcggcatcgtcccagctgtcctcgcctattatgatcacttcatcgagccagtgagtccgaccatttatattcgttatttcctcgccgcgggcgcagtgggcattctgtataaaatgaacgcctccatctccggtgccgaagtgggctgtcagggtgaagtgggcgtagcctgctccatggcagcagcgggactggcagagctaatgggtgctagcccggaacaagtttgcgtcgccgccgagatcggtatggaacacaatctgggcttaacctgcgatccggttgcgggtcaagtacaggttccgtgtatcgaacgtaacgcgattgcttccgttaaggcaattaatgctgcccggatggccatccgccgtaccagtgaagcacgcgtatcactggataaggtgattgaaaccatgtacgagacgggtaaagacatgaatgccaaatatcgtgaaacctcacggggcggattggctatcaaagtgcagtgtgattaa

SEQ ID NO: 8170 - protein, 454 aa, Erwinia carotovora subsp. atroseptica SCRI1043
MISVFDMFKIGIGPSSSHTVGPMKAGKQFVDELINQNLLTATTRIAVDVYGSLSLTGKGHHTDIAIIMGLAGNMPDTVDIDAIPGFIRDVEQRQRLLLANGQHEVDFPREGGMVFRSENLPLHENGMTITAFASNKEIYSKTYYSIGGGFIVDAENFGKDATTDVSVPYTFNSAKEILDHCKQSGLSLSGMVMRNELALHSRQDIDAYFADIWQTMRACIDRGINTEGVLPGPLRVPRRASALRRILVSSDKLSNDPMNVVDWVNMFALAVNEENAAGGRVVTAPTNGACGIVPAVLAYYDHFIEPVSPTIYIRYFLAAGAVGILYKMNASISGAEVGCQGEVGVACSMAAAGLAELMGASPEQVCVAAEIGMEHNLGLTCDPVAGQVQVPCIERNAIASVKAINAARMAIRRTSEARVSLDKVIETMYETGKDMNAKYRETSRGGLAIKVQCD

SEQ ID NO: 8171 - DNA, 1368 bp, Erwinia carotovora subsp. atroseptica SCRI1043
  CDS (1)..(1368): transl_table=11
atggtcagcgtatttgatatcttcaaaatcggtatcggcccgtccagttcccataccgtcggcccgatgaaagcgggtaaaatgttcactgacgatctggtgaacctctcctttatctcatcggtgacgcgtatcgtcgttgatatttacggttcactctctctaacgggaaaagggcaccacaccgatatcgccatcattatggggctcgcgggtaacctgccagatagcgtaaacatcgatagtattccggcctttattcaacaggtgaaagacacacaacggctaccgatactcaacggccagtatgaggtcagcttcccgctggaatcttccctgcgtttccaaccggaaaacctgccgctgcatgaaaacggcatgactattcgcgcctataaccaacaagagctggtctatagcaaaacgtattactccatcgggggcggattcgtcgtcgatcaggaaaatttcggcaaacccaatttggcagacgaaagcgcgccctacccattcttttctgcccagaagttgctgcaacattgtcacgatcactgcttgtctttatccgccatcgtcctgaaaaacgagatcgcgatgcatggacgagaagcgcttgagctctattttgccgacgtgtggaagactatgcaggactgcatgcatcgcggcatgaatactgaaggggtgttgcccggcccattacgcgttccgcgccgcgcatcggcgctgcatcgcctgttgttcatcaacgatcgtttttctaatgacccgatggatgccatggactggattaacatgttcgcgatggccgtatcggaagaaaatgcagcgggcgggcgtgtcgtcacagcgccgaccaacggcgcgtgcggcattattcccgccgtattggcctattacgatcgctacgttcaacccgttaccccggaagcgtatctgcgctactttctggcatccggtgctgtcggcatactttacaaaatgaacgcctctatttccggtgccgaagttggctgccagggggaagtcggcgttgcctgttcgatggccgcagctggtctagctgagttactgggtgccaaccctgaacaagtgtgcatcgccgcagaaattggcatggagcataatctcgggctgacgtgcgatccggtagcgggtcaggttcaggtgccgtgtattgaacgtaacgctatcgcctccgtgaaggcgatcaacgcagcaagaatggcaatgcgccgtaccagcgagccacgcgtatcactggataaggtcattgaaaccatgtatgaaacaggcaaagacatgaatgccaagtaccgagaaacgtctcgcggggggttggccatcaaagtggttctgtgtgaataa

SEQ ID NO: 8172 - protein, 455 aa, Erwinia carotovora subsp. atroseptica SCRI1043
MVSVFDIFKIGIGPSSSHTVGPMKAGKMFTDDLVNLSFISSVTRIVVDIYGSLSLTGKGHHTDIAIIMGLAGNLPDSVNIDSIPAFIQQVKDTQRLPILNGQYEVSFPLESSLRFQPENLPLHENGMTIRAYNQQELVYSKTYYSIGGGFVVDQENFGKPNLADESAPYPFFSAQKLLQHCHDHCLSLSAIVLKNEIAMHGREALELYFADVWKTMQDCMHRGMNTEGVLPGPLRVPRRASALHRLLFINDRFSNDPMDAMDWINMFAMAVSEENAAGGRVVTAPTNGACGIIPAVLAYYDRYVQPVTPEAYLRYFLASGAVGILYKMNASISGAEVGCQGEVGVACSMAAAGLAELLGANPEQVCIAAEIGMEHNLGLTCDPVAGQVQVPCIERNAIASVKAINAARMAMRRTSEPRVSLDKVIETMYETGKDMNAKYRETSRGGLAIKVVLCE

SEQ ID NO: 8173 - DNA, 1437 bp, Propionibacterium acnes KPA171202
  CDS (1)..(1437): transl_table=11
atgtctgtggcagtcagcgttttcgatatcttcaaggtcggcatcggtccgtctagttctcataccgtcggccccatgcgagccgcccggattttcgtgactgatctggctcagtcaccggtatggcctgaggtcacccgcgtgcgtgcggagctcttcggctcgttgggagcgaccgggcacggacacgggtctgaggccgccgtcttgctgggtctggaaggcgaagatccggccaccgtcgacacggatcagactccggctcgagccgcgtctatcgccaatgatggccgtatcactctggatgctgtccatggcggtcgggagatttcctttgacgtcacgaccgaccttgtccttcaccgcaaccggtccctcccttttcatcccaacggcatgacgttcaccgcctggtctggccaggaagtcgtggtcgagcgcactttctactccatcggcggcggttttgtcgttgagcacggagaggacgagcaccccgccatcgtgcgcgactcggcaccggtcccttaccctttcaagaccggcaaggaacttctcgagcagtgctcggactatcggatgagcatccccgaagtcgcaatggccaatgagatgaccctccgtgcagaggaggaaatacgcggccagctcctcgacatctgggcagtcatgcacgcctgcgtcgagcgcggctgctcgcgcgccggcgttcttccgggcggtctgcatgtgcgccgccgcgccatgaagatgcaccacgatcttgtcacccgggagcggatcaccccgggcaagccggaaccattcggctcggttgactggctaacagtgtgggcgttggcagtcaatgaggagaacgccgcgggtggacgtattgttaccgcccctaccaacggcgcggccggcatcatcccgtcctgcctgcactttgcggtgaagttcctctcccccggttcggacatcgattcgggcactcctggcgtcgacaccggtgatgacgacctcatcgtcaattatctgctagcggccggcgccgtcggggagatctaccaacagtccgcatcgatctctggggccgaggtcggctgccagggcgaggtcggcgtggcctgctcgatggctgcggctggtctagctcaggtcatgggcgggacgccgacccaggtctgcaacgccgccgagattggcctagagcaccacctcgggctcacctgcgaccccgtcgggggcctagtacagatcccgtgcattgaacgcaacgcccttggtgctatcaaggccgtcacagctgcccgcctagccatggctggggacggctcccagatcgtcagtctggatcaggtcatgaagacgatgatggagaccggacgcgacatgaaggtcaaatacaaggagacggcgcgcggtgggttggccgtgaatatcgtcgagtgctag

SEQ ID NO: 8174 - protein, 478 aa, Propionibacterium acnes KPA171202
MSVAVSVFDIFKVGIGPSSSHTVGPMRAARIFVTDLAQSPVWPEVTRVRAELFGSLGATGHGHGSEAAVLLGLEGEDPATVDTDQTPARAASIANDGRITLDAVHGGREISFDVTTDLVLHRNRSLPFHPNGMTFTAWSGQEVVVERTFYSIGGGFVVEHGEDEHPAIVRDSAPVPYPFKTGKELLEQCSDYRMSIPEVAMANEMTLRAEEEIRGQLLDIWAVMHACVERGCSRAGVLPGGLHVRRRAMKMHHDLVTRERITPGKPEPFGSVDWLTVWALAVNEENAAGGRIVTAPTNGAAGIIPSCLHFAVKFLSPGSDIDSGTPGVDTGDDDLIVNYLLAAGAVGEIYQQSASISGAEVGCQGEVGVACSMAAAGLAQVMGGTPTQVCNAAEIGLEHHLGLTCDPVGGLVQIPCIERNALGAIKAVTAARLAMAGDGSQIVSLDQVMKTMMETGRDMKVKYKETARGGLAVNIVEC

SEQ ID NO: 8175 - DNA, 1209 bp, Desulfotalea psychrophila LSv54
  CDS (1)..(1209): transl_table=11
atgcaatcattacaatatctctatcgctatggcatggggccttcatcgagtcataccattgggcctaacaatgcagctcggctgtttaaagccaagagcaaagatgcagtatcttatcgggtaagcctctatggcagtctcagcctaacgggtaagggccatcttactgataaggccatcattacggcccttgccccaatcccctgtgaaattgtttggattgataaagagttatcctttcatcccaatggcatgaaactggaggcccttgatggtgcaggccaggtaatagatgagtggaccacctttagcattggtggcggagagttgcgcgatgagggagcaggagctagtgagcagcctcatatctatagtcaaaaatccatggcagatgttcttgagtgggcaagcttttcaggcagaccaatttggcaattggtggaagagacagaggaaaagggctttgtcgaaggctacctcgctgatatctggatgaagatgcaggagagcatcgacgccggtttaaagagagagggggtgttgcagggaggtttaaaattaagcagaaaggccagagattttatggttcaggccaggaggttaaaggataccgagggacgtaccggtctcctctccggttatgccctagccgtagctgaagaaaatgctgatggtggttttgtggttactgctcccacctgtggttcctgcggtatcctgccaagtgttctttactattacttttttgaaaagggccatagtatgagaagtattttaaatgcgatggctaccgctggtattattggcaatttggttaaagaaaatgcctctatatccggtgctgaggtagggtgtcagggtgaggtgggtacggcctgtgccatggctgcaggtgctgttgctcaactcatgggtggttcaccaagacagattgaatatgctgcggaaatggcactggagcaccatcttggccttacctgtgatcctattttaggacttgttcaggtgccctgtattgaacgcaatgcctttgcggcagtaaaggccgttgcctgtgcagagtattccctactctccgatggcagtcatttagtttcctttgataaggttgtgaagaccatgcaaaaaactggtcacgatatgctttccctctatcgtgagacctcacttggtggtcttgccacctcatattttgagacgcataagtag

SEQ ID NO: 8176 - protein, 402 aa, Desulfotalea psychrophila LSv54
MQSLQYLYRYGMGPSSSHTIGPNNAARLFKAKSKDAVSYRVSLYGSLSLTGKGHLTDKAIITALAPIPCEIVWIDKELSFHPNGMKLEALDGAGQVIDEWTTFSIGGGELRDEGAGASEQPHIYSQKSMADVLEWASFSGRPIWQLVEETEEKGFVEGYLADIWMKMQESIDAGLKREGVLQGGLKLSRKARDFMVQARRLKDTEGRTGLLSGYALAVAEENADGGFVVTAPTCGSCGILPSVLYYYFFEKGHSMRSILNAMATAGIIGNLVKENASISGAEVGCQGEVGTACAMAAGAVAQLMGGSPRQIEYAAEMALEHHLGLTCDPILGLVQVPCIERNAFAAVKAVACAEYSLLSDGSHLVSFDKVVKTMQKTGHDMLSLYRETSLGGLATSYFETHK

SEQ ID NO: 8177 - DNA, 1365 bp, Yersinia pseudotuberculosis IP 32953
  CDS (1)..(1365): transl_table=11
gtgattagcgtttttgacatgtttaagattggtatcggtccgtccagctctcataccgttgggccaatgaaagcgggtaagcaatttgtcgatttgctgataaccgaaggattgatgccgtctatcacgcgtgttgccgtcgatgtttacggctcactgtcgctgaccgggaaaggccatcacaccgatatcgccattattatgggtctggcaggtaacctgcctgataccgttgatatcgacagcatccctgcgtttatccgcgatgttgaattacgccaaaaactgatgttggcaaatggcctgcatgaagtcgatttcccccgtgaaggcgggatggtcttccgcagcgataatctgccactgcatgagaatggcatgcaaattcatgcttttgctggcgatgaaaaagtcctcagcaaaacatactactccatcggcggtggttttatcgttgatgaagagaattttggcaaagccagcgtgaatgacgttagcgtcccctacccgtttaactctgctgccgaaatattagccaactgcgagcaaactggcctgtctatctccggtatggtgatgcagaatgaactggcgatgcacagtaaagaagagattgagtcctatttcaccgccatctggcagaccatgcgcgcctgtatcgatcgcggtttgaataccgagggtgtgctgcctgggccactgcgtgtaccacgtcgtgcatcggcattacgccgcctgctggtctcttccgataagctgtccagtgaccccatgattgtcattgactgggtcaatatgttcgcactggccgtgaatgaagaaaatgcggcaggtggacgtgtcgtgacggcacccactaacggggcttgcggtatcgttccggcggttctggcctattacgatcactttatcgaaccggtgacacctgaaatctttattcgttatttcctcgcatctggtgccatcgggattttgtataagatgaatgcttctatttctggtgcagaggtgggttgtcagggcgaagtgggcgttgcctgttcaatggcggccgctggtcttgctgaattgctgggtgctagcccgatccaagtctgtatcgcagccgagattggcatggaacacaacttaggtctgacctgcgacccggttgcgggtcaggtacaggtaccgtgtattgaacgcaatgcgattgcatcggtaaaagcgatcaactccgcacggatggcgatacgccgtaccagtgaaccgcgcgtctccctcgataaagttatcgaaacgatgtttgaaacaggtaaagatatgaatgccaaataccgcgaaacatcgcgtggtggcctggcgattaaagtgcagtgtacttga

SEQ ID NO: 8178 - protein, 454 aa, Yersinia pseudotuberculosis IP 32953
MISVFDMFKIGIGPSSSHTVGPMKAGKQFVDLLITEGLMPSITRVAVDVYGSLSLTGKGHHTDIAIIMGLAGNLPDTVDIDSIPAFIRDVELRQKLMLANGLHEVDFPREGGMVFRSDNLPLHENGMQIHAFAGDEKVLSKTYYSIGGGFIVDEENFGKASVNDVSVPYPFNSAAEILANCEQTGLSISGMVMQNELAMHSKEEIESYFTAIWQTMRACIDRGLNTEGVLPGPLRVPRRASALRRLLVSSDKLSSDPMIVIDWVNMFALAVNEENAAGGRVVTAPTNGACGIVPAVLAYYDHFIEPVTPEIFIRYFLASGAIGILYKMNASISGAEVGCQGEVGVACSMAAAGLAELLGASPIQVCIAAEIGMEHNLGLTCDPVAGQVQVPCIERNAIASVKAINSARMAIRRTSEPRVSLDKVIETMFETGKDMNAKYRETSRGGLAIKVQCT

SEQ ID NO: 8179 - DNA, 1365 bp, Mannheimia succiniciproducens MBEL55E
  CDS (1)..(1365): transl_table=11
atgattagtgtctttgatatgtttaaagtcggcatcggtccctcaagttcgcatacggtaggcccgatgaaagcgggtaaacagtttatcgatgatttaattacacaagggaacattggcaaaatcacccgaattcatgccgatgtgtacggttcgctttccatgacggggctcgggcacaatacggatattaccattattatggggcttgcgggctaccttccgcataatgtagacatcgacagcattgccgatttcatttcccgggtaaaacagaccgcacttttacctgttgccggaggttcatatacggtcgacttcgatttcaaacaggatatgcagttccatgattcctttttatctctccatgaaaacggcatgacattaaccgcatttatgaatgatgaaatcgcttatcgccaaacctattattccattggcggcggttttattgttggcgaagcgcattttaatcaagcgcaaaatgaagaagtaccggtgccttatccttataacaatgcggcggatattctccgccattgccatgataccgggctgccgatttccaccgtagttttccgaaacgaagtggcattgcacggcaaagaatccgtcgaacatcatttatccctgatttggcaaaccatgcaggattgcattaaacacggactaaaaaccgaaggcttattgcccggcccgttaaaagtgagccgcagggcacccgcattacatcgtttattacaggcgaacagtaatctgaataatgatccgatgcaggttatcgactggatcaatatgttcgcccttgccgttaatgaagaaaatgcggcgggcgggcgcgttgttaccgcaccgacgaacggcgcctgcggtatcgtgccggcggtactttcttattatgaaaaatttatctcgccgctaaatgccgaaaccgtcgaacgttatttattggtttgcagtgtaatcggttctctttacaaaatgaatgcctcaatttcaggtgctgaagtgggttgtcaaggcgaagtgggcgttgcctgttccatggcggcagccggcttaaccgaaattttaggcggaaatcccgaacaagtatgtattgctgcggaaattgctatggaacacaatttaggtttgacctgcgaccccgttggcgggcaggttcaagtaccttgcatcgagcgtaacgccattgcctccgtaaaagccattaatgccgctcgcatggcgctacgccgaagcactaatccgcgcgtaactttagataaagtcatcgaaaccatgtacgaaaccggcaaagatatgaatgcaaaatatcgggaaacttcaaaaggcggtttggcaattaaagtggtatgtagctga

SEQ ID NO: 8180 - protein, 454 aa, Mannheimia succiniciproducens MBEL55E
MISVFDMFKVGIGPSSSHTVGPMKAGKQFIDDLITQGNIGKITRIHADVYGSLSMTGLGHNTDITIIMGLAGYLPHNVDIDSIADFISRVKQTALLPVAGGSYTVDFDFKQDMQFHDSFLSLHENGMTLTAFMNDEIAYRQTYYSIGGGFIVGEAHFNQAQNEEVPVPYPYNNAADILRHCHDTGLPISTVVFRNEVALHGKESVEHHLSLIWQTMQDCIKHGLKTEGLLPGPLKVSRRAPALHRLLQANSNLNNDPMQVIDWINMFALAVNEENAAGGRVVTAPTNGACGIVPAVLSYYEKFISPLNAETVERYLLVCSVIGSLYKMNASISGAEVGCQGEVGVACSMAAAGLTEILGGNPEQVCIAAEIAMEHNLGLTCDPVGGQVQVPCIERNAIASVKAINAARMALRRSTNPRVTLDKVIETMYETGKDMNAKYRETSKGGLAIKVVCS

SEQ ID NO: 8181 - DNA, 1389 bp, Burkholderia pseudomallei K96243
  CDS (1)..(1389): transl_table=11
atggcagtcagcgtgttcgatcttttcaaaatcggtatcggcccgtcgagctcgcatacggtcgggccgatgcgcgccgcactgatgttcgcgcaagggctcgagcgcgacgcgctgctcgccgcgaccgcgagcgtgaaggtcgagctgtacggctcgctcggcgcgaccggcaagggccacggcaccgatcgcggcgtgatgctcggcctgatgggcgacgcgcccgacaccgtcgatccgtcgacgatcgccgcgcggctcgacgcggtgcgcacctcgaaaacgctcgcgctgctcggcacgcatccggtaccgttcgtgccgaaggaacacatcgcgttctaccggcaggcgctgcccgagcacccgaacgcgatgaagctgcgcgcggccgacacggcgggcgcggtgctgcgcgaggcgacgtatctttcggtgggcggcggcttcgtcgtcacctcgggcgcgccgaacacgaaagtgctcgccgccgccgaacagatgccgcacccgtttcgcacgggcgccgagctgctcgcgctcaccgcgtcgaccggcaagtcgatcgcgcagctgatgtgggagaacgagcgcgcgtggcacaccgaggaggaaacgcgcacgggcctgctgaagatctgggacgtgatgcaatcgtgcgtcgcgcgcggctgcggaatcggcaaccccgacgcggacggcaacctgcccgggccgttccaggtcaagcgccgcgcgccgcagctctatcgcacgctgacgggccatccggaacgcgcgctgcaggacccgctgtcgatggtcgactggatcaacctgtatgcgatcgcggtcaacgaggaaaacgcggcgggcgggcgcgtcgtcaccgcgccgaccaacggcgcggcgggcatcatcccggccgtcctccattactacacgcgcttcacgccgggcgcgaacgagcagggcgtgatcgatttcctgatgaccgcggcggcgatcggcatcctctacaagctcaacgcatcgatctcgggtgccgaagtcggctgtcagggcgaagtcggcgtcgcgtgctcgatggcggcgggcgcgctcgccgcggtgctgggcggcacgccgcagcaggtcgagaacgcggccgagatcgggatggagcataacctcggcctcacctgcgatccggtcggcgggatggtgcagattccgtgcatcgagcgcaacgcgatggcgtcggtgaaggccgtcaacgccgcgcgaatggcgctgcgcggcgacggcagccactacgtgtcgctcgactccgtgatcaagacgatgcgcgaaaccggcgcggacatgaagacgaagtacaaggagacctcgcgcggcgggctcgcggtgaatatcgtcgagtgctga

SEQ ID NO: 8182 - protein, 462 aa, Burkholderia pseudomallei K96243
MAVSVFDLFKIGIGPSSSHTVGPMRAALMFAQGLERDALLAATASVKVELYGSLGATGKGHGTDRGVMLGLMGDAPDTVDPSTIAARLDAVRTSKTLALLGTHPVPFVPKEHIAFYRQALPEHPNAMKLRAADTAGAVLREATYLSVGGGFVVTSGAPNTKVLAAAEQMPHPFRTGAELLALTASTGKSIAQLMWENERAWHTEEETRTGLLKIWDVMQSCVARGCGIGNPDADGNLPGPFQVKRRAPQLYRTLTGHPERALQDPLSMVDWINLYAIAVNEENAAGGRVVTAPTNGAAGIIPAVLHYYTRFTPGANEQGVIDFLMTAAAIGILYKLNASISGAEVGCQGEVGVACSMAAGALAAVLGGTPQQVENAAEIGMEHNLGLTCDPVGGMVQIPCIERNAMASVKAVNAARMALRGDGSHYVSLDSVIKTMRETGADMKTKYKETSRGGLAVNIVEC

SEQ ID NO: 8183 - DNA, 1386 bp, Burkholderia pseudomallei K96243
  CDS (1)..(1386): transl_table=11
atgaacgtcagcgttttcgatctgttcaagatcggcatcggtccgtcgagctcgcataccgtcgggccgatgatcgccgcgtgccggttcgcgtcgcacgtcgaggacgcgaacctgctcggtttcgtgcgccgcgtgcgggccgagctgtacggctcgctcggcgcgacgggcaagggccacggcaccgacaaggcggtgctgctcggcctcgaagggcacttgcccgattcggtcgaccccgatctgatcgagccccgcttgaaggcgatccgcgcggagaagtcgctcgcgttgctcggcaagcgcggcatccgcttcgacgagaaggacgacatcggcttctaccgcaagctgatgagcggcacgagcgtcgtccatccgaacggcatgcgcttccaggcgttcgacgagcacggccagttgctcgtcgagaaggagtattactcggtcggcggcggcttcgtcgtcaatcgcgacggcgatcgcgtgaacggcgtgcgtgcggcggccgacgtgccgtatccgtttcgcaccggcgacgatctgatgcgcgcgtgccgcgcgagcggcctgtcgatcgccgagctcacgtttcgcaacgagtgcgcgctgcgcccggccgacgaggtgcgcgcgggcctcgtcgcgatctggaggacgatggccgcgtgcgtcgagcgcggctgcaaggccgacggcgagctgcccggcccgatgcgcgtgaagcgccgcgcggccgagctctacacgcggctgcgcgatcggtcggaggaatcgctgcgcgatccgctgtcgatgctcgactgggtaaacctctatgcgatggcggtcaacgaggagaacgcggcgggcgggcgcgtcgtcaccgcgccgacgaacggcgcggcgggcgtgattccggccgtgctccattactacgtgaagttcgtgccgggctcgaccgagcaggggatcgtcgatttcctgctgaccgccgccgcgatcgggatcatctacaaggaaaccgcgtcgatctccggcgcggaggtcggctgccagggcgaggtgggcgtcgcgtgctcgatggccgcggccgcgctcgccgcggtgatgggcggcacgcccggccaggtcgagaacgcggccgagatcggcatggagcacaacctcgggatgacgtgcgatcccgtgggcggcctcgtgcagatcccgtgcatcgagcgcaacgcgatgggcgcgatcaaggcgctcaacgcgtcgcgcctcgcgctcaagggcgacggccagcactacgtgtcgctcgattccgtcatcaagacgatgcgcgagacgggcgccgacatgaagacgaaatacaaggaaacgtcgcgcggcggcctcgccgtgaacgtcatcgaatgctaa

SEQ ID NO: 8184 - protein, 461 aa, Burkholderia pseudomallei K96243
MNVSVFDLFKIGIGPSSSHTVGPMIAACRFASHVEDANLLGFVRRVRAELYGSLGATGKGHGTDKAVLLGLEGHLPDSVDPDLIEPRLKAIRAEKSLALLGKRGIRFDEKDDIGFYRKLMSGTSVVHPNGMRFQAFDEHGQLLVEKEYYSVGGGFVVNRDGDRVNGVRAAADVPYPFRTGDDLMRACRASGLSIAELTFRNECALRPADEVRAGLVAIWRTMAACVERGCKADGELPGPMRVKRRAAELYTRLRDRSEESLRDPLSMLDWVNLYAMAVNEENAAGGRVVTAPTNGAAGVIPAVLHYYVKFVPGSTEQGIVDFLLTAAAIGIIYKETASISGAEVGCQGEVGVACSMAAAALAAVMGGTPGQVENAAEIGMEHNLGMTCDPVGGLVQIPCIERNAMGAIKALNASRLALKGDGQHYVSLDSVIKTMRETGADMKTKYKETSRGGLAVNVIEC

SEQ ID NO: 8185 - DNA, 1374 bp, Silicibacter pomeroyi DSS-3
  CDS (1)..(1374): transl_table=11
atgttcctctccgtcttcgacatgttcaaagtgggcatcggcccgtcctcgtcgcacaccatggggccgatggtggccgccgcacgcttcctcgacatgatgcgcgcctcgcccttcgagtttcatggggtcaagggttcgctgcacggctcgctggcctttaccggtgtgggtcacgccaccgaccgcgccaccatcctcggcctcgcgggctttgtccccgacagctatgacaacgacaaggccgaagccgcgctggccgcgatccacgcgacccatactgtaacgcccgagggcctgccggtgctggccttcgaccccaaacgcgacctggtcttcgactatgaccacaccctgccgggccatgccaatggcatgatcctgatggccaccgatgcgcagggcgacgtgatcctgcggcaggtgttctattcggtcggcggcggctttgtgctgaccgaagaggaactggcccagggcaaggacaccaatgacggcccgccggtgccctacccgttcaaatccgccgccgagatgctggagatggccgctgcctcgggcaaatccatcgcccagatgaaacgcgccaacgagatcgcgcgcggctgcgagatctccttcgccaagggcaccgcgcggctctgggaagtgatgaacaactgtatcgaacgcgggctggccaccgatggcatcctgcccggcggcctcaatgtgcgccgccgcgccaagggcatccatgacgcgctggtggccgaacgcggcatgaacctgaacgcaccgcatacgatcaacgactggatgagcgtctatgccatggcggtaaacgaggaaaacgccgccggtggccaggtggtgaccgcacccaccaacggcgcggcgggcaccttgcccgcggtgctgcgctactacctcgaccatgtgccgggcgccgcccccagccatgtcgaggatttcctgctgaccgccgccgccatcggcgggctggtcaagtacaacgcctcgatctcgggcgccgaggccggctgtcaggccgaggtcggcagcgccgccgccatggcggcagcaggcctctgtgcggtgatgggcggcacccccgaacaggtggaaaacgcagctgaaatcgcgctggaacatcacctcggcatgacctgcgacccggtcaaggggctggtacaggtgccctgtatcgaacgcaacgggctggccgcgatcaaggcggtctcggcggcctcgctggccttgcgcggcgacggcaagcatttcgtgccgctcgatgcggtgatcgagacgatgcgccagaccggcgccgacatgcacgagaagtacaaggaaacctcgctgggcggactggcggtcaacgtgccgaactgctga

SEQ ID NO: 8186 - protein, 457 aa, Silicibacter pomeroyi DSS-3
MFLSVFDMFKVGIGPSSSHTMGPMVAAARFLDMMRASPFEFHGVKGSLHGSLAFTGVGHATDRATILGLAGFVPDSYDNDKAEAALAAIHATHTVTPEGLPVLAFDPKRDLVFDYDHTLPGHANGMILMATDAQGDVILRQVFYSVGGGFVLTEEELAQGKDTNDGPPVPYPFKSAAEMLEMAAASGKSIAQMKRANEIARGCEISFAKGTARLWEVMNNCIERGLATDGILPGGLNVRRRAKGIHDALVAERGMNLNAPHTINDWMSVYAMAVNEENAAGGQVVTAPTNGAAGTLPAVLRYYLDHVPGAAPSHVEDFLLTAAAIGGLVKYNASISGAEAGCQAEVGSAAAMAAAGLCAVMGGTPEQVENAAEIALEHHLGMTCDPVKGLVQVPCIERNGLAAIKAVSAASLALRGDGKHFVPLDAVIETMRQTGADMHEKYKETSLGGLAVNVPNC

SEQ ID NO: 8187 - DNA, 1365 bp, Campylobacter jejuni RM1221
  CDS (1)..(1365): transl_table=11
atgagtaatttaagcatttttaaaataggtgttggtccttcttcttctcatactttagggcctatgcttgctggaaatttattttgtaaaaaagtcgctaaaaagcttgatgaaattgatagagttgaggttactctttatggttctttgtcattaacaggtaaaggacacttgagtgataaggctgtaatttgggggttaaatggcctagaagctaaaaatttaagcacagcaatacaagatgaagtaaataaaaatgctattgaaaatgctcaaattgatttttgtggtgagaaaaaactttgttttaattatgaaaaagatttgatattttccaaagattttttacctttacatgagaatggtatgaagattaaagcttatgattgtaaaggtgggttagttgatgaagaaacttattattctgtaggcggaggctttgttttaacagctgcacaattagaaaaaaaaggtaaaaattccaaccaaaataaaaagaaaaaactagatatagagcttaacaatgcaaaagaagctttagagctttgcgataaaagagattgggatttagcagagctttcttatcgttacgaattgcaatttcacactaaagaggaaattcgtgcttattgtcttgaaatttgggaagtaatgcaagaagtgtattataatggcactcatccaaatgaagattatttgcctggaaaacttcatttaaagcgtagagctaaaggacttaaagaaagagtggcgatgacagctgatcctatgggcattatcgattttatttctttatatgctattgcgattgctgaagaaaatgctagcggagcaaaagttgtaaccgcaccaacaaatggagcatgtgctgttatccctgctgttatgctttatcttaaaaaccatactataggttttagtgatgaaaaggctatagagtttttattaacagcaatgcttataggttctttttataagaaaaatgcaagcattagcggagcagaagcaggctgtcaagcagaaattggtagtgctagctctatggcagctgcagctatggcaacagttttaggggctaatgcttttaaagcatgcaacgctgctgaaatggcaatggaacatcatctaggtttaacttgcgatccagttgcagggcttgtgcaaattccttgcatagaaagaaatgcctttggagctattaaggctataagtgctgctagaatggcaatgacacgtaaatctactcctatggtaagccttgatgaggttatagaaaccatgtatgaaacaggaaaagatatgaattataaatacaaagaaacttctttaggtggtcttgctacaaatttaaaaacagtatgctaa

SEQ ID NO: 8188 - protein, 454 aa, Campylobacter jejuni RM1221
MSNLSIFKIGVGPSSSHTLGPMLAGNLFCKKVAKKLDEIDRVEVTLYGSLSLTGKGHLSDKAVIWGLNGLEAKNLSTAIQDEVNKNAIENAQIDFCGEKKLCFNYEKDLIFSKDFLPLHENGMKIKAYDCKGGLVDEETYYSVGGGFVLTAAQLEKKGKNSNQNKKKKLDIELNNAKEALELCDKRDWDLAELSYRYELQFHTKEEIRAYCLEIWEVMQEVYYNGTHPNEDYLPGKLHLKRRAKGLKERVAMTADPMGIIDFISLYAIAIAEENASGAKVVTAPTNGACAVIPAVMLYLKNHTIGFSDEKAIEFLLTAMLIGSFYKKNASISGAEAGCQAEIGSASSMAAAAMATVLGANAFKACNAAEMAMEHHLGLTCDPVAGLVQIPCIERNAFGAIKAISAARMAMTRKSTPMVSLDEVIETMYETGKDMNYKYKETSLGGLATNLKTVC

SEQ ID NO: 8189 - DNA, 1386 bp, Neisseria gonorrhoeae FA 1090
  CDS (1)..(1386): transl_table=11
atgatcagcatttttgatattttcaaaatcggtatcggcccttccagttcgcatacggtcggcccgatgaaggccgccgccgcctttgccgcaggcttggacgcgcaaaccgcccgcatcgccatcgacatttacggctcgcttgccctgaccggatacggacacggcacatttgacgcgctgatgctcggtttggaaggcagcctgccgcacgacatcccgcttgccggcattcccgaacgcctcggacgcatccgcacgcagcacatcctccggctcaacgggcaagaaatccgcttcatccccgaccgcgacctgaacatacgcggcaatcaagtgctgcccaaacaccccaacggcctgcgatttaccgcctatgcttcagacggcacggtattgaaggaacaggtttattattcggtcggcggcggctttgtcgttaccgaagaagacttcgagtggcagtcggaaacggaaaaagccgttccttatccttacaacagttgtgccgggctgcttgcccgatgccgtctgaaccggctcgacatctccgaagtcgtgttggcaaacgaagccgcgcttgccggatgcggcgaagccgaaatccgccgccgggttgccggtgttgccgagattatggaagagtgcatcaaacggggcttaaacgcaggcggcgaactgcccggcggattgaacgtccgccgccgcgccccgcagcttgccgccaaactcaaagtcctgcgcgaaaccgaaatcgtcaacacccggctctggccgatggtgtacgccatggcggtcaacgaagaaaacgccgccggcggacgcgtcgttaccgccccgaccaacggcgcggcaggcatcattcccgccgtattgcattatttccgcaagttcaacccccacgccacacaggaacgtgtcgaaaacttcctgctcaccgcaggcgcaatcggcatcctctacaaaaccaacgcctccatttccggcgcggatgtcggttgtcagggcgaagtcggcgtagcgtgttcaatggcggcgggtgcatacgccgaagtcatcggcggcacgcccaaacaagtggaaaacgccgccgaaatggcaatggaacaccatttgggcttaacttgcgaccccgtcggcgggttggtgcaaatcccctgcatcgaacgcaacggcatcgccgccgaaaaagccctcaaactcggcacgctcgcgctcttggaagacggcacggacaaaaaagtctcgctcgacgaagtcatccgaaccatgctgcaaaccggccgggacatgaaggcgacctacaaagaaacctcgcttgccggactcgccgccacgctccggaaaaaagccgtccccgtatccgtgcgcgtggtcgagtgctga

SEQ ID NO: 8190 - protein, 461 aa, Neisseria gonorrhoeae FA 1090
MISIFDIFKIGIGPSSSHTVGPMKAAAAFAAGLDAQTARIAIDIYGSLALTGYGHGTFDALMLGLEGSLPHDIPLAGIPERLGRIRTQHILRLNGQEIRFIPDRDLNIRGNQVLPKHPNGLRFTAYASDGTVLKEQVYYSVGGGFVVTEEDFEWQSETEKAVPYPYNSCAGLLARCRLNRLDISEVVLANEAALAGCGEAEIRRRVAGVAEIMEECIKRGLNAGGELPGGLNVRRRAPQLAAKLKVLRETEIVNTRLWPMVYAMAVNEENAAGGRVVTAPTNGAAGIIPAVLHYFRKFNPHATQERVENFLLTAGAIGILYKTNASISGADVGCQGEVGVACSMAAGAYAEVIGGTPKQVENAAEMAMEHHLGLTCDPVGGLVQIPCIERNGIAAEKALKLGTLALLEDGTDKKVSLDEVIRTMLQTGRDMKATYKETSLAGLAATLRKKAVPVSVRVVEC

SEQ ID NO: 8191 - DNA, 1377 bp, Pseudomonas syringae pv. syringae B728a
  CDS (1)..(1377): transl_table=11
atggctatcagcgtcttcgacatgttcaaaatcggcatcgggccgtccagttcccacaccgtcgggccaatgcgcgccggtgcgctgttcgtgaccgagctgcgcgaccacaaccggttgcacagcgtagaacggatcgaggtgcgattgtacggttctctgtcggccacgggcatcggtcacggcagtgatcgcgcgacagtcatgggcctgatgggcgaatggccggaccagatcgaccccagccaggtcaaccagcgtatcgacgcgctgcgtgccgataaccagctgatgctggcgggcgaacaggccatcaccttcgtctgggagcgagacatgtgcctgctcgatgaaagcctcccctaccatcccaacggcatgaccctgtgtgcctacggcaagaacggcgaactccacgagcagacttattattcggtgggcggcggtttcgtaatcgatgccgaacaggccgccagcggcgtgctggacaacgacacaaccgtcctgccctatgattttttcagtggcgcgcagttgctcaagctgtgcaagacccacggcatgagcatttccgaactgatgatggccaatgaaaaggtctggcgcagcgaggaggaaatccgcgagaaaatcatggtgatctgggccgcaatgcgcgcctgcgtcgacaagggcctgttggaaaccggcatcctgcccggtggcctgaacgtgcggcggcgtgcctaccgcctgcatcagaacctgcagaacctggataaccccaacgtaatcggctcgaccctgagcgccatggaatgggtcaacctgttcgccctcgcagtcaacgaagaaaacgccgcaggcgggcgcatggtgaccgcgcccaccaacggcgcagctggcatcgtgcccgccgtgctgcattacttcatgaaattcaagcccacggccaatgacgatgacgtggtgcgctttttcctgagcgccgctgcggtcggcattctgtgcaagaaaaacgcttcgatttccggtgccgaggtcggttgtcagggtgaggtaggatcggcctgcgcaatggccgccgccggtctggcggagatcctcggcgcgacgcccgagcaggtagagaacgctgccgagattggcctggagcataatctggggctgacctgcgacccggtcggcgggctggtgcagatcccctgcatcgagcgcaatgcgattgctgccgtaaaggccatcaatgccgcccagatggccctgcgcggcgacggcgagcaccacatctcgctggaccatgccatccgcaccatgcgtgacaccggcgccgacatgcacgacaaatacaaggaaacctcacgcggcgggctggcggtcaacctgatcgagtgctga

SEQ ID NO: 8192 - protein, 458 aa, Pseudomonas syringae pv. syringae B728a
MAISVFDMFKIGIGPSSSHTVGPMRAGALFVTELRDHNRLHSVERIEVRLYGSLSATGIGHGSDRATVMGLMGEWPDQIDPSQVNQRIDALRADNQLMLAGEQAITFVWERDMCLLDESLPYHPNGMTLCAYGKNGELHEQTYYSVGGGFVIDAEQAASGVLDNDTTVLPYDFFSGAQLLKLCKTHGMSISELMMANEKVWRSEEEIREKIMVIWAAMRACVDKGLLETGILPGGLNVRRRAYRLHQNLQNLDNPNVIGSTLSAMEWVNLFALAVNEENAAGGRMVTAPTNGAAGIVPAVLHYFMKFKPTANDDDVVRFFLSAAAVGILCKKNASISGAEVGCQGEVGSACAMAAAGLAEILGATPEQVENAAEIGLEHNLGLTCDPVGGLVQIPCIERNAIAAVKAINAAQMALRGDGEHHISLDHAIRTMRDTGADMHDKYKETSRGGLAVNLIEC

SEQ ID NO: 8193 - DNA, 1377 bp, Pseudomonas fluorescens Pf-5
  CDS (1)..(1377): transl_table=11
atggctatcagtgttttcgatctcttcaaagtcggtatcggcccctccagctcccacaccgtgggcccgatgcgcgccgccgcgaccttcgcccaggcgctgttcgagcagggcctgcaagaccaggtgcagcgggtacagatccgtctctatggttcgctgtccgccaccggcgtcggccatgccaccgaccgcgccagtgtcatggggctgatgggtgaatggcccgacagcatcgaccccaccagcatcaacccgcgcatccagcagttgcgcgacagcggccaactgctgctgggcgggcacagccccattgcctttgactggcagcaggacctactcctgctggacgaaagcctgccctaccaccccaacgccatgtccctgaccgcctttggcgagcagggcacgctgctggagcagacctactactcggtgggtggcggcttcatcatcgaagcggcccaggtcgaggctggtgccgaaaccaccaccggcgtccaactgccctacgacttcaacagtgccgctgaactgctggccctgtgcaagacccataagctgcgggtcggcgaactgatgctggccaatgaacgggcctggcgcagcgacgccgagatccgcagcggcctgctgcacatctggtcggtgatgcgcgaatgcgtggaacagggcctgcgccacgaaggcatcctgcccggcggcctcgacgtaccccgccgcgccgccaagctgcaccgcagcctgctggaaatcggcaagccgaatgtcatcacctcgaccctctcggccatggagtgggtcaacctctatgccctggccgtgaacgaggaaaacgccgccggcgggcgcatggtcaccgcgcccaccaacggcgcggcggggatcatcccggcggtgctgcactactacatgaagttcaacccgcaggcctgtgacgacgacatcctcaactttttcctcggtgccgccgccgtgggcatcctgtgcaagaagaacgcctccatctccggcgccgaagtcggctgccagggcgaagtgggctcggcctgcgccatggccgctgcgggtttggcggaagtcctcggtgccacgcccgagcaactggaaaacgccgccgagatcggcctggaacacaacctcggcctgacttgcgacccggtgggcggcctggtgcaggtgccctgcatcgaacgcaacgcgattgccgcggtgaaggcgatcaacgccacccagatggccctgcgcggcgacggcaagcacttcatctccctggaccgggtgatccgcaccatgcgcgataccggcgccgacatgcatgacaaatacaaagagacttcacggggcggcctggcggtgagctgggtggaatgctga

SEQ ID NO: 8194 - protein, 458 aa, Pseudomonas fluorescens Pf-5
MAISVFDLFKVGIGPSSSHTVGPMRAAATFAQALFEQGLQDQVQRVQIRLYGSLSATGVGHATDRASVMGLMGEWPDSIDPTSINPRIQQLRDSGQLLLGGHSPIAFDWQQDLLLLDESLPYHPNAMSLTAFGEQGTLLEQTYYSVGGGFIIEAAQVEAGAETTTGVQLPYDFNSAAELLALCKTHKLRVGELMLANERAWRSDAEIRSGLLHIWSVMRECVEQGLRHEGILPGGLDVPRRAAKLHRSLLEIGKPNVITSTLSAMEWVNLYALAVNEENAAGGRMVTAPTNGAAGIIPAVLHYYMKFNPQACDDDILNFFLGAAAVGILCKKNASISGAEVGCQGEVGSACAMAAAGLAEVLGATPEQLENAAEIGLEHNLGLTCDPVGGLVQVPCIERNAIAAVKAINATQMALRGDGKHFISLDRVIRTMRDTGADMHDKYKETSRGGLAVSWVEC

SEQ ID NO: 8195 - DNA, 1377 bp, Pseudomonas fluorescens Pf-5
  CDS (1)..(1377): transl_table=11
atgtccctgagcgtgttcgacctgttcaagattggcatcggcccctccagctcccataccgtcggcccgatgcgcgccgccgcgcgttttgtcgaaggcctgcgtcgcgatcaactgctggccagcaccacctgcgtcaaggtcgagctgtacggctcgctgggcgccaccggcaaaggccacggcagcgacaaggcggtgctactaggcctggaaggcgagcacccggacaccgtgaataccgaaaacatcgccgcgcgcctgcaggaaatacgcagcagcgcgcgcctcaacctgctcggcgaacacagcattgcgttcaacgagaaagaacacctggccatgatccgcaagcccctggcctatcaccccaatggcatgatctttcgtgccttcgacagcgccggtttgcagatccgcagccgcgagtactactccgttggcggtggtttcgtcgtggatgaagatgccgccggagccgatcgcatcgttgaagacaccacccgcctgaccttccctttccgcaatgccaaggaactgctgcaacattgcgctacctatggcctgtccatcagccaggtgatgctgaccaatgaaagtgcctggcgcccggaagctgaaacccgcgccggactgctgaagatctggcaggtgatgcaggactgcgtggatgccggctgccgcaacgaaggcatcctgcccggcgggctcaaggtcaagcgccgtgccgcggccctgcaccgccagttgtgcaagcacccggaagcggcactgcgcgatgccctgtcggtgctggactgggtcaacctctatgccctggcggtgaatgaagaaaacgccaacggcggacgggtggtcaccgcccccaccaatggcgcggccggaatcattccggcggtgctgcactactacatgcgtttcattcccggggccaacgaagacggggtggtgcgttttctcctcaccgccgcagccatcggcatcctctacaaggaaaacgcctcgatctccggcgccgaagtcggctgccagggtgaagtgggcgtggcctgctcgatggcggccggggccttgtgcgaggtcctcggcggcagcgtgcagcaagtggagaacgccgcggaaatcggcatggaacacaacctcgggctgacctgtgaccccattggcgggttggtgcaggtgccctgcatcgagcgcaacgccatgggctcggtcaaggccatcaatgcggtgcgcatggccctgcgcggcgacgggcagcacttcgtctccctcgacaaggtcatccgcaccatgcgccagaccggcgccgacatgaaaagcaaatacaaggaaaccgcccgtggcggtctggccgtgaacattatcgagtgctga

SEQ ID NO: 8196 - protein, 458 aa, Pseudomonas fluorescens Pf-5
MSLSVFDLFKIGIGPSSSHTVGPMRAAARFVEGLRRDQLLASTTCVKVELYGSLGATGKGHGSDKAVLLGLEGEHPDTVNTENIAARLQEIRSSARLNLLGEHSIAFNEKEHLAMIRKPLAYHPNGMIFRAFDSAGLQIRSREYYSVGGGFVVDEDAAGADRIVEDTTRLTFPFRNAKELLQHCATYGLSISQVMLTNESAWRPEAETRAGLLKIWQVMQDCVDAGCRNEGILPGGLKVKRRAAALHRQLCKHPEAALRDALSVLDWVNLYALAVNEENANGGRVVTAPTNGAAGIIPAVLHYYMRFIPGANEDGVVRFLLTAAAIGILYKENASISGAEVGCQGEVGVACSMAAGALCEVLGGSVQQVENAAEIGMEHNLGLTCDPIGGLVQVPCIERNAMGSVKAINAVRMALRGDGQHFVSLDKVIRTMRQTGADMKSKYKETARGGLAVNIIEC

SEQ ID NO: 8197 - DNA, 1377 bp, Pseudomonas fluorescens Pf-5
  CDS (1)..(1377): transl_table=11
atggctatcagtgttttcgacctgttcaagatcggcatcggcccctccagttcccacacggtcgggcccatgcgcgcagcggctttgttcgtccaggtattaaaggaaaggcaactgctggagcaggtacgccgggtcgaggtgcagctcttcggttcgctgtccgccaccggcatcggccatggcagcgacaacgcggtgatcatgggcctgatgggggagtggccggacgcgatcgacccgtcgctgatcggcacgcgcatcgagctgctgcgggaaaccgacaccctgttgctggacgggcggctgccagtgcctttcatctgggcccgggacatgcagctggtggaccgcaacctgccattccatcccaacgccatgaccctggtggccgcgggcgaagagggtgagctgcaccgcgatacctactattcggtgggcggcggttttgtcgtcgaccaggcccaggccgacagcggtgtggcggacctggaccgcagcgagctgccttacgatttttccagtgcggtggaactgctgggcctgtgccagaagcacaacctgcgggtcgccgaactgatgctggccaacgagaaggtctggcgttcggaagaggaaatccgcagcggcctgatggcgctctggcgtgccatgcaggactgcgtggagcaggggctcaagcacgagggcatcctgcctggcgggctcaatgtgcgtcgccgcgcggccaagttgcaccgtagcctgcaggaactgaacaagcccaatgtgatcggctccaccctcagcgccatggagtgggtcaacctgtttgccctggcggtgaacgaagagaacgccgccggcggacgcatggtcaccgcccccaccaacggcgcggcggggatcattccggcggtgctgcattacttcatgaagttcagcgaagacgtcaccgacgccaacgtggtggatttctttctcggcgcggcggccatcggcatcctgtgcaagaagaacgcctccatctccggtgccgaagtcggctgccagggtgaggtgggttcggcctgcgccatggcggcggccgggttggcggaaattctcggggcgaccccggagcagttgtgcaacgccgcggagatcggcctggagcacaacctcggcctgacctgtgatccggtgggcgggctggtgcaggtgccgtgcatcgagcgcaatgcgattgccgcggtgaaggcgatcaatgccgcgcaaatggccttgcgcggcgatggccagcatttcatttccctggaccgggtgattcgcaccatgcgtgataccggcgccgacatgcacgacaaatacaaggaaacctcccgtggcggcctggcggtcagcgccgtggagtgctga

SEQ ID NO: 8198 - protein, 458 aa, Pseudomonas fluorescens Pf-5
MAISVFDLFKIGIGPSSSHTVGPMRAAALFVQVLKERQLLEQVRRVEVQLFGSLSATGIGHGSDNAVIMGLMGEWPDAIDPSLIGTRIELLRETDTLLLDGRLPVPFIWARDMQLVDRNLPFHPNAMTLVAAGEEGELHRDTYYSVGGGFVVDQAQADSGVADLDRSELPYDFSSAVELLGLCQKHNLRVAELMLANEKVWRSEEEIRSGLMALWRAMQDCVEQGLKHEGILPGGLNVRRRAAKLHRSLQELNKPNVIGSTLSAMEWVNLFALAVNEENAAGGRMVTAPTNGAAGIIPAVLHYFMKFSEDVTDANVVDFFLGAAAIGILCKKNASISGAEVGCQGEVGSACAMAAAGLAEILGATPEQLCNAAEIGLEHNLGLTCDPVGGLVQVPCIERNAIAAVKAINAAQMALRGDGQHFISLDRVIRTMRDTGADMHDKYKETSRGGLAVSAVEC

SEQ ID NO: 8199 - DNA, 1434 bp, Psychrobacter arcticus 273-4
  CDS (1)..(1434): transl_table=11
atgattagtgtatttgatttatttaaaatcggtgttggcccgtcaagctctcatactgtcggtcccatgatagcagctaacttatttgtacagtcactcctaaagcaaaccaatctgagcgacatccattctttagagattgaattatatggctcgctcgcggcgacaggtaaaggacatgcaaccgataccgccatattactgggattacttggtcacgctcctagcaccatcgatacgggtttgaccagtcaatatctggcaccaatcttttcagacaatcagctcaatatcgcaggcaagcacgttattgcttttgatacagggcgtgatattcactggtatgatgaaacggttctaccctatcatccgaacgccatgactatccgtgtatctttggcggatggcaaccattatcagcagacttattattctgtaggtgggggctttgttatcaatgaagaagatgcgactaatcccgatgaagataatgccacaccgactatcgatgtgattccttatccttttaatagcgccgcagagctgttagagcaatgccgtgaacaccatttgagcgtgagcgagctgatactggcgaatgaatgccattaccgtgagcaggcagaagtatttgagtatttagactctatttgggagtcgatgcaagattgtgtgactcgtggatgccaaaacagtggtattttaccgggtggtttagatgtaaagcgccgtgctcaagcactatatttgcaattgtgtgctgaaaaagaccagccgattgcacaaaacgacaaattggttgcgatggattggattgatttatatgctttagcggtcaatgaagaaaacgccaatggcggcaatgtcgtcaccgcacctaccaacggcgcagcaggtatcattcctgcagtcatgcattattatcgtgattttttatcaaactacagtattgatggcgcacgcaaatttttgttaaatgccacggcgatcggcagcttaatcaaacaaaacgcctcaatctcgggtgccgaagtgggctgtcaaggcgaagtaggttcagcttgcgcgatggcagcctctgcactggcagaaatcctaggcggcgatcctgccaaatgtcttaatgctgctgagattggtatcgagcataacttaggtttgacctgcgatcctgttggcggcttagtgcaagtgccttgtattgagcgcaatgccatgggtgcagttaaagctgtcaatgcagcacgacttgcctgccgtggtaacggtcaacattttgtatctttagacaaagtcattgaaacgatgaaagtcaccggtgctgacatgctggataaatataaagaaacctctcgtggtggattagcagtatatgccgataatcgtataccgactgccactcatggcgtcagcgtaaaatacagccaatgctaa

SEQ ID NO: 8200 - protein, 477 aa, Psychrobacter arcticus 273-4
MISVFDLFKIGVGPSSSHTVGPMIAANLFVQSLLKQTNLSDIHSLEIELYGSLAATGKGHATDTAILLGLLGHAPSTIDTGLTSQYLAPIFSDNQLNIAGKHVIAFDTGRDIHWYDETVLPYHPNAMTIRVSLADGNHYQQTYYSVGGGFVINEEDATNPDEDNATPTIDVIPYPFNSAAELLEQCREHHLSVSELILANECHYREQAEVFEYLDSIWESMQDCVTRGCQNSGILPGGLDVKRRAQALYLQLCAEKDQPIAQNDKLVAMDWIDLYALAVNEENANGGNVVTAPTNGAAGIIPAVMHYYRDFLSNYSIDGARKFLLNATAIGSLIKQNASISGAEVGCQGEVGSACAMAASALAEILGGDPAKCLNAAEIGIEHNLGLTCDPVGGLVQVPCIERNAMGAVKAVNAARLACRGNGQHFVSLDKVIETMKVTGADMLDKYKETSRGGLAVYADNRIPTATHGVSVKYSQC

SEQ ID NO: 8201 - DNA, 1377 bp, Colwellia psychrerythraea 34H
  CDS (1)..(1377): transl_table=11
atgatcagtgtatttgatatgttttctattggcataggtccatcaagctcacatacagtgggccctatgaaagccgcgaaacttttcgttgatgaattagttaaacaaaatttattaactagtgtcgacagagctaaatgtgaactattcggctcattaggacaaacaggtattggccatggtacgggtaaagctgtaattttaggcttttctggtcaaacaccggaaaatatccctgttgagtcaatagagtcgaccttagccgaagttgtaagcagccaaaaaatatcactcaatggtactcatgaagtcgatttccctaaagatgacgctattatttatcatcgtaagaaaacattgcccgctcattctaatgccatgactttgtatgcctatcaaggcgataccttggtattagaaaagacttattattctattggcggtggctttattgtagaagactgtgacttcgaaaaagaaaaagataaagcattatctctacacaccaatatcaatcctccgcatgtttttactactggcgataaattactccatgaagctaaagtgcatggtttaagcattagtaccattatgatgaataatgaaaagtgcttaaacgatgaagcgaccatacgcactaaattaattgaaatttgggatgcgatgaaagcgagtgttgaccgcggtattgctactgaaggtattctacctggtggtctaaacttaaatcgtagagcccctgctcttcatcgctccttgatggtagaaaattctaacgatccacttaccgctatggattgggttaacttgttcgcaatggcggtaaatgaagaaaatgctgccggaagccgcgtagttacagcaccaacaaacggcgcagcaggtattattcctgctgtactttgttactacgacaagtttgttaagccagtatctgatgatgattgtattcgttacttacttaccgcagcagccattggtattttatacaagactaacgcttctatttctggcgcagaagttggctgccagggtgaagttggtgtagcttgttcaatggctgctggcgcattaactgaaattttgggtggtactcccattcaagtagaaaatgcagctgaaataggtatggaacataacttaggattaacatgcgatccagttggcggcttagtacaagtaccttgtattgaacgtaatgcgatgggctcagtaaaagcaattaatgcttctcgtttagcacttcgtggtaatggcacatcaaaagtatctttagataaagtaatcaaaactatgtgggaaactggtaatgatatgaaaactaaatataaagaaacttcacgtggtggtttagcggttaatattatcgagtgttag

SEQ ID NO: 8202 - protein, 458 aa, Colwellia psychrerythraea 34H
MISVFDMFSIGIGPSSSHTVGPMKAAKLFVDELVKQNLLTSVDRAKCELFGSLGQTGIGHGTGKAVILGFSGQTPENIPVESIESTLAEVVSSQKISLNGTHEVDFPKDDAIIYHRKKTLPAHSNAMTLYAYQGDTLVLEKTYYSIGGGFIVEDCDFEKEKDKALSLHTNINPPHVFTTGDKLLHEAKVHGLSISTIMMNNEKCLNDEATIRTKLIEIWDAMKASVDRGIATEGILPGGLNLNRRAPALHRSLMVENSNDPLTAMDWVNLFAMAVNEENAAGSRVVTAPTNGAAGIIPAVLCYYDKFVKPVSDDDCIRYLLTAAAIGILYKTNASISGAEVGCQGEVGVACSMAAGALTEILGGTPIQVENAAEIGMEHNLGLTCDPVGGLVQVPCIERNAMGSVKAINASRLALRGNGTSKVSLDKVIKTMWETGNDMKTKYKETSRGGLAVNIIEC

SEQ ID NO: 8203 - DNA, 1377 bp, Ralstonia eutropha JMP134
  CDS (1)..(1377): transl_table=11
gtggcagtcagcgtcttcgatctgttcaaggtgggcatcggcccgtcgagctcacacaccgtgggcccgatgcgcgcggccctgatgtttgcccagggcctggagcgcgacgccctgctgccgcaggtcgccagtgtgcgcgtggagttgtacggttcgctcggcgcgaccggcaagggccacggcaccgacaagggcgtgatgctgggcctgatgggcgaagcgcccgataccatcgatcccgattccgtcgacggccggttgcatgcgttgcgcgcgagccgcacgctgtcgctgctcggccggcatccgatcccgttcgtcgagaaggagcacattgccttctaccggcgcgaggccatggccgaacacccgaacggcatgaagttccacgcgtatgacgcgcaggggacgtcgctgcgcgaggcacgctatctgtcggtcggcggcggcttcgtcgtgaccgcgggcgcgccgaacacgcaggtactcaacgcggcgcagcaactgccgcatccgttccgcagcggcaaggacatgctggagatggcgaacgaaagcggcaagtccatcgcgcggctgatgatggagaacgaactcgtctggcgcagcgaggaagacgtcaccgccgggctgctgcatatctgggacgtgatgcaggcctgcgtcgcgcgtggctgccgcaccgatggcgaactgccgggcccgttcaaggtccgacgtcgcgcgcccgagctgtaccgcaacctgacggagcgcgccgagcgcacgctgtccgatccgctgtccgtgatggactgggtcaacctttacgccatggccgtcaacgaagagaacgccgcgggcggccgcgtagtgacggcgccgaccaacggcgcagccggcatcatcccggccgtgctccattattacgaccgcttcgtgcccggcgccgaccgcaagggcgtggtcgatttcctgctgaccgccggcgccatcggcctgctctacaagctcaatgcgtcgatctcgggggccgaggtcggctgccagggcgaagtcggcgtggcgtgctcgatggccgccggcgcgctcgcggctgtgctcggcggcacgcctgagcaggtcgagaacgctgccgagatcggcatggagcacaacctgggcctgacctgcgatccggtcggcggactggtacagattccgtgcatcgaacgcaatgccatggcctcggtcaaggccgtgaacgcagcgcgcatggcgctgcgcggcgacggcacgcactacgtgtcgctcgattcggtcatcaagaccatgcgcgagaccggcgccgacatgaagaccaagtacaaggaaacggcgcgtggcggccttgcggtgaatatcgtggagtgctga

SEQ ID NO: 8204 - protein, 458 aa, Ralstonia eutropha JMP134
MAVSVFDLFKVGIGPSSSHTVGPMRAALMFAQGLERDALLPQVASVRVELYGSLGATGKGHGTDKGVMLGLMGEAPDTIDPDSVDGRLHALRASRTLSLLGRHPIPFVEKEHIAFYRREAMAEHPNGMKFHAYDAQGTSLREARYLSVGGGFVVTAGAPNTQVLNAAQQLPHPFRSGKDMLEMANESGKSIARLMMENELVWRSEEDVTAGLLHIWDVMQACVARGCRTDGELPGPFKVRRRAPELYRNLTERAERTLSDPLSVMDWVNLYAMAVNEENAAGGRVVTAPTNGAAGIIPAVLHYYDRFVPGADRKGVVDFLLTAGAIGLLYKLNASISGAEVGCQGEVGVACSMAAGALAAVLGGTPEQVENAAEIGMEHNLGLTCDPVGGLVQIPCIERNAMASVKAVNAARMALRGDGTHYVSLDSVIKTMRETGADMKTKYKETARGGLAVNIVEC

SEQ ID NO: 8205 - DNA, 1389 bp, Ralstonia eutropha JMP134
  CDS (1)..(1389): transl_table=11
atgaatgtcagcgttttcgacctgttcaaaatcggcatcggtccatcgagttcgcatacggtcggcccgatgattgccgcatgccgattcgtctcgcaccttgaggatgcgaacctgctcggcttcgtgcgccgcgtgcgggccgaattgtacggttcgctcggtgcgaccggaaagggccatggcacggacaaggcggtgctgctcggccttgagggaagcttgcccgaccgcatcgatccggacgtcattgagccgcggctcgcgcagatccgcaaggacaagcgcctgttgctgcttggcaagcatgagattgcgttcgacgaaaaggagcacatcggcttctttcgccgtctgatgagtggcacgggcaatgtcgtgcatccgaacggcatgcgcttccaggcgttcgacgagcagggccagttgctcgtcgagaaagagtactactcgatcggtggcggcttcgtggtcaatcgcgacggcgatcgcgtcaacggcgtgcgcgcggctgccgaggtgccatatccgttccgcaccggtgcggacctgatgcaggcgtgcagcgacagcgggctgtcgatcgcggcgctgatctttcgcaatgaatgcgcgctgcggccggccgaagacgtacgcgcggggctgctggcgatctggcaaacgatggccgcctgcgtcgagcgtggctgcaaggtcgagggcgagctgcccggcccgatgcgcgtgaagcgccgcgcggccgaactcaatcaccgcttgcgcacacgttccgaggagtcgctgcgtgatccgctgtcgatgctcgactgggtcaacctgtatgcgatggccgtcaacgaggagaacgcagcgggcggccgcgtcgtcaccgcaccgacaaacggcgcggcaggcgtgatccccgcggtgctccactactacgtgaagttcgtgcccggttcgaatgacgagggcatcgtcgagttcctgctgacggcagccgccatcgggatgatctacaaggagacggcctccatctcgggtgccgaggttggttgccagggggaggtgggcgtggcgtgctcgatggccgcggccgcgctggccgccgtgatgggcggtacgcctgatcaggtcgagaatgccgcggaaatcggcatggagcacaacctcggcatgacctgcgatccggtcggcgggctggtgcagattccgtgtatcgagcgcaatgcgatgggcgcaatcaaggcgctcaatgcatctcgcatggcgctgaagggcgatggccagcactacgtgtcgctcgattctgtgatcaagaccatgcgcgaaaccggcgccgacatgaagacgaagtacaaggagacgtcgcgcggcggcctggccgtgaacgtcattgaatgctaa

SEQ ID NO: 8206 - protein, 462 aa, Ralstonia eutropha JMP134
MNVSVFDLFKIGIGPSSSHTVGPMIAACRFVSHLEDANLLGFVRRVRAELYGSLGATGKGHGTDKAVLLGLEGSLPDRIDPDVIEPRLAQIRKDKRLLLLGKHEIAFDEKEHIGFFRRLMSGTGNVVHPNGMRFQAFDEQGQLLVEKEYYSIGGGFVVNRDGDRVNGVRAAAEVPYPFRTGADLMQACSDSGLSIAALIFRNECALRPAEDVRAGLLAIWQTMAACVERGCKVEGELPGPMRVKRRAAELNHRLRTRSEESLRDPLSMLDWVNLYAMAVNEENAAGGRVVTAPTNGAAGVIPAVLHYYVKFVPGSNDEGIVEFLLTAAAIGMIYKETASISGAEVGCQGEVGVACSMAAAALAAVMGGTPDQVENAAEIGMEHNLGMTCDPVGGLVQIPCIERNAMGAIKALNASRMALKGDGQHYVSLDSVIKTMRETGADMKTKYKETSRGGLAVNVIEC

SEQ ID NO: 8207 - DNA, 1377 bp, Pseudomonas fluorescens PfO-1
  CDS (1)..(1377): transl_table=11
atggctatcagtgttttcgatctattcaaagtcggcatcggcccgtccagttcccacaccgtcggcccgatgcgcgccgccgcgaccttcgcccaggcgctgatcgaccagcatttgctgaacgatgtgcagcgggtggaaatccgtttgtacggctcgctttcggccaccggtgtcggccatgccactgaccgcgcgacggtcatgggtttgatgggcgaatggccggacagcattgatccgtcgaccatcgagcctcgtatccagcaactgcgcgagaccggccaactgtttctggtcggtgaacgttcaattgccttcaactggcagcacgatctcctgctgctggacgagagcctgccctaccacccgaacgccatgtcgctgacggccttcggtgcatccggccaactgttcgagcaaacgtactactccgtcggcggcggtttcatcatcgaagcggccgaagccgaatccggcgtagcgccggccggcgacgtcgagttgccttacgaattctccagcgccgtcgaactgctggcgctgtgcaagcaacacaacctgcgggtgtccgaactgatgatggccaacgaacgggcctggcgcagcgacgccgagatccgtcagggcctgctgcacatctggtcggtgatgcgcgaatgcgtcgagcaaggcctgcgtcacgaaggcatcctgcctggcggtctgaatgttccccgccgcgctgcgaaattgcaccgtagcctgctggaaatcggcaagccgaacgtcatcagttcgaccctgtcggcgatggagtgggtcaacctgttcgccctcgccgtcaacgaagaaaacgctgccggcgggcgcatggtgaccgcgccgaccaacggcgctgccgggatcattccggccgttctgcactactacatgaaattcaatccggacgcgtccgacgacgacgtggtcgcgttctttctgggcgcggcagcggtcggcatcctgtgcaagaaaaacgcctcgatctccggcgccgaagtcggctgccagggcgaagtcggctctgcctgcgccatggccgctgcgggtctggccgatgtgctgggcgctacgcccgagcaactggaaaacgccgccgaaatcggcctggaacacaacctcggcctgacctgcgacccggtcggcggccttgtgcaggtgccgtgcatcgagcgcaacgccatcgctgcggtgaaggcgatcaacgccacgcaaatggccctgcgcggcgacggcaaacacttcatttccctggaccgggtgatccgcaccatgcgcgataccggcgccgacatgcatgacaaatacaaagagacttcacggggcggcttggccgtgagctgggtggagtgctga

SEQ ID NO: 8208 - protein, 458 aa, Pseudomonas fluorescens PfO-1
MAISVFDLFKVGIGPSSSHTVGPMRAAATFAQALIDQHLLNDVQRVEIRLYGSLSATGVGHATDRATVMGLMGEWPDSIDPSTIEPRIQQLRETGQLFLVGERSIAFNWQHDLLLLDESLPYHPNAMSLTAFGASGQLFEQTYYSVGGGFIIEAAEAESGVAPAGDVELPYEFSSAVELLALCKQHNLRVSELMMANERAWRSDAEIRQGLLHIWSVMRECVEQGLRHEGILPGGLNVPRRAAKLHRSLLEIGKPNVISSTLSAMEWVNLFALAVNEENAAGGRMVTAPTNGAAGIIPAVLHYYMKFNPDASDDDVVAFFLGAAAVGILCKKNASISGAEVGCQGEVGSACAMAAAGLADVLGATPEQLENAAEIGLEHNLGLTCDPVGGLVQVPCIERNAIAAVKAINATQMALRGDGKHFISLDRVIRTMRDTGADMHDKYKETSRGGLAVSWVEC

SEQ ID NO: 8209 - DNA, 1377 bp, Pseudomonas fluorescens PfO-1
  CDS (1)..(1377): transl_table=11
atgtcgttaagcgtgttcgacctgttcaagattggcatcggcccctccagctcccacaccgtcggcccgatgcgcgcagctgcgcgcttcgtggaaggtctgcgccgggaaaacctgttgtcggccaccaccagcgtcagggtcgagttgtatggatccctcggcgccacgggcaagggtcacggcagcgacaaggccgtgctgctgggcctggaaggtgaacacccggacaccgtggatactgaaaccgtcgccgcccgtctcgcggagattcgtggcaacgggcgtttgatcctgctcggtgaacacagcattgcgttcaacgagaaagaacacctggcaatgatccgcaagccgttggcctatcaccccaacggcatgatcttccgcgccttcgatgcggcgggattgcagatccgcagccgcgagtactactcggtcggcggtgggtttgtggtcgacgaagacgcggccggcgccgaccggatcgtcgaagacgccaccccgctgaccttcccgttcaaaagtgccaaggacttgctcggtcattgcgccacctatggtctgtcgatcagtcaggtgatgctggccaacgaaagcgcctggcgcccggaggcggaaacccgtgccggcctgctgaaaatctggcaagtgatgcaggactgtgtggccgccggctgtcgcaacgaaggcattctgccgggtggcctcaaggtcaagcggcgggcggcggcgttgcaccggcaactgtgcaagaacccggaatcgtcgctgcgcgatccgctgtcggtgctggactgggtcaacctctacgccctcgctgtcaacgaagaaaacgccaacggcgggcgcgtggtcacggcaccgaccaacggcgcggcggggatcattcctgcggtgctgcattactacatgcgcttcattcccggcgcgaacgatgacggcgtggtgcgtttcctgctcaccgccgcggccatcggcattctgtacaaggaaaacgcctcgatttccggtgccgaagtcggctgtcagggcgaggtcggcgtggcctgttcgatggcggccggcgcgttgtgcgaagtcctcggcggcagcgtgcaacaagtggaaaacgccgccgaaatcggcatggaacacaacctcggcctgacctgcgacccgattggcggactggtgcaagtgccgtgcatcgagcgcaacgccatgggttcggtcaaggcgatcaacgccgtgcgcatggccatgcgcggagacgggcagcacttcgtctccctcgacaaggtcatccgcaccatgcgccagaccggcgccgacatgaaaagcaaatacaaggagaccgcccgtggcggtctggcggtcaacattatcgagtgctga

SEQ ID NO: 8210 - protein, 458 aa, Pseudomonas fluorescens PfO-1
MSLSVFDLFKIGIGPSSSHTVGPMRAAARFVEGLRRENLLSATTSVRVELYGSLGATGKGHGSDKAVLLGLEGEHPDTVDTETVAARLAEIRGNGRLILLGEHSIAFNEKEHLAMIRKPLAYHPNGMIFRAFDAAGLQIRSREYYSVGGGFVVDEDAAGADRIVEDATPLTFPFKSAKDLLGHCATYGLSISQVMLANESAWRPEAETRAGLLKIWQVMQDCVAAGCRNEGILPGGLKVKRRAAALHRQLCKNPESSLRDPLSVLDWVNLYALAVNEENANGGRVVTAPTNGAAGIIPAVLHYYMRFIPGANDDGVVRFLLTAAAIGILYKENASISGAEVGCQGEVGVACSMAAGALCEVLGGSVQQVENAAEIGMEHNLGLTCDPIGGLVQVPCIERNAMGSVKAINAVRMAMRGDGQHFVSLDKVIRTMRQTGADMKSKYKETARGGLAVNIIEC

SEQ ID NO: 8211 - DNA, 1377 bp, Pseudomonas fluorescens PfO-1
  CDS (1)..(1377): transl_table=11
atggctatcagcgttttcgacctgttcaaaatcggcattggcccgtccagttcccacaccgtcgggcccatgcgcgccgccgccctgttcgtcgagtcgttgcgcgacaaacatctactggagcaggtgcgtcgcatcgaggtgcagctgttcggctcgctgtcggccaccggtgtcggtcacggcagcgacaacgcggtgatcatgggcctgatgggcgagtggccggacgcgatcgacccgtcgcagatcggcccgcggatccaggccctgcgcgaaacccacacgctgttgctcgacggtcgtttgtcggtgccctttatatggggccgcgacatgcgcctgatcgacgaaaacctgccgtttcaccctaacgccatgaccctggttgccgaaggcgatcgcggcgagctgcatcgcgacacctactattcggtcggcggcggttttgtggtggacgaggcgcaggcttccagtggtgtggtggatctggatcgcaccgagttgccttacgatttttccagcgcggtggagttgctggagctgtgcaagacccacaacctgcgcgtggccgaattgatgatggccaacgaaaaggtctggcgcagcgaagaggaaatccgcgccggcctgatgaagctctggcgggcgatgcaggattgcgtcgagcagggcctcaagcacgaaggcatcctgcccggcggtctcaacgtgcgccgccgcgcggcgaagttgcaccgcagccttcaggagttgaacaagcccaacgtgatcggctcgaccctcagcgcgatggagtgggtcaacctgttcgccctcgcggtgaacgaggaaaacgccgccggcggacgcatggtcacggcgcccaccaacggcgcggcggggatcattccggcggtgctgcactacttcatgaaattcagcgaggcggtgactgacgccaacgtggtcgactatttcctcggggcggcggcggtggggattctgtgcaagaagaacgcttcgatctccggcgccgaagtcggctgtcagggtgaggtcggttcggcctgtgcgatggcggcggcagggttggcggaaatcctcggcgcaagcccggagcaattgtgcaacgcggcggaaatcggcctggaacacaacctcggcctgacctgcgatccggtgggtggtctggtgcaagtgccgtgcatcgagcgcaatgcgattgcggcggtgaaggcgatcaacgcggcgcagatggccttgcgcggggacggtcagcactttatttcgctggatcgggtgatccgcaccatgcgcgataccggcgccgacatgcatgacaaatataaagagacatcgcggggcgggttggcggtcagcgcggtggaatgctga

SEQ ID NO: 8212 - protein, 458 aa, Pseudomonas fluorescens PfO-1
MAISVFDLFKIGIGPSSSHTVGPMRAAALFVESLRDKHLLEQVRRIEVQLFGSLSATGVGHGSDNAVIMGLMGEWPDAIDPSQIGPRIQALRETHTLLLDGRLSVPFIWGRDMRLIDENLPFHPNAMTLVAEGDRGELHRDTYYSVGGGFVVDEAQASSGVVDLDRTELPYDFSSAVELLELCKTHNLRVAELMMANEKVWRSEEEIRAGLMKLWRAMQDCVEQGLKHEGILPGGLNVRRRAAKLHRSLQELNKPNVIGSTLSAMEWVNLFALAVNEENAAGGRMVTAPTNGAAGIIPAVLHYFMKFSEAVTDANVVDYFLGAAAVGILCKKNASISGAEVGCQGEVGSACAMAAAGLAEILGASPEQLCNAAEIGLEHNLGLTCDPVGGLVQVPCIERNAIAAVKAINAAQMALRGDGQHFISLDRVIRTMRDTGADMHDKYKETSRGGLAVSAVEC

SEQ ID NO: 8213 - DNA, 1380 bp, Rhodobacter sphaeroides 2.4.1
  CDS (1)..(1380): transl_table=11
atgttcctgtccgtcttcgacatcttcaaggtgggcgtcggcccctcctcgtcgcacacgatgggaccgatggtggccgcgggccgcttcctcgaccggctccgggcaagcccgttccatgcgcacgggctgcgggcctcgctgcacggcagcctcgccttcaccggcgtgggccatgcgaccgaccgggcgacgatcctgggcctcgcggggttcgagcccggcagctacgatgcggagcgcgccgaggaggtgctggccgcgatccgcgccaccggccggatcgaggcgccgggcctcgggccgctccagttcgaccccgagaaggatctggtcttcgactacggtcatgccctgccgggccatgccaacgggatgcgcattcaggcgaccgacgcacagggcgacgtgctgctgtcggaggtctattattccgtgggcggtggcttcgtcctgaccgaggcagagcttgcggaatcgaaatccgaccgccccgccgccggtcccgccgtccccttccccttcgagagtgcgcaccagatgctcgggatggccgaggcctcgggcctgtccatcgcggcgatgaagcgcgccaacgaactcgcggtccgcagcgcgcccgagctcgaccgcgggctgaagcggatctggcaggtgatgaacgactgcatcgagcgcggcatggagaccggcggcacgctgccgggcggcctgcatgtccgccgccgcgccaagggcatccgcgaggcgctgctggccgaacgcgggctgaacatgaccgcgccgcacacgatcaacgactggatgagcctctatgccatggcggtgaacgaggagaatgccgccggcggtcaggtggtcacagccccgaccaacggcgcggcgggcgtggtgcccgccgtcatccgctactggctcgatcatgttccgggggcgagccccgcgaagctcggggatttcctcctgacggccgcggccatcggcgggctcgtcaagcacaatgcctcgatctcgggggccgaatgcggctgtcaggccgaggtgggctcggcggcggcgatgggcgcggcggggcttgcggcggtgctcggcggcacgcccgctcaggtcgagaatgcggccgagatcgcgctggagcatcacctcggcatgacctgcgaccccgtgcgcggcctcgtgcaggtgccctgcatcgagcgcaacgggctcggcgcgatcaaggccgtgtcggcggcgagcctcgcgctccgcggcgacggcgagcatctggtgagcctcgacgtctgtatcgagacgatgcgccagaccggccgcgacatgaacgacaaatacaaggagacctcgctcggcggcctcgcggtgaatgtcccgaactgctga

SEQ ID NO: 8214 - protein, 459 aa, Rhodobacter sphaeroides 2.4.1
MFLSVFDIFKVGVGPSSSHTMGPMVAAGRFLDRLRASPFHAHGLRASLHGSLAFTGVGHATDRATILGLAGFEPGSYDAERAEEVLAAIRATGRIEAPGLGPLQFDPEKDLVFDYGHALPGHANGMRIQATDAQGDVLLSEVYYSVGGGFVLTEAELAESKSDRPAAGPAVPFPFESAHQMLGMAEASGLSIAAMKRANELAVRSAPELDRGLKRIWQVMNDCIERGMETGGTLPGGLHVRRRAKGIREALLAERGLNMTAPHTINDWMSLYAMAVNEENAAGGQVVTAPTNGAAGVVPAVIRYWLDHVPGASPAKLGDFLLTAAAIGGLVKHNASISGAECGCQAEVGSAAAMGAAGLAAVLGGTPAQVENAAEIALEHHLGMTCDPVRGLVQVPCIERNGLGAIKAVSAASLALRGDGEHLVSLDVCIETMRQTGRDMNDKYKETSLGGLAVNVPNC

SEQ ID NO: 8215 - DNA, 1389 bp, Burkholderia sp. 383
  CDS (1)..(1389): transl_table=11
atggcagtcagcgtctttgacctcttcaagatcggtatcggtccgtccagctcgcatacggtcgggccgatgcgcgcggcgctgatgttcgtccagggcctcgagcgcgacggacaactcgacgcaacggcacacgtgaaggtcgagctgtacggctcgctcggcgcgaccggcaaaggccacggcaccgaccgcggcgtgatgctcggcctgctcggtgacgcgcccgacaccgtcgatcccgaaaccatcgacgcgcggctggaagacatccgcaaatcgaagaagctcgcgctgctcggcacgcatccggtgccgttcgtgctgaaggagaacatcgcgttctaccgccaggcgctgcccgagcacccgaacgggatgaagctgcgcgcgtccgacgcgagcggcaacgtgctggtcgagcgcacctacctgtcggtcggcggcggcttcgtcgtgacggccggcgcaccgaacacgaaggtgctgagcgcggccgagcagatgacgcacccgttccgcaccggcgccgagctgctcgcgctgaccgagtcgaccggcaagtcgatcgcgcagctgatgtgggaaaacgagcgcgcgtggcacaccgaggaagagacgcgcgacggcctgctgaagatctgggccgtgatgcagtcgtgcgtgtcgcgcggctgcggaatcggcaacccggaagccgacggcaacctgcccggcccgttccaggtcaagcgccgcgcgccgcagctgtaccgcacgctgacgggcagcccggagcgcgcgctgcaggacccgctgtcgatgatcgactggatcaacctgtacgcgatcgcggtcaacgaggaaaacgcggccggcggccgcgtcgtcaccgcgccgaccaacggcgcggccggcatcatcccggccgtgctgcactactacacgcgcttcacgcccggcgcgaacgaacagggcgtgatcgacttcctgctgacggccgccgcgatcggcattctttacaagctgaatgcgtcgatctccggtgcggaagtcggctgccagggcgaagtgggcgtcgcgtgctcgatggcggccggcgcgctcgcggccgtgctcggcggcacgccgcaccaggtcgagaacgcagccgagatcgggatggaacacaacctcggccttacctgcgacccggtcggcgggatggtgcagatcccgtgcatcgagcgcaacgcgatggcgtcggtgaaggcggtcaacgcggcgcgcatggcgctgcgcggcgacggctcgcactacgtgtcgctcgactccgtgatcaagacgatgcgcgagacgggtgccgacatgaagacgaagtacaaggaaacgtcgcgcggcgggctggcggtcaatatcgtcgagtgctga

SEQ ID NO: 8216 - protein, 462 aa, Burkholderia sp. 383
MAVSVFDLFKIGIGPSSSHTVGPMRAALMFVQGLERDGQLDATAHVKVELYGSLGATGKGHGTDRGVMLGLLGDAPDTVDPETIDARLEDIRKSKKLALLGTHPVPFVLKENIAFYRQALPEHPNGMKLRASDASGNVLVERTYLSVGGGFVVTAGAPNTKVLSAAEQMTHPFRTGAELLALTESTGKSIAQLMWENERAWHTEEETRDGLLKIWAVMQSCVSRGCGIGNPEADGNLPGPFQVKRRAPQLYRTLTGSPERALQDPLSMIDWINLYAIAVNEENAAGGRVVTAPTNGAAGIIPAVLHYYTRFTPGANEQGVIDFLLTAAAIGILYKLNASISGAEVGCQGEVGVACSMAAGALAAVLGGTPHQVENAAEIGMEHNLGLTCDPVGGMVQIPCIERNAMASVKAVNAARMALRGDGSHYVSLDSVIKTMRETGADMKTKYKETSRGGLAVNIVEC

SEQ ID NO: 8217 - DNA, 1386 bp, Burkholderia sp. 383
  CDS (1)..(1386): transl_table=11
atgaacgtcagcgtcttcgacctgttcaagatcggcatcggcccgtccagttcgcatacggtcggcccgatgatcgccgcgtgccgcttcgcgtcgcacgtggaggacgcgaacctgctcggtttcgtgcgccgcgtgcgggtcgaactatacggctcgctcggcgcgaccggcaagggccacggcaccgacaaggccgtgctgctcggtctcgagggccatctgcccgacacgatcgatccggacctgatcgagccgcggctcgccgcgatccgcgcggagaaatcgctgtcgctgctcggcaagcagaccgtccgcttcgaggaaaaggagcacatcggcttctatcgcaagctgatgagcggcacgagcatcgtgcacccgaacggcatgcgcttccaggccttcgacgagcacggccagctgctcgtcgagaaagagtattactcggtcggcggcggcttcgtcgtgaaccgcgacggcgatcgcgtgaacggcgtgcgcgcggcggtcgaggtgccgtatccgttccgcaccggcgacgacctgatgcgccagtgccgcgagcacgggctgtcgatcgccgagctgatgatgcgcaacgaatccgcgctgcgtcccgccgacgaagtgcgggccgggctgctcgcgatctggcgcacgatggccgcctgcgtcgagcgcggctgcaaggtcgagggcgacctgccgggcccgatgcgcgtgaagcgccgcgcggccgagctgaacgcccgcctgcgcgagcgttcggaagagtcgctgcgcgacccgctgtcgatgctcgactgggtcaacctgtatgcgatggccgtcaacgaggagaacgcggcgggcggccgggtcgtcaccgcgccgaccaacggcgcggccggcgtgattcccgcggtgctgcactactacgtgaagttcgtgccgggctcgaacgaagccggcatcgtcgaattcctgatgacggccgcggcgatcgggatcatctacaaggaaaccgcgtcgatctccggcgcggaagtcggttgccagggcgaagtgggcgtcgcgtgctcgatggcggccgccgcgctcgccgcggtgatgggcggcacgcccgaccaggtcgagaacgcggcggagatcggcatggagcacaacctcgggatgacctgcgacccggtcggcgggctcgtgcagatcccgtgcatcgagcgcaacgcgatgggcgcgatcaaggcgctgaacgcgtcgcggatggcgctcaagggtaacggccagcactacgtgtcgctcgattcggtcatcaagacgatgcgcgagacgggcgccgacatgaagacgaaatacaaggaaacgtcgcgcggcggtctggccgtgaacgtcatcgaatgctaa

SEQ ID NO: 8218 - protein, 461 aa, Burkholderia sp. 383
MNVSVFDLFKIGIGPSSSHTVGPMIAACRFASHVEDANLLGFVRRVRVELYGSLGATGKGHGTDKAVLLGLEGHLPDTIDPDLIEPRLAAIRAEKSLSLLGKQTVRFEEKEHIGFYRKLMSGTSIVHPNGMRFQAFDEHGQLLVEKEYYSVGGGFVVNRDGDRVNGVRAAVEVPYPFRTGDDLMRQCREHGLSIAELMMRNESALRPADEVRAGLLAIWRTMAACVERGCKVEGDLPGPMRVKRRAAELNARLRERSEESLRDPLSMLDWVNLYAMAVNEENAAGGRVVTAPTNGAAGVIPAVLHYYVKFVPGSNEAGIVEFLMTAAAIGIIYKETASISGAEVGCQGEVGVACSMAAAALAAVMGGTPDQVENAAEIGMEHNLGMTCDPVGGLVQIPCIERNAMGAIKALNASRMALKGNGQHYVSLDSVIKTMRETGADMKTKYKETSRGGLAVNVIEC

SEQ ID NO: 8219 - DNA, 1233 bp, Desulfovibrio desulfuricans G20
  CDS (1)..(1233): transl_table=11
atggactctctcaaggaactctacaaggtgggcaacggcccttccagcagccacaccatgggcccgcaaaaggcagccacagagtttctgcggcgcaccccgcaggctgcgcattaccgtgtcacgctgctcggcagccttgccgccacgggcaaaggccacctgacagactggatcatcaaaaaaacactgggtgaagaacgcacgaccattgtctggaaaccagaagaggtacgtcccttccacaccaacggcatggttttcgaagcgctggacgcacaggggaacgtgccggaagaccccgcctccacctgggaagtgtacagcgtgggcggcggcaccatagccgaaccggattcgctgacacgcggtgccggcaatttttactcgcttaccactctcacggccatcatgggtcactgccgtgcggacaacatagagctgtgggagtatgtcgaatctcaggaaggcccgggcctgtggccttttctgcaggacatctggcaggccatgcaggactccatagaacgcggactgggcaaaaccggcctgctgccgggcgacctgcgctacccgcgcaaagccaacgcgttttacaaaaaagcccgcatccagtccggcaggctgcgttccaccggtatgacattcgcctatgcactggcagtgtcggaagaaaacgcctccggcgggctggtggttaccgcgcccacctgcggctcggcaggtctggtgcccgccgtgctgcgttcgcttaaagaagattacagccttgccgacacagaaatactgaaagctcttgccgtgggcggactggtcggcaaccttgtaaaggaaaacgcctccatatcgggtgccgaagtgggctgtcagggcgaagtgggtacagcgtgcgccatggccgcggccatgaccgcctatctgttcggcggtacccatatgcagatagactacgccgcggaaatggcgctggaacaccatctgggcatgacctgtgaccccgtgggcgggtatgtacaggtgccctgtatagaacgcaacgcggtttcggccatcagagccatcaacgcagcggaatacacgctgttcaccgacggaaaccaccgtatcagttttgatcaggtggtgcagaccatgggcgaaaccggcagagacctgaagtgcggttacagagaaacttcactggcagggctggccaaacacgcctgcctgaccaactgcggcagcgggtgctga

SEQ ID NO: 8220 - protein, 410 aa, Desulfovibrio desulfuricans G20
MDSLKELYKVGNGPSSSHTMGPQKAATEFLRRTPQAAHYRVTLLGSLAATGKGHLTDWIIKKTLGEERTTIVWKPEEVRPFHTNGMVFEALDAQGNVPEDPASTWEVYSVGGGTIAEPDSLTRGAGNFYSLTTLTAIMGHCRADNIELWEYVESQEGPGLWPFLQDIWQAMQDSIERGLGKTGLLPGDLRYPRKANAFYKKARIQSGRLRSTGMTFAYALAVSEENASGGLVVTAPTCGSAGLVPAVLRSLKEDYSLADTEILKALAVGGLVGNLVKENASISGAEVGCQGEVGTACAMAAAMTAYLFGGTHMQIDYAAEMALEHHLGMTCDPVGGYVQVPCIERNAVSAIRAINAAEYTLFTDGNHRISFDQVVQTMGETGRDLKCGYRETSLAGLAKHACLTNCGSGC

SEQ ID NO: 8221 - DNA, 1215 bp, Desulfovibrio desulfuricans G20
  CDS (1)..(1215): transl_table=11
atggacagcataacagagctttaccgcatcggctccggcccttcttccagccacaccatgggaccgcagaacgccgcacgtctttttgtggaacagcaccccgaagccgcacggttccgcgttaccctgtatgaaagtctggcatccacaggcaaaggccacctgaccgaccgggccgttacagccgcactgggcgaagagcgctgtgaaatagtctggaaaccggaagaacgcatgccccggcatcccaacggcatgctgtttgaagcgcaggacagcaacggcaacgtaaccggcagctggaaagtgtacagcgtgggcggcggcgccatcatgggcgaagacgaaccccgcaggcagcagcagggcgtctacccgcaccctgatctggcttcggtaatggccctgtgcgaagataagggcataacctactgggaatatgtggcccgttatgaaggcgaaaccgtatggccctttttgaaaaccatatggcaggccatgcagcaggcgctggaacgcggtctgactgcgcagggagttctgcccggttccatagggctgcgcaggcaggcatggaactatatgtcgcgcacaaagctggcgcacaaaagcatgcaccagaccggcaaggtgacggcctatgcgctggccgtggcagaagaaaacgcggcaggcggcatcatagtcacagcccccacatgcggttcatgcggcatcgtgcccgccgtgctctattacctgcgcgaaacgctgaaagccaccgagcaggatattctgcgggctctggccacggcaggacttttcggcaacataatcaagcacaatgcgtccatttctggcgcggaggttggctgtcagggcgaggtgggctctgcctgcgccatggcggcggccgccgccacccagatgatgggcggtacggtgcggcagatagaatacgctgccgaaatgggtctggagcaccatctggggctgacatgcgaccctgtggacgggctggtgcagattccctgtatagaacgtaacgcctgcgcggccacccgtgccctttcccgtgcgcagatggccatcctgtccgacggcatgcaccgcattccctttgacgaagtggtggccgtcatggcccagacaggtcacgacctgcccagcctgtatcgcgaaacagcccgcggcgggctggcaaaagtctatgccgcacggccgcagaagcagtga

SEQ ID NO: 8222 - protein, 404 aa, Desulfovibrio desulfuricans G20
MDSITELYRIGSGPSSSHTMGPQNAARLFVEQHPEAARFRVTLYESLASTGKGHLTDRAVTAALGEERCEIVWKPEERMPRHPNGMLFEAQDSNGNVTGSWKVYSVGGGAIMGEDEPRRQQQGVYPHPDLASVMALCEDKGITYWEYVARYEGETVWPFLKTIWQAMQQALERGLTAQGVLPGSIGLRRQAWNYMSRTKLAHKSMHQTGKVTAYALAVAEENAAGGIIVTAPTCGSCGIVPAVLYYLRETLKATEQDILRALATAGLFGNIIKHNASISGAEVGCQGEVGSACAMAAAAATQMMGGTVRQIEYAAEMGLEHHLGLTCDPVDGLVQIPCIERNACAATRALSRAQMAILSDGMHRIPFDEVVAVMAQTGHDLPSLYRETARGGLAKVYAARPQKQ

SEQ ID NO: 8223 - DNA, 1473 bp, Burkholderia thailandensis E264
  CDS (1)..(1473): transl_table=11
atgccgtttttgttctatcggcggattttacgctttgatgtactgatgcccaacgtcaaccacgcatcgttacgcaagggcagccagatgaacgtcagcgttttcgacctgttcaagatcggtatcggtccgtcgagctcgcataccgtcggcccgatgatcgccgcatgccggttcgcgtcgcatgtcgaggatgcgaacctgctcggcttcgtgcgccgcgtgcgggtggagctgtacggctcgctcggcgcgacgggcaagggccacggcaccgacaaggcggtgctgctcggcctcgaagggcacttgcccgacctgatcgatcccgatctgatcgagccccgcctgaaggcgatccgcgcggagaagtcgctcgcgctgctcggcaagcgcggcatccgcttcgacgagaaggacgacatcggcttttaccgcaagctgatgggcggcacgagcgtcgtccacccgaacggcatgcgcttccaggcgttcgacgagcacggccagttgctcgtcgagaaagagtattactcggtcggcggcggcttcgtcgtcaatcgcgacggcgatcgcgtgaacggcgtgcgcgcggcggccgacgtgccgtatccgtttcgcaccggtgaggacctgatgcgcgcgtgccgcgcgagcggcctgtcgatcgccgagctcacgtttcgcaacgaatgcgcgctgcgtcccgccgacgaagtgcgcgcgggcctcgtcgcgatctggaagacgatggccgcgtgcgtcgagcgcggctgcaaggccgacggcgagctgccgggcccgatgcgcgtgaagcgccgcgcggccgatctccacacgcggctgcgcaaccggtcggaggaatcgttgcgcgatccgctgtcgatgctcgactgggtgaacctctacgcgatggcggtcaacgaggagaacgcggcgggcgggcgcgtcgtcaccgcgccgaccaacggcgcggcgggcgtgatcccggccgtcctccattactacgtgaagttcgtgccgggctcgaacgagcaggggatcgtcgacttcctgctgaccgccgccgcgatcgggatcatctacaaggaaaccgcgtcgatctccggcgcggaggtcggctgccagggcgaggtgggcgtcgcgtgctcgatggctgcggcggcgctcgccgcggtgatgggcggcacccccggccaggtcgagaacgcggccgagatcggcatggagcacaacctcgggatgacgtgcgaccccgtcggcggcctcgtgcagattccgtgcatcgagcgcaacgcgatgggcgcgatcaaggcgctcaacgcgtcgcgcatcgcgctgaagggcgacggccagcactacgtgtcgctcgattccgtcatcaagacgatgcgcgagacgggcgccgacatgaagacgaaatacaaggaaacgtcgcgcggcggcctcgccgtgaacgtgatcgaatgctaa

SEQ ID NO: 8224 - protein, 490 aa, Burkholderia thailandensis E264
MPFLFYRRILRFDVLMPNVNHASLRKGSQMNVSVFDLFKIGIGPSSSHTVGPMIAACRFASHVEDANLLGFVRRVRVELYGSLGATGKGHGTDKAVLLGLEGHLPDLIDPDLIEPRLKAIRAEKSLALLGKRGIRFDEKDDIGFYRKLMGGTSVVHPNGMRFQAFDEHGQLLVEKEYYSVGGGFVVNRDGDRVNGVRAAADVPYPFRTGEDLMRACRASGLSIAELTFRNECALRPADEVRAGLVAIWKTMAACVERGCKADGELPGPMRVKRRAADLHTRLRNRSEESLRDPLSMLDWVNLYAMAVNEENAAGGRVVTAPTNGAAGVIPAVLHYYVKFVPGSNEQGIVDFLLTAAAIGIIYKETASISGAEVGCQGEVGVACSMAAAALAAVMGGTPGQVENAAEIGMEHNLGMTCDPVGGLVQIPCIERNAMGAIKALNASRIALKGDGQHYVSLDSVIKTMRETGADMKTKYKETSRGGLAVNVIEC

SEQ ID NO: 8225 - DNA, 1389 bp, Burkholderia thailandensis E264
  CDS (1)..(1389): transl_table=11
atggcagtcagcgtgttcgatcttttcaaaatcggtatcggcccgtcgagctcgcacacggtcgggccgatgcgcgccgcactgatgttcgcgcaagggctcgagcgcgacgcgctgctcgccgcgaccgcgagcgtgaaggtcgagctgtacggctcgctcggcgcgaccggcaagggccacggcacggaccgcggcgtgatgctcggcctgatgggcgacgcgcccgacaccgtcgatccgtcgacgatcgccgcgcggctcgatgcggtgcgcgactcgagaacgctcgcgctgctcggcacgcacccggtgccgttcgtgccgaaggagcacatcgcgttctaccggcaggcgctgcccgagcatccgaacgcgatgaagctgcgcgcgaccgacgcgacgggcgcgatgctgcgcgaggcgacgtatctgtcggtgggcggcggcttcgtcgtcaccgcgggcgcgccgaacacgaaggtgctcgccgccgtcgagcaaatgccgcatccgttccgcacgggcgccgagctgctcgcgctcaccacatcgaccggcaagtcgatcgcgcagctgatgtgggacaacgagcgcgcgtggcacaccgaggcggaaacgcgcacgggcctgctgaagatctgggacgtgatgcaatcgtgcgtcgcgcgcggctgcgggatcggcaaccccgacgcggacggcaccctgcccgggccgttccaggtcaagcgccgcgcgccgcagctctatcgcgcgctgacgggcaatccggaacgcgcgctgcaagacccgctgtcgatggtcgactggatcaacctgtatgcgatcgccgtcaacgaggaaaacgcggcgggcgggcgcgtcgtcaccgcgccgaccaacggcgcggcgggcatcatcccggccgtgctccattactacacgcgcttcacgccgggcgcgaacgagcaaggcgtgatcgacttcctgatgaccgcggcggcgatcggcatcctgtacaagctcaacgcgtcgatctcgggcgcagaagtcggctgccagggcgaagtcggcgtcgcgtgctcgatggcggcgggcgcgctcgcggcggtgctcggcggcacgccgcagcaggtcgagaacgcggccgagatcgggatggaacacaacctcggcctcacctgcgatccggtcggcgggatggtgcagattccgtgcatcgagcgcaacgcgatggcgtcggtgaaggccgtcaacgccgcgcggatggcgctgcgcggcgacggcagccactacgtgtcgctcgactccgtgatcaagacgatgcgcgaaaccggcgcggacatgaagacgaagtacaaggaaacctcgcgcggcgggctggcggtgaatatcgtcgagtgctga

SEQ ID NO: 8226 - protein, 462 aa, Burkholderia thailandensis E264
MAVSVFDLFKIGIGPSSSHTVGPMRAALMFAQGLERDALLAATASVKVELYGSLGATGKGHGTDRGVMLGLMGDAPDTVDPSTIAARLDAVRDSRTLALLGTHPVPFVPKEHIAFYRQALPEHPNAMKLRATDATGAMLREATYLSVGGGFVVTAGAPNTKVLAAVEQMPHPFRTGAELLALTTSTGKSIAQLMWDNERAWHTEAETRTGLLKIWDVMQSCVARGCGIGNPDADGTLPGPFQVKRRAPQLYRALTGNPERALQDPLSMVDWINLYAIAVNEENAAGGRVVTAPTNGAAGIIPAVLHYYTRFTPGANEQGVIDFLMTAAAIGILYKLNASISGAEVGCQGEVGVACSMAAGALAAVLGGTPQQVENAAEIGMEHNLGLTCDPVGGMVQIPCIERNAMASVKAVNAARMALRGDGSHYVSLDSVIKTMRETGADMKTKYKETSRGGLAVNIVEC

SEQ ID NO: 8227 - DNA, 1395 bp, Burkholderia xenovorans LB400
  CDS (1)..(1395): transl_table=11
atgaacgtcagcgtcttcgatctgttcaagatcggcatcggtccttcaagctcgcacacggtcgggccgatgatcgctgcttgccgcttcgcttcgcatatcgaagacgccaatctgctcggcttcgtgcgcagcgtgaaggccgaactgttcggctcgctcggcgcgaccggcaaagggcacggcacggacaaggcggtgctgctcggactcgaaggcaatctgcctgattcgatcgacccggacgtgatcgagccgcgcctcgcggcgatccgcgccatgaagcaactggtgctgctcggcaaacatccggtgaaattcgacgaacgcgagcatctcggctttttccgcaagctgatgccgggcgcaccgggctcgggcatcgtgcatccgaacggcatgcgctttcaggccttcgacgaaaacggccagctgctggtggagaaggagtattactcgatcggcggcggcttcgtggtgaatcgcgaaggcgatcgcgtgaacggcgtgcgcgccggcgcccaggtgccgtacccgtttcgtaccggcgacgatctgatgcgcatctgccgcgaaaccggcctgtcgatcgcacagatcacgctgcgcaacgagtgcgcagcgcgtcccgaacaggacgtgcgcgacggcttgctggcgatctggcgcgtcatgtcggcctgcgtcgaacgcggctgcaaggtgcgcggcgaattgccgggccccatgcatgtgaagcgtcgcgccgccgatctgtgtgcgcaactgcgttcgcgttcggaagaatcgctgcgtgacccgctttccatgctcgactgggtcaacctgtacgcaatggccgtcaacgaggaaaacgcggcgggcggccgcgtcgtcactgcgccgaccaacggcgcggccggcgtgattcccgccgtgctgcactactacgtgaagttcatgcatgcatcgaacgacgaaggtgtcgtcgacttcctgctgacggctgcggcgatcggcatcatctacaaggaaacggcgtcgatctccggcgccgaagtgggctgccagggcgaagtgggcgtggcgtgctcgatggccgccgcggcactcgccgcagtaatgggcggcacgccgacgcaagtcgaaaacgccgccgaaatcggcatggaacacaacctcggcatgacctgcgacccggttggcgggctcgtgcagattccgtgcatcgaacgcaatgcaatgggcgcgatcaaggcgctgaacgccgcacgcatggcgatgaaaggcgacggccagcactacgtgtcgctcgacaacgtgatcaagacgatgcgcgaaaccggcgccgatatgaagacgaaatacaaggagacgtcgcgcggcgggttggccgtgaacgtcatcgagtgttga

SEQ ID NO: 8228 - protein, 464 aa, Burkholderia xenovorans LB400
MNVSVFDLFKIGIGPSSSHTVGPMIAACRFASHIEDANLLGFVRSVKAELFGSLGATGKGHGTDKAVLLGLEGNLPDSIDPDVIEPRLAAIRAMKQLVLLGKHPVKFDEREHLGFFRKLMPGAPGSGIVHPNGMRFQAFDENGQLLVEKEYYSIGGGFVVNREGDRVNGVRAGAQVPYPFRTGDDLMRICRETGLSIAQITLRNECAARPEQDVRDGLLAIWRVMSACVERGCKVRGELPGPMHVKRRAADLCAQLRSRSEESLRDPLSMLDWVNLYAMAVNEENAAGGRVVTAPTNGAAGVIPAVLHYYVKFMHASNDEGVVDFLLTAAAIGIIYKETASISGAEVGCQGEVGVACSMAAAALAAVMGGTPTQVENAAEIGMEHNLGMTCDPVGGLVQIPCIERNAMGAIKALNAARMAMKGDGQHYVSLDNVIKTMRETGADMKTKYKETSRGGLAVNVIEC

SEQ ID NO: 8229 - DNA, 1470 bp, Burkholderia xenovorans LB400
  CDS (1)..(1470): transl_table=11
atgactgccgcgttggcgcaatccgccattatcgcagcccggcatataacccatctaactcgcctttatggtggatatccgatgacactcagcgttttcgatctcttcaagattggcatcgggccttccagctcgcataccgtcgggccaatgcgcgcggcgctgatgttcacggagggactcgagcgcgacggcctgctggctcggacagcaactgtgaatgtcgagctgtacggatcgcttggcgcgacgggcaggggccacggtacagaccgcggcgtcatgcttggcctgatgggtgatgcacctcacaccgtgaatccggagaccaccttcgaacgccttgaagcagtgcgcacgtcccgtctcttgtcgctccttggtcgtcacacgattccattcacgccgaaggagcacatcacgttctatcgccaggcgctgcccgagcacccaaacggcatgaagctgcgcgtactcgatgcgagcggcgaaacgctgcgcgaaagtacctacttttccgtggggggtggcttcgtcgtgatcgctggcgcaccgaagacgaacgctctgtccgcggcagaacgactgccgtatccgtttcgcaccggtgccgaactgctgcaactgtgtgcgtcgacaggcaagcccatcgcacagctcatgctcgagaacgagcgcatctggcatagcgacgaggagatccggtcaggccttctgcgcatctgggacgcaatgcaatcgagcgtcgagcgcggttgcggcgtcggcaatccggacgccgatggcacgctgcctggccccttgaacgtaaagcggcgcgccccgaagctctaccgcgctctcaccagcaatcctgagcgcgcgttgcaggaccagcttttgatgatcgactggatcaacctctatgcgatcgccgtgagcgaggaaaacgccgctggcggacgcgttgtcaccgcgccgaccaacggagctgccggcatcatccctgccgtgctgcattactacgtgcgcttcacgccgggcgcgaacgagaagggagtgatcgacttcctgttcaccgccgcatccatcggaattctctacaagctcaacgcatcgatctcaggcgccgaggtgggctgtcaaggtgaagtaggcgtcgcgtgttcgatggcggcgggagcgcttgcggccgtccttggtggtacaccccggcaggtcgagaatgccgccgaaatcggcatggaacacaacctcggcctcacctgcgacccggtcggcggcatggtacagattccgtgcatcgagcgcaacgggatggcgtcggtaaaggccgtcaacgccgcgcgcatggcgctgcgcggcgacggcgcgcattacgtgtcgctcgactcggtcatcaagacgatgcgcgagacgggctcggacatgaagacgaagtacaaggaaacatcgcgcggtggccttgcggtaaatatcgtcgagtgctga

SEQ ID NO: 8230 - protein, 489 aa, Burkholderia xenovorans LB400
MTAALAQSAIIAARHITHLTRLYGGYPMTLSVFDLFKIGIGPSSSHTVGPMRAALMFTEGLERDGLLARTATVNVELYGSLGATGRGHGTDRGVMLGLMGDAPHTVNPETTFERLEAVRTSRLLSLLGRHTIPFTPKEHITFYRQALPEHPNGMKLRVLDASGETLRESTYFSVGGGFVVIAGAPKTNALSAAERLPYPFRTGAELLQLCASTGKPIAQLMLENERIWHSDEEIRSGLLRIWDAMQSSVERGCGVGNPDADGTLPGPLNVKRRAPKLYRALTSNPERALQDQLLMIDWINLYAIAVSEENAAGGRVVTAPTNGAAGIIPAVLHYYVRFTPGANEKGVIDFLFTAASIGILYKLNASISGAEVGCQGEVGVACSMAAGALAAVLGGTPRQVENAAEIGMEHNLGLTCDPVGGMVQIPCIERNGMASVKAVNAARMALRGDGAHYVSLDSVIKTMRETGSDMKTKYKETSRGGLAVNIVEC

SEQ ID NO: 8231 - DNA, 1377 bp, Ralstonia metallidurans CH34
  CDS (1)..(1377): transl_table=11
gtggcagtcagcgtcttcgatctgttcaaggtgggcattggcccgtccagttcgcacaccgtcggcccgatgcgcgccgccctgatgtttgcccacgggctggagcgtgacgggctgctgccgcaggtggcaagtgtgcgcgtggagttgtatggctcgctgggtgcgacgggcaagggacacggcaccgacaagggcgtgatcctgggcctgatgggggaagcgccggacacggtcgacccgaacaccatcgacgccaagctcgccgcgctacgcgcgagccgccagctctcgctgctcggcacgcatacggtgccattcgtagaacgcgaacacatcgcgttctatcgtcgcgaggcgatggccgagcatcccaacgggatgaaattccacgcctacgatacggacggcacctcactacgcgaggcccgctatctgtccgtgggtggtggcttcatcgtcacggcgggctcacctaacacgcagttgcaagcggccgagcgccagttgccgcatccgttccgcagcggacgcgcgatgctcgacatggctcacgccagcggcaagtcgattgcccggctcatgctggagaacgaactcacgtggcgctccgagcaggaggtcatggacggcctgctccacatctgggacgtgatgcagcaatgcgtggcacgcgggtgccgcaccgatggcgaactgcccgggccattcaaggtgcgccgccgcgcgcccgagctgtatcgcaacctgacggagcgcgccgagcgcaccctttccgatccgctttcggtcatggactgggtcaacctgtacgcaatcgccgtcaacgaagaaaacgcggcgggtggccgcgtggtcacggcgcccaccaatggcgcggccggcatcattccggcggtgctgcactactacgaccgcttcattccgggcgcgaacccacagggcgcagtggacttcctgctgacggcaggcgcgatcggtctgctctacaagctcaacgcgtcgatctccggcgcggaggtcggatgccagggtgaagtcggcgtggcctgttcgatggcggccggtgcgctggcggccgtgctcgggggcacgcccgagcaggtggaaaacgccgccgagatcggcatggagcacaacctcggcctgacctgcgaccccgtgggcggactggtgcagattccctgcatcgagcgcaatgccatggcggcggtcaaggcggtcaatgcggcgcgcatggccctgcgcggcgacggcacgcactacgtctcgctcgactcggtcatcaagaccatgcgcgaaactggcgcggacatgaagaccaagtacaaggaaaccgcgcgaggcggcctggcggtcaatatcgtggagtgctga

SEQ ID NO: 8232 - protein, 458 aa, Ralstonia metallidurans CH34
MAVSVFDLFKVGIGPSSSHTVGPMRAALMFAHGLERDGLLPQVASVRVELYGSLGATGKGHGTDKGVILGLMGEAPDTVDPNTIDAKLAALRASRQLSLLGTHTVPFVEREHIAFYRREAMAEHPNGMKFHAYDTDGTSLREARYLSVGGGFIVTAGSPNTQLQAAERQLPHPFRSGRAMLDMAHASGKSIARLMLENELTWRSEQEVMDGLLHIWDVMQQCVARGCRTDGELPGPFKVRRRAPELYRNLTERAERTLSDPLSVMDWVNLYAIAVNEENAAGGRVVTAPTNGAAGIIPAVLHYYDRFIPGANPQGAVDFLLTAGAIGLLYKLNASISGAEVGCQGEVGVACSMAAGALAAVLGGTPEQVENAAEIGMEHNLGLTCDPVGGLVQIPCIERNAMAAVKAVNAARMALRGDGTHYVSLDSVIKTMRETGADMKTKYKETARGGLAVNIVEC

SEQ ID NO: 8233 - DNA, 1353 bp, Acidobacteria bacterium Ellin345
  CDS (1)..(1353): transl_table=11
gtgaagaccagcattctcgatattcttcggatcggtatcggtccgtcgagttcccataccgttggaccgatgcgtgcgtcgcgcgaatttcttgtgaggctcggcacaaggcttgtttcggttgatcgactcctcgtcgaactctacggctcattggctttgaccggccatgggcacggaacggaccgcgcgattttgctggggctcgaaggatgcaagccagaactcgtcgatcccgagttgatcgacgaaactatttccagcattcgaaatacccagaaaattaagttgctaggtgagcgacaaatatcgttcggcgaaaatcttgatttagtgttccatcgcgatatcgcgatgccgggccatccaaatacgttgcgactaaccgcattcgacgatgcgggagatgagatcgagaccgctctctactattcagtggggggcggctttattgcgcgtgaaggcgaggttcaggctagggaagaaaagcaggagccgccttatcccttctcaagcgctgaggaactcttgagactcggagaacgacatggcctcgcaatctggcagattgtgttggcgaatgaagagcgatggcgtggtgaagcggatgttcgtgcttacgtcgcgaagatctggaacacaatgcaaggatgcgtagcgcgcgggctaaagaccgaaggcatcctgcccggcggtctcaaggtgcggaggcgagcgccaaatctcgcacgaaggcttgccgagaaaaaaaccagcgatcctctgggggcgttggactgggtgaacgcgtttgcgtttgcggtgaacgaagaaaacgctgccggcggtcgagtagtaacagctcctacgaacggtgcggccggcgttattccggcggtggcgcactactatgagaaattcgtgccggaggcgtcagaagatgggttgttccgctttctgctgacggccggcgccatcggtattctctacaaggagaacgcttcgatctcaggcgcggaagtcggatgccagggagaggtcggcgtcgcttgctcgatggccgccggcggactcgtagctgccttgggaggaaccaacgatcaagttgagcacgccgcggagatcggtatggaacaccatctggggatgacgtgtgatccgattgccggactagtgcagattccctgtatcgaaagaaatggcgttggtgctgtcaaggctatcaatgcgtgccgcatggcgatgcaggagcccgaacacaaggtgtcgctggatcaggttatcgagacgatgtacaaaacgggtctcgatatgcagactcgctacaaggaaacatcacaggctggcctcgcattgaacatcatcgagtgctaa

SEQ ID NO: 8234 - protein, 450 aa, Acidobacteria bacterium Ellin345
MKTSILDILRIGIGPSSSHTVGPMRASREFLVRLGTRLVSVDRLLVELYGSLALTGHGHGTDRAILLGLEGCKPELVDPELIDETISSIRNTQKIKLLGERQISFGENLDLVFHRDIAMPGHPNTLRLTAFDDAGDEIETALYYSVGGGFIAREGEVQAREEKQEPPYPFSSAEELLRLGERHGLAIWQIVLANEERWRGEADVRAYVAKIWNTMQGCVARGLKTEGILPGGLKVRRRAPNLARRLAEKKTSDPLGALDWVNAFAFAVNEENAAGGRVVTAPTNGAAGVIPAVAHYYEKFVPEASEDGLFRFLLTAGAIGILYKENASISGAEVGCQGEVGVACSMAAGGLVAALGGTNDQVEHAAEIGMEHHLGMTCDPIAGLVQIPCIERNGVGAVKAINACRMAMQEPEHKVSLDQVIETMYKTGLDMQTRYKETSQAGLALNIIEC

SEQ ID NO: 8235 - DNA, 1374 bp, Silicibacter sp. TM1040
  CDS (1)..(1374): transl_table=11
atgttcctctccgtttttgacatgttcaaagtgggcatcggcccgtcctcctcgcacaccatgggcccgatggtggccgcggcacgctttctcgacatgatgcgggcctcgccctttgactttcacgggctgcgcgcatcgctgcacggctcgctggcctttaccggcgtcggccatgccaccgaccgcgccaccattctcgggcttgctggctttttgcccgacacctatgacgacgacaaagccgaggccgcgcttgcggcgatcaccgagaccaagaccatcgtgctcgaggatctcggcacgctgcgctttgaccccaaggcggatatgatatttgactatgatcacgcgcttccgggccacgccaacggcatggttctgatggcgctggatgcgcagggcgacgtgaccttgcggcaggtgttctattccgttggcggtggctttgtgctgaccgaggaagagctggcacagggcaaggccacggatgaaggcgaccccgtcccctacccgttcaaatccgccgccgagatgctcgagatggcaaagacctccgggctctcgatcgcccagatgaaacgcgccaatgaagtctcgcgcggctgcgagcagagttttgccaagggtacacagcgcctgtggcaggtaatgaacgactgtatcaaccgcgggctggagcgtgacggcatcctgcccggcggtctgagcgtgcgccgccgcgccaagggtatctatgatgcgctgatggccgagcgcggcatgaacctgaccgcgccgcacaccatcaacgactggatgagcgtctatgctatggccgtgaacgaggaaaacgccgcaggcggacaggtcgtgacggcccccaccaatggcgcggcgggcgtcctgccagcggtgctgcgctattaccttgatcacgtgccgggcgcgtcggaaaaacacatcgaggatttcctgctgaccgcagccgccattggcgggctggtcaaatacaacgcctcgatctctggcgccgaagcgggttgtcaggccgaagtcggctctgcctctgccatggcggcggcggggctctgtgcggtgatgggtggcacgccggaacaggtggagaacgcggccgagattgcgctcgaacaccacctcggcatgacctgcgacccggtcaaagggttggttcaggtgccctgcatcgagcgcaacggtctcggcgcgatcaaggcggtttcggcagcgtccctggcgctgcgcggcgacgggcagcattttgtgccgctggatgccgtcatcgaaaccatgcgccagaccggggccgacatgcacgagaaatacaaggaaacctcgcttgggggcctcgccgtcaacgtccccaactgctga

SEQ ID NO: 8236 - protein, 457 aa, Silicibacter sp. TM1040
MFLSVFDMFKVGIGPSSSHTMGPMVAAARFLDMMRASPFDFHGLRASLHGSLAFTGVGHATDRATILGLAGFLPDTYDDDKAEAALAAITETKTIVLEDLGTLRFDPKADMIFDYDHALPGHANGMVLMALDAQGDVTLRQVFYSVGGGFVLTEEELAQGKATDEGDPVPYPFKSAAEMLEMAKTSGLSIAQMKRANEVSRGCEQSFAKGTQRLWQVMNDCINRGLERDGILPGGLSVRRRAKGIYDALMAERGMNLTAPHTINDWMSVYAMAVNEENAAGGQVVTAPTNGAAGVLPAVLRYYLDHVPGASEKHIEDFLLTAAAIGGLVKYNASISGAEAGCQAEVGSASAMAAAGLCAVMGGTPEQVENAAEIALEHHLGMTCDPVKGLVQVPCIERNGLGAIKAVSAASLALRGDGQHFVPLDAVIETMRQTGADMHEKYKETSLGGLAVNVPNC

SEQ ID NO: 8237 - DNA, 1416 bp, Myxococcus xanthus DK 1622
  CDS (1)..(1416): transl_table=11
atggccgtcagcgtcttcgacctcttcaagattggaatcggaccctccagctcgcacaccgtcgggcccatgcgagcggcgcgcatgttcgcccggaagctggcggacacgggcgtgctggagcggctcacccggctcaaggtggagctgttcggctcgctgggcgcgacgggcaagggccacggcagcgacaaggccgtggtgctgggcctgatgggcgagacaccggaggccgtggacgtggaggccgtgcccgccatcatttcccgctggcgcgcggaaggccgcgtggcgctgctcggtcagcgcgaggtgacgttccgagacggcgagcacctggtcatgcaccgccgccgctcgctgcccttccatcccaacggcatgcgcttcaccgcctccggcgcggacggcgcggagctggcatcgaccgcctactactccgtgggtggcggcttcatcgtcgacgagtccgccgccgcggcgggcaaggacccgctgagcaaggacaccacgccgctgcccttccctttccactccgccgccgagctgctggcccactgcgagcgcgagcgcatgagcttcagctcgctcatgctcgccaacgagaagacctggcgcgacgaggcggagattcgcgccgggctgctgcgcgtctgggacgtgatgcaggcctgcgtgcgccgtggctgcaccagcggcggcatcctccccggtggcctcaaggtggagcgccgcgccgcgggcatgtaccagaagctcatcagccgtcccgaggccggcctcaccaacccgctcaccgtgctggactgggtgaacctctacgccctggccgtcaacgaggagaacgcggcgggaggccgcgtcgtcaccgcgcccaccaacggcgccgcgggcatcatccccgccgtcctgcactactactggcgcttcgtgcccggcgcgaacgaggacggcgtggtgcgcttcctgctcaccgccggtgccattggcgtgctctacaaggagaacgcctccatcagcggcgcggaggtgggctgccagggtgaagtcggcagcgcctgctccatggccgcgggggcgctcacggaggtcatggggggcacgccgctccaggtggagaacgcggcggagatcgccatggagcacaacctgggcctcacctgcgaccccattggcggactggtgcaggtgccgtgcatcgagcgcaacgccatggcctccgtgaaggccatcaacgccacgcgcatggccctccacggcgacgggcgccacttcgtcagcctggacaaggtcatccggacgatgcgcgacaccggccgcgacatgaaggacaagtacaaggagacggcgcgaggggggctggccgccaacgtgctggaggtggccaacctgagcgtgggccttcccgaatgctga

SEQ ID NO: 8238 - protein, 471 aa, Myxococcus xanthus DK 1622
MAVSVFDLFKIGIGPSSSHTVGPMRAARMFARKLADTGVLERLTRLKVELFGSLGATGKGHGSDKAVVLGLMGETPEAVDVEAVPAIISRWRAEGRVALLGQREVTFRDGEHLVMHRRRSLPFHPNGMRFTASGADGAELASTAYYSVGGGFIVDESAAAAGKDPLSKDTTPLPFPFHSAAELLAHCERERMSFSSLMLANEKTWRDEAEIRAGLLRVWDVMQACVRRGCTSGGILPGGLKVERRAAGMYQKLISRPEAGLTNPLTVLDWVNLYALAVNEENAAGGRVVTAPTNGAAGIIPAVLHYYWRFVPGANEDGVVRFLLTAGAIGVLYKENASISGAEVGCQGEVGSACSMAAGALTEVMGGTPLQVENAAEIAMEHNLGLTCDPIGGLVQVPCIERNAMASVKAINATRMALHGDGRHFVSLDKVIRTMRDTGRDMKDKYKETARGGLAANVLEVANLSVGLPEC

SEQ ID NO: 8239 - DNA, 1383 bp, Mesorhizobium sp. BNC1
  CDS (1)..(1383): transl_table=11
atgttcctgtctgtcttcgatatcttcaagatcggcatcggcccctcctcgtcgcacactatggggccgatggtcgccgctgggcgcttcatcgaggcgctcgccgcccagcccaaccggaccgaatgccggcggctgacggtttcgctgtacggctccctcgccttcaccggcaagggccacgcaacggaccgggcggtgtttttggggttgatggggtttctccccgatacgctcgaccccgaccaggccgaagccctcgttgcgcagctccaggcaacccgcagcatcacggcgcccggcatcggcgcaataaccttcgatccggacagcgacctcgtcttcgactacgggccgccgctgccgggccatgccaacggcatggtcttcaccgcatttggaccctcaggcactgtcctgctgcgccaggtctggtactcgatcggcggcggtttcgtcgttagcgaagacgagctctccgccacctcgacatcacgggacgctgcgccaaccgatgtgccttatcccttcacctctgccgtcgagatgctgcggatgggacgcgcctctggactgtcgatcgcggcgatgaaggaggcgaacgaacgcgtgcgccatggtcgcgatctggagccgggacttgaacgactgcaggcggcgatgaacggctgcatcgatcgcggcctcaggcaggaaggaatactgcccggaggactgtccgtgcgacgccgcgctcgaggcctgcaccagcaattgctcggcgagcgcggcagcaaccggacacagccgcacgcggcgaccgactggctgctcgtttatgccatggccgtcaacgaggaaaatgcggccggagggcgcgtcgtgaccgcgccgaccaacggcgccgccggggtcgtacccgcagtgctgcgctactatcgcggccactgtgtcggtgccagcgcggatggcaaacggcagtttctcctgaccgcagccgccatcggcgggctgatcaagcaccgcgcctcgatctcgggtgcggagtgcggatgccaggccgaaatcggctcggcatccgccatggccgcgtccgggctttgcgcggcgcttggcggaaccaacgagcagatcgagaacgccgcagaaatcgcgctcgagcatcatctcggtatgacgtgcgacccggtcggcggcctcgtccaggtgccctgcatcgaacgcaacggcctcggcgcgatcaaggcagtctccgcagccagcctggcgttgcgtggcgacggccagcatttcatgccactcgacaattgcatccaaacgatgcgtcagatcgggcatgacatgtccgagaagtacaaggaaacgtccatcggcgggctcgcggtgaatctgcccgaatgctga

SEQ ID NO: 8240 - protein, 460 aa, Mesorhizobium sp. BNC1
MFLSVFDIFKIGIGPSSSHTMGPMVAAGRFIEALAAQPNRTECRRLTVSLYGSLAFTGKGHATDRAVFLGLMGFLPDTLDPDQAEALVAQLQATRSITAPGIGAITFDPDSDLVFDYGPPLPGHANGMVFTAFGPSGTVLLRQVWYSIGGGFVVSEDELSATSTSRDAAPTDVPYPFTSAVEMLRMGRASGLSIAAMKEANERVRHGRDLEPGLERLQAAMNGCIDRGLRQEGILPGGLSVRRRARGLHQQLLGERGSNRTQPHAATDWLLVYAMAVNEENAAGGRVVTAPTNGAAGVVPAVLRYYRGHCVGASADGKRQFLLTAAAIGGLIKHRASISGAECGCQAEIGSASAMAASGLCAALGGTNEQIENAAEIALEHHLGMTCDPVGGLVQVPCIERNGLGAIKAVSAASLALRGDGQHFMPLDNCIQTMRQIGHDMSEKYKETSIGGLAVNLPEC

SEQ ID NO: 8241 - DNA, 1401 bp, Mesorhizobium sp. BNC1
  CDS (1)..(1401): transl_table=11
atgttcctttcagtcttcgatcttttcaagatcggcatcggtccgtcgagttcacatacgatggggccgatggtagccgcagagcgctttctgcgcgaaatcgcggaaggggagtggccgcggccggcgggcgtgcaagtcaatcggctgtccgtcagcctgcacggctcgctcgcattcacgggtgtgggacacgctaccgaccgcgccgcgatccttgggctgcaaggtttcacaccgacgacggtggacccggaccaggcggattccattctggaacaaatcggcagcacaaagcggctttcgcccgccggacatcccgaataccgcttcgaccccgagacggatctcgtctttgacaggaaggcgcctctgcccggccatgcgaatggaatggcgttcagcgctttcgatgcggatgatcggctgcttttgcgacgcgtctattactccgtgggcggcgggttcgtagtctcgcaggaggagcttgaagcgctgaaggccgagaagaggccgggcgcggatagcagcgtcccctatccctttaccaatgcccgccagatgctggagatggccgcctcaagcggcctctcgatcgccgagatgaagcgtgccaacgagctggctcacagaagcgctcaggaacttgacgcgggcctcgatcgcatttgggacgccatgcatggctgcatcgagcgcgggctgacgcaggaaggcatcatgccgggcgggctgaaagtgcgccgccgcgcgcgtgaactgcaccgcaagctggaagaggaatggcggcagaacaggcccaacccccttgccgccaatgactggctttccgtttatgccatggccgtcaatgaagagaacgcggcgggcggaagggtcgtcaccgctcccaccaacggcgcggcgggcgtcgtgccggcggtgatgcgctactggctgcggttccatcccgaggcagacaggaacggcattcgcgatttcctgctcactgccgcggcgattggcggactcatcaaattcaatgcgtcgatttccggcgcggaggtgggctgccagggggaagtgggctccgcctcggccatggcggcggcggggctggccgcggtcatgggcggcacgcccgagcaagtggaaaacgcggccgagatcgcgttggaacaccatcttggcatgacctgcgacccggtggccggtctcgtgcaagtgccctgcatcgagcgtaatgcgctgggtgcggtcaaggctgttacggcggcatctctggccatcaaaggcgacggccagcatttcgtatcgctggacgccgcggtcgagaccatgcgccagacggggctcgatatgaacgagcgctataaggaaacaagtctcggcgggcttgcggtcaatgtagtagaatgctga

SEQ ID NO: 8242 - protein, 466 aa, Mesorhizobium sp. BNC1
MFLSVFDLFKIGIGPSSSHTMGPMVAAERFLREIAEGEWPRPAGVQVNRLSVSLHGSLAFTGVGHATDRAAILGLQGFTPTTVDPDQADSILEQIGSTKRLSPAGHPEYRFDPETDLVFDRKAPLPGHANGMAFSAFDADDRLLLRRVYYSVGGGFVVSQEELEALKAEKRPGADSSVPYPFTNARQMLEMAASSGLSIAEMKRANELAHRSAQELDAGLDRIWDAMHGCIERGLTQEGIMPGGLKVRRRARELHRKLEEEWRQNRPNPLAANDWLSVYAMAVNEENAAGGRVVTAPTNGAAGVVPAVMRYWLRFHPEADRNGIRDFLLTAAAIGGLIKFNASISGAEVGCQGEVGSASAMAAAGLAAVMGGTPEQVENAAEIALEHHLGMTCDPVAGLVQVPCIERNALGAVKAVTAASLAIKGDGQHFVSLDAAVETMRQTGLDMNERYKETSLGGLAVNVVEC

SEQ ID NO: 8243 - DNA, 1383 bp, Rhodococcus sp. RHA1
  CDS (1)..(1383): transl_table=11
atgaccatcagcgtgttcgacctgttctccgtcggcgtcggcccctcgagttcgcacaccgtcggaccgatgcgcgccgccgcgaggttcgtctccgacctccgcgccctcgacgccctgtccgcagtggcggacatccgcgtcgacctgtacgggtcgctcgcggcgaccggagcgggccacggaacgatgtccgcggtgctgctcgggctcgaggggtactttcccgagaagatcgagaccgaggagatggaacgacgtctggaggagatgcgcagcacccggcgcatcagggtcggcggttcgcacgacgtcgcgctcgccgaggacgagatcgtcctccatccgctgaccatcctgccgctgcacccgaacgggatgaggatcaccgcgtccacggccgccggcgtcgagatccacagcgaaacctacttttccgtcggcggcggcttcgtcgtcaccgaagcggagagcgcacagccgccgcgcgccgccaccggcggcctgtcgttcgggtccgccaaggaactcctcgacatcgcggcccgccacggctacaccatcagtgacgtgatgctccagttcgaacgcgaaacgcggtcgaccgtggagatctacgagcggctcctccatatccgcgacgtcatggtgaaatgcgagaagcgcgggatcgcgcgcgacgggatccttcccggcgctctgcgcgtgcgccggcgggcacgggactggtatctccgcctggatcaggaagacccgcaccgcgatcccgcattcgccgaggactggatcaacctcgtcgccctggccgtcaacgaggagaacgcatccggcggccggatcgtcaccgcgccgaccaacggggccgcgggcatcatccccgcggtgctgcactacgccgttcactacaccccggccgggaagtcggatcccgacgacaccgcgatccgcttcctcctcgccgccggcgccgtcggatcactgtacaaggaacgcgcgtcgatctccggagccgaggtcggctgtcagggcgaggtgggttccgcggcgtcgatggccgccgccgggcttgcggagatcctcggcggcacaatcgaacaggtggagaatgccgcagagatcgcgatggaacacagcctcggcctcacgtgcgatcccatcgaagggctggtgcagattccgtgcatcgaacgcaacgcgatctcggcgggcaaggccatcaacgccgctcgcatggccctgcgcggcgacggcacccaccgggtcagcctcgaccaggtgatcgagacgatgcgctcgaccggcgcagacatgctgtcgaagtacaaggaaacgtcgaccggcggtctggccgtcaacgtcccggtcaactatgtcgagtgctga

SEQ ID NO: 8244 - protein, 460 aa, Rhodococcus sp. RHA1
MTISVFDLFSVGVGPSSSHTVGPMRAAARFVSDLRALDALSAVADIRVDLYGSLAATGAGHGTMSAVLLGLEGYFPEKIETEEMERRLEEMRSTRRIRVGGSHDVALAEDEIVLHPLTILPLHPNGMRITASTAAGVEIHSETYFSVGGGFVVTEAESAQPPRAATGGLSFGSAKELLDIAARHGYTISDVMLQFERETRSTVEIYERLLHIRDVMVKCEKRGIARDGILPGALRVRRRARDWYLRLDQEDPHRDPAFAEDWINLVALAVNEENASGGRIVTAPTNGAAGIIPAVLHYAVHYTPAGKSDPDDTAIRFLLAAGAVGSLYKERASISGAEVGCQGEVGSAASMAAAGLAEILGGTIEQVENAAEIAMEHSLGLTCDPIEGLVQIPCIERNAISAGKAINAARMALRGDGTHRVSLDQVIETMRSTGADMLSKYKETSTGGLAVNVPVNYVEC

SEQ ID NO: 8245 - DNA, 1383 bp, Rhodococcus sp. RHA1
  CDS (1)..(1383): transl_table=11
gtgacgatcagtgtgttcgacctgttctcggtcggtatcggaccctcgagttcgcataccgtcgggccgatgcgggcggcgggcacgttcgtcgacgacctcgacgcactcggcctcctcggggacgtcgccggtgtccgtgtcgatctgtacggatcgctcgcggccaccggcgccggccacggcaccatgtcggcgatcctcctcggcctcgaggggtatcggcccgacaccatcgccacggaggagatggagaggcgactcgacgaggtgcgggcgagtcggcggatccgcctcggcgggacggtcgacatcccgctcgccgaggacgagatggtgctgcacccgttgacggtcctggattttcaccccaacggcatgaccctcaccgccaccggcgtcaccggtcgccaactgcacgcgcagacgtacttctcgatcggcggcggattcgtcgtcaccggcgccgaaccggaactgcccgtcgacgcaggcacgaattcgctgtcgttcgggtcggcgcgcgaactgctcgacctcagcgagcactacgggctcacgatcagtgagatcatgctcgagcacgaaagcgccctccggcccgagccggaggtccgggcgcggctcctgcacatccgggacgtgatggtcgagtgtcagcgacgcggaatcagccgggacgggtacctgcccggcagtctgcgggtacgccgccgcgcccgcggctggtacgagcggctgaacgtcgaggatcccgatcgtgatcccgcgttcgccgaggactgggtgaacctggtggccctcgccgtcaacgaggagaacgcgtccggcggacggatcgtcaccgcccccaccaacggggcggccggcatcatcccggcggtcctgcactacgcgctgcactacacccccgccggaaaggcggacccggacggcacggcggtgcgattcctgttgacggcaggcgcaatcggatccctgtacaaggaacgggcctcgatctccggggccgaggtgggctgccagggcgaggtgggttccgcggcgtccatggccgccgccggcctcgccgagatcctcggtggcagcccggagcaggtggagaattcggcggagatcgcgatggaacacagtctcggtctgacgtgtgatcccatcgggggcctggtgcagatcccgtgcatcgaacgcaacgccatctcggcgggcaaggcgatcaacgccgcccggatggctctgcgcggcgacggcacccaccgggtcagtttggatcaggtcatcgagacgatgcgggccaccggcgccgacatgagctcgaagtacaaggagacctccaccggtggtctcgccgtgaacgtgtcggtgaacctcgtcgaatgctga

SEQ ID NO: 8246 - protein, 460 aa, Rhodococcus sp. RHA1
MTISVFDLFSVGIGPSSSHTVGPMRAAGTFVDDLDALGLLGDVAGVRVDLYGSLAATGAGHGTMSAILLGLEGYRPDTIATEEMERRLDEVRASRRIRLGGTVDIPLAEDEMVLHPLTVLDFHPNGMTLTATGVTGRQLHAQTYFSIGGGFVVTGAEPELPVDAGTNSLSFGSARELLDLSEHYGLTISEIMLEHESALRPEPEVRARLLHIRDVMVECQRRGISRDGYLPGSLRVRRRARGWYERLNVEDPDRDPAFAEDWVNLVALAVNEENASGGRIVTAPTNGAAGIIPAVLHYALHYTPAGKADPDGTAVRFLLTAGAIGSLYKERASISGAEVGCQGEVGSAASMAAAGLAEILGGSPEQVENSAEIAMEHSLGLTCDPIGGLVQIPCIERNAISAGKAINAARMALRGDGTHRVSLDQVIETMRATGADMSSKYKETSTGGLAVNVSVNLVEC

SEQ ID NO: 8247 - DNA, 1410 bp, Rhodococcus sp. RHA1
  CDS (1)..(1410): transl_table=11
atggctctcagcgctttcgacctcttctccatcggcatcggcccgtccagctcgcacacagtaggcccgatgcgcgccggcaccctgttcgtcgacgaggtcaaacacctcctcgaggtccggtcgatcacccgcctcgaggtcgacctctacgggtcccttgcggcgaccggccgtgggcacggcaccctcggcgccgtcctcctcggcctcgagggcaacgcccccgagacggtcgaccccacctacgcccacacccgcgtcgaacaaatcgacaccgaacaccgcctacagttcggctcgaccaccgacctggtcttcggcaccgcggacatcggcatgcacccgttgaccatcaaagaccgccacaccaacaccatccggttcgccgtccacaccgacccggccgccgccgagtgttccgccgaccaactcgccgccaccacccccgcccacgaggccgtgtactactcgatcggcggcggcttcgtggaacgagacggccacaacgccgccgggccggagaccccggtaccactgcccttccgcaccggcgccgaactgctcgacatctgcgagcgcaagaacctgccgatcagcgacgtcatgtggcgcaacgaactcgccacccgcagccccgaacaaatccgtgccgggctgctcgaaatctggcaggtgatggccgcctcgatccacaacgggttcaccacccccggccacctgccgggatcgctacgggtcaagcgccgcgccgcggagttctactcccgcctggtcgaacgcgagaaggtcgtcgaccatgccgactcgatggattggctcaacgtcgccgcgatggcggtcaacgaggagaacgccgccggcgggcggatcgtgaccgcccccaccaacggcgccgcgggaatcgtccccgccgtcctgttctgggcgctgcgctacctccccggcctcaacacccagcacgaccgcgacgacgcggtagtgaagtacctgctcactgccgccgcgatcgccgtgctctacaaagaacgcgcctcgatctccggcgccgaggtcggctgccagggcgaggtcggctccgcctgctcgatggccgccggcgccctcgccgaactgctcggcgccacccccgcgcaggtcgaaaacgccgccgagatcggcatcgaacacaacctcggcctgacctgcgacccgatcggcggcctggtgcagatcccgtgcatcgaacgcaacgccatcgcctccgtcaaagccgtcaacgcggcgaaaatggccctgcacggcgacggcacccaccgcgtgacgctcgaccaggcaatcgagaccatgcggcagaccgggatggacatgctcacgaaatacaaggaaacctccaccggcggcctcgccgtcaacgtccccgaatgctga

SEQ ID NO: 8248 - protein, 469 aa, Rhodococcus sp. RHA1
MALSAFDLFSIGIGPSSSHTVGPMRAGTLFVDEVKHLLEVRSITRLEVDLYGSLAATGRGHGTLGAVLLGLEGNAPETVDPTYAHTRVEQIDTEHRLQFGSTTDLVFGTADIGMHPLTIKDRHTNTIRFAVHTDPAAAECSADQLAATTPAHEAVYYSIGGGFVERDGHNAAGPETPVPLPFRTGAELLDICERKNLPISDVMWRNELATRSPEQIRAGLLEIWQVMAASIHNGFTTPGHLPGSLRVKRRAAEFYSRLVEREKVVDHADSMDWLNVAAMAVNEENAAGGRIVTAPTNGAAGIVPAVLFWALRYLPGLNTQHDRDDAVVKYLLTAAAIAVLYKERASISGAEVGCQGEVGSACSMAAGALAELLGATPAQVENAAEIGIEHNLGLTCDPIGGLVQIPCIERNAIASVKAVNAAKMALHGDGTHRVTLDQAIETMRQTGMDMLTKYKETSTGGLAVNVPEC

SEQ ID NO: 8249 - DNA, 1377 bp, Shewanella sp. MR-7
  CDS (1)..(1377): transl_table=11
atgattagcgtattcgatatgttcaagatcggcattggcccttcgagttcacacactgttggccccatgaaagcgggcaaaatttttatgcagcaccttgctgactcgggcaaaattgcccaagtagatgaattacgagccgaactgtttggttccctcggccaaacgggtaaaggtcacggcacgggtaaagcggtaattttaggcttaatgggtgaagatccagaaaccgtcgacaccgacagcatcgatggcattcttgagcaagtttctaaaaacgagaccctcaccctcagctgcggcaaagtagtcaagtttacccgtgaagacggcattacctaccacagacgcaaaacgctacccgcccatgccaacgccatgacactgtatgcctacagcaaaggcgaatgtatttttgagcgcacttactattcagtcggcggcggatttatcttagacgaagatgaaatcaatcagcgcaatgcctcaccagcatcacaaattgaatcagcaccttacgattttaatagcagtgctcaattactggatttatgtactgagcatggcttaagcatttcttccctgatgatggccaacgagcttagcctcgccagcgaagaagaagtcaaagctaaactgtggaatatctggcaaaccatgaaaacctgtatcgaacggggttatcagaaggaaggtattctgcctggcggtttaaagctgcgccgccgcgcacctgcactctatcgtcgtctcaaagccgaaggccgtaacaacgtcgatccattaaccgcaatggattgggtcgatttattcgccctgtcggtgaacgagcaaaacgctgccggcgatcgcgttgtcaccgcaccaacaaacggcgccgcgggcattatccctgccgtgctgtgctactacgataccttcgtgcaagaagtcgatatcgatgtttgcgcccgttacctgttaaccgctgctgcgattggtattttgtacaagaaaaatgcctcgatttcgggcgctgaagttggctgtcagggcgaagttggtgtagcctgctcaatggcagctggcgcattgaccgagatcatgggcggcacagtcgaacatgttgaaaacgcggccgaaattggcatggaacataatctaggcctgacctgcgaccccgtaggcggcctagtacaagttccttgtattgaacgcaatgcgatgggtgcaatcaaggccattaacgcatcacgcatggcgctgcgcggcgacggcaaccacaaggtatcactggataaagtgattaaaaccatgatggatacaggtaaagatatgcgcagtaaatacaaagaaaccgccaaaggcggcctcgctgtgaacattgtagagtgttaa

SEQ ID NO: 8250 - protein, 458 aa, Shewanella sp. MR-7
MISVFDMFKIGIGPSSSHTVGPMKAGKIFMQHLADSGKIAQVDELRAELFGSLGQTGKGHGTGKAVILGLMGEDPETVDTDSIDGILEQVSKNETLTLSCGKVVKFTREDGITYHRRKTLPAHANAMTLYAYSKGECIFERTYYSVGGGFILDEDEINQRNASPASQIESAPYDFNSSAQLLDLCTEHGLSISSLMMANELSLASEEEVKAKLWNIWQTMKTCIERGYQKEGILPGGLKLRRRAPALYRRLKAEGRNNVDPLTAMDWVDLFALSVNEQNAAGDRVVTAPTNGAAGIIPAVLCYYDTFVQEVDIDVCARYLLTAAAIGILYKKNASISGAEVGCQGEVGVACSMAAGALTEIMGGTVEHVENAAEIGMEHNLGLTCDPVGGLVQVPCIERNAMGAIKAINASRMALRGDGNHKVSLDKVIKTMMDTGKDMRSKYKETAKGGLAVNIVEC

SEQ ID NO: 8251 - DNA, 1377 bp, Hyphomonas neptunium ATCC 15444
  CDS (1)..(1377): transl_table=11
atgttgtcggtattggatatttttcgggttggcattgggccttcgagttcgcacacggtgggtccgatccgcattgcaaaccggttcatggcgcatctggccagttcggaaaagctatcgcgaacggcacggattgaggcagagttgcaggggtcactcgcgctgacgggtgtggggcacgcgacgcccaaagccgtggtgctgggtctgctggggctcgaccctgaaacgctggatgcggaggaagcagaccggctggtcgcgcaagcgtatgagcagaaggtgctgccattgcccgatggccggaagatgaaattcgatccggagacggatattcggtttgcctatgatgtcatgccagacctgcacccgaacgggcttcggatcaaggcatatgacgaaggcggcgaagtgattgccgacgagacgtggtattccacgggaggcggatttatcgcgacgcgcaaacagctggaaaagcctgtcgaggatgacattctgccggtgggggaccctgtgccgtttggttttacctcggctgctcaattgctggaactctgccagacaaatggcctcggcatttatgaggtcatcctggcgaatgaagacgccaaacggccacgcgagaaaacagaagccgcgctggaccggattgcggcggtgatgatggcttgcattgatcgtggattgatgcggaagggggagctgccgggcggcttgaaggttcgccgccgcgccccggagatctggcagaaattgcaggagggcccgccctccaatgagcgcgagcagttgttcgattggctgaatgtttatgccatggctgtgaatgaagaaaacgctgcgggcgggcaggtggtgacggcgccaacaaatggcgcggccggtatcataccgtccgtaatccggcattattgtgccgataccgaagacgcgccggagcgtatgcggaagtttctgctgaccgccggcgggattgggctgctttacaagcagcgggcgtcaatttcgggcgctgagatgggatgccagggtgaggtgggggtcgcttgctcgatggcggcgggcggtcttgcggcggtttggggcggcacgccacaacaggtggctaatgcggcggagatcgggatggagcacaatctggggcttacctgcgatcctgtaggcggccttgtgcaaattccctgtattgagcggaacgcgattggcgccgtgaaagcggccaatgctgcccgcctggcgctgcattccctcgaacagacgaaagtctctctggatcaggttatcgagacgatgcggcagaccggattggacatgtcatccaaatataaggagaccagccagggcggtctcgcggtcaatgtgatcgaatgctag

SEQ ID NO: 8252 - protein, 458 aa, Hyphomonas neptunium ATCC 15444
MLSVLDIFRVGIGPSSSHTVGPIRIANRFMAHLASSEKLSRTARIEAELQGSLALTGVGHATPKAVVLGLLGLDPETLDAEEADRLVAQAYEQKVLPLPDGRKMKFDPETDIRFAYDVMPDLHPNGLRIKAYDEGGEVIADETWYSTGGGFIATRKQLEKPVEDDILPVGDPVPFGFTSAAQLLELCQTNGLGIYEVILANEDAKRPREKTEAALDRIAAVMMACIDRGLMRKGELPGGLKVRRRAPEIWQKLQEGPPSNEREQLFDWLNVYAMAVNEENAAGGQVVTAPTNGAAGIIPSVIRHYCADTEDAPERMRKFLLTAGGIGLLYKQRASISGAEMGCQGEVGVACSMAAGGLAAVWGGTPQQVANAAEIGMEHNLGLTCDPVGGLVQIPCIERNAIGAVKAANAARLALHSLEQTKVSLDQVIETMRQTGLDMSSKYKETSQGGLAVNVIEC

SEQ ID NO: 8253 - DNA, 1404 bp, Rhizobium leguminosarum bv. viciae 3841
  CDS (1)..(1404): transl_table=11
atgtttctctcggtattcgatgtcttcaagatcggtgtcgggccgtcgagctcacacacgatgggtccgatgtcggcggccaaccggtttctcgagttgatcctctcgaacgaatggccgcgcccgtcatcgggcgtgcaggtcacagccatcaaggtcagcctgcacggctcgctcgcccataccgggatcggccacggcacgggcagggctgtcattctcgggctgatgggcgaagcgcccgatagcgtcgatcccgacagaatggacggcatcgtcgacgccgtggagcgcaccggccgcatcacgccggagggccatcccgcttatcagttccagccgaagaccgacctgatcttcgacaaaaaacagccgctgcccggccatgccaacggcatggtcttttccgcctacgacagagacggccggcttctcgtcaagcgtatctattattcggtcggcggcggcttcgtcgtcaccgacaccgaactggagcagatgcgggcgaagaagaacgcgcccggcggcacgcgtgtgccctatcccttctccaccgccaagcagatgctcgagatggcggagcgctcggggttgtcgatcgcccagatgaagcgggcgaacgaggagagccagcgcagccaagaggaactcgaccaggggcttgaccgtatctgggaggcaatgcgctcctgcatcgagcgcggcctcaaggtcgagggcatcatgcccggcggcctcaacgtcaagcgtcgcgcccgcaggattcacgacaagctggaggaggagtggcgcagcaaccgcatcaacccgctgctcgccaatgactggctgagtgtctatgcgatggccgtcaacgaggagaatgcagccggcgggcgcgtcgtcacggcgccgaccaatggtgctgccggcgtcattccggcgacgatccgctactacgagcatttccacgaggactgggaccagaacggcatccgcgactatctgctgacggccgctgccatcggcggcatcatcaagcacaatgcctcgatctccggcgccgaggtcggctgtcagggcgaagtcggctcggcggcggcgatggctgctgcggggcttgcggccgtcatgggcggcacgccagcgcagatcgaaaacgccgccgagatcgcgctcgaacatcatctcggcatgacctgcgatccgatcgccggcctcgtgcaggttccctgcatcgagcgcaacgcactcggcgcggtcaaggccgtcacggcggcctcgcttgccatcaagggcgacggccagcatttcgtgccgctcgatgcctgtatcgagacgatgcgccagaccggccacgacatgagcgagaaatacaaggaaacctcgaccgggggactcgccgtcaacgtcgtcgaatgctga

SEQ ID NO: 8254 - protein, 467 aa, Rhizobium leguminosarum bv. viciae 3841
MFLSVFDVFKIGVGPSSSHTMGPMSAANRFLELILSNEWPRPSSGVQVTAIKVSLHGSLAHTGIGHGTGRAVILGLMGEAPDSVDPDRMDGIVDAVERTGRITPEGHPAYQFQPKTDLIFDKKQPLPGHANGMVFSAYDRDGRLLVKRIYYSVGGGFVVTDTELEQMRAKKNAPGGTRVPYPFSTAKQMLEMAERSGLSIAQMKRANEESQRSQEELDQGLDRIWEAMRSCIERGLKVEGIMPGGLNVKRRARRIHDKLEEEWRSNRINPLLANDWLSVYAMAVNEENAAGGRVVTAPTNGAAGVIPATIRYYEHFHEDWDQNGIRDYLLTAAAIGGIIKHNASISGAEVGCQGEVGSAAAMAAAGLAAVMGGTPAQIENAAEIALEHHLGMTCDPIAGLVQVPCIERNALGAVKAVTAASLAIKGDGQHFVPLDACIETMRQTGHDMSEKYKETSTGGLAVNVVEC

SEQ ID NO: 8255 - DNA, 1377 bp, Pseudomonas aeruginosa UCBPP-PA14
  CDS (1)..(1377): transl_table=11
atgtccctgagtgtcttcgatctgttcaagatcggcatcgggccgtccagctcccacaccgtggggccgatgcgtgccgctgcgcgcttcgccgaggggctgaggcgcgaggggttgctggaggccactgccagcgtcaaggtcgagctgtacggctcgctcggcgccaccggcaagggccacggcagcgacaaggcggtactgctcggcctggagggcgagcagccggacacggtggataccgccgcgattcccgcccggctcgatgccatccgttccagcggcgagctgcgcctgctcggcgagcggccgatccgcttcgtcgagaaggaacacctggcgctgatccgcaagccgctggcctaccatcccaacggcatgatcttccgtgccttcgacgccgccggcctgcaggtccgcagccgcgagtactactcggtgggcggcggtttcgtggtcgacgatgaggccgccggcctcgaccgcatcgtcgaggaccgcacgccgctggtgttccccttcaagaccgcgcggcaactgctcgaccattgcgtccgcgaaggcctgtcgatcagccagttgatggccgagaacgagaaggcctggcgccccgccgaggaaacccgcgccggcctgctgcgtatctggcaggtgatgcaggattgcgtcgaggccggctgccgcaacgagggcatcatgcccggcggactgaaggtcaggcgccgcgcggcggcgctccaccgccagttgtgccagcggccggaggccggcctgcgcgatgctctcagcgtgctcgactgggtcaacctctacgccctggcggtgaacgaggagaacgccagcggcggccgcgtggtgaccgcgccgaccaacggcgcggcggggatcattccggcggtgctgcattactacgcgcgcttcatccccggggccgacgacgacggcgtggtgcgcttcctgctcaccgccgcggcgatcggcatcctctacaaggaaaacgcctcgatctccggcgccgaggtcggttgccagggcgaggttggggtggcctgctcgatggccgccggggcgctctgcgaagtgctcggcggtagcgtgcagcaggtcgagaacgccgccgagatcggcatggagcacaacctcgggctgacctgcgacccggtcggcgggctggtccaggtgccctgcatcgaacgcaacgcgatggcttcggtgaaggcgatcaacgcggcgcgcatggccctgcgcggcgacggccagcacttcatctctctcgacaaggtcatccgcaccatgcgccagaccggcgccgacatgaaaagcaaatataaggaaaccgcgcgcggcggcctcgccgtgaacatcatcgaatgctga

SEQ ID NO: 8256 - protein, 458 aa, Pseudomonas aeruginosa UCBPP-PA14
MSLSVFDLFKIGIGPSSSHTVGPMRAAARFAEGLRREGLLEATASVKVELYGSLGATGKGHGSDKAVLLGLEGEQPDTVDTAAIPARLDAIRSSGELRLLGERPIRFVEKEHLALIRKPLAYHPNGMIFRAFDAAGLQVRSREYYSVGGGFVVDDEAAGLDRIVEDRTPLVFPFKTARQLLDHCVREGLSISQLMAENEKAWRPAEETRAGLLRIWQVMQDCVEAGCRNEGIMPGGLKVRRRAAALHRQLCQRPEAGLRDALSVLDWVNLYALAVNEENASGGRVVTAPTNGAAGIIPAVLHYYARFIPGADDDGVVRFLLTAAAIGILYKENASISGAEVGCQGEVGVACSMAAGALCEVLGGSVQQVENAAEIGMEHNLGLTCDPVGGLVQVPCIERNAMASVKAINAARMALRGDGQHFISLDKVIRTMRQTGADMKSKYKETARGGLAVNIIEC

SEQ ID NO: 8257 - DNA, 1377 bp, Pseudomonas aeruginosa UCBPP-PA14
  CDS (1)..(1377): transl_table=11
atggctatcagtgtgttcgaccttttcaagatcggtatcggcccgtccagttcgcataccgtcggccccatgcgcgccgccgcgctgttcaccgctgccctgcgccaacgccaggcgctgtcggcggtgcggcgtctcgaagtgcgcctgtacggctcgctgtccgccaccggcgtcggccacggcaccgatcgcgcggtgatcatgggcctgatgggcgaatggccggatcgtatcgacccgacccagatcgccccgcgcatggccgcgctgctcgatagcggcctgctgcaactggacggccgcgtggcggtaccgttcgactgggtgcgcgacatgcgcctgctcgacgagaacctgccctaccaccccaacgccatgaccctggtcgcctacggcgagcaggacgaactgcaccaggagacctactactcggtcggcggcggcttcgtggtcgatgcggcacaggccgcctcggggcagctcgaccaggaccacacggtgctgccctacgacttctccagcgccgaggaactgttgctgctgtgcaagcgccacaacctgcgggtatccgagctgatgctggccaacgaacgcatctggcgcagcgagaccgacatccgcgaaggcctgcggcgcatctggcaggcgatgcgcgattgcgtcgacaacgggttgcgcaacgaaggcatccttcccggcgggctcaacgtgcaacgccgcgccgcgcgcctgcaccgcaacctgcaggagatcggcaagcccaacgtgatcggctcgaccctcagcgccatggaatgggtcaacctgttcgccctggcggtgaacgaggagaacgccgccggcgggcgcatggtcaccgcgcccaccaacggcgcggcggggatcatcccggcggtgctgcactactatatgaagttcaatcccgacgcccaggaccgcgacgtcgtcgactacctgctggccgccgccgcggtgggcatcctgtgcaagaagaacgcctcgatctccggcgccgaggtcggctgccagggcgaggtcggctcggcctgcgcgatggccgccgccggcctggcggaagtcctcggcgccaccccggcgcaggtcgagaacgctgccgagatcggcctggaacacaacctcgggctgacctgcgacccggttggcgggctggtccaagtaccctgtatcgagcgcaacgcgatcgccgcggtgaaggccatcaacgcggcgcaaatggccttgcgcggcgacggccagcatttcatctcgctggacaaggtgatccgcaccatgcgcgacaccggcgccgacatgcacgacaagtacaaggaaacctcgcgcgggggcctggcggtgaacgccatcgagtgctga

SEQ ID NO: 8258 - protein, 458 aa, Pseudomonas aeruginosa UCBPP-PA14
MAISVFDLFKIGIGPSSSHTVGPMRAAALFTAALRQRQALSAVRRLEVRLYGSLSATGVGHGTDRAVIMGLMGEWPDRIDPTQIAPRMAALLDSGLLQLDGRVAVPFDWVRDMRLLDENLPYHPNAMTLVAYGEQDELHQETYYSVGGGFVVDAAQAASGQLDQDHTVLPYDFSSAEELLLLCKRHNLRVSELMLANERIWRSETDIREGLRRIWQAMRDCVDNGLRNEGILPGGLNVQRRAARLHRNLQEIGKPNVIGSTLSAMEWVNLFALAVNEENAAGGRMVTAPTNGAAGIIPAVLHYYMKFNPDAQDRDVVDYLLAAAAVGILCKKNASISGAEVGCQGEVGSACAMAAAGLAEVLGATPAQVENAAEIGLEHNLGLTCDPVGGLVQVPCIERNAIAAVKAINAAQMALRGDGQHFISLDKVIRTMRDTGADMHDKYKETSRGGLAVNAIEC

SEQ ID NO: 8259 - DNA, 1632 bp, Solibacter usitatus Ellin6076
  CDS (1)..(1632): transl_table=11
atgtctgatagccctctgaaaccgttaactcagtcaggtgaaaccgaagtggacgatccgcttgggtcggtcaacgacatagcctcacaagatgttcccgacggcgtcgataggcgagccttcctgatgcgaagcgcgctgatcggcgcgacggcaatcattctggaccgtcccgtgtcggcccaacagaaagcggataggttggcgaccacgccgccgacaccgcagctttccccgaccctgaatgtcgttaaagagcagaagggccctgtgatgacgaccctggacgaattttataaggtgggaccgggtccatcgagttcgcataccatcggcccgatgcgcatcacctatgatttttaccagcgctgcacgaagttacccgcggccgatctcgcccaggcaacggcgctcaaggttaacctgttcgggagtctcagtgcaacgggcaaagggcatggaacggagcgcgcatcgctcgcgggactagtgggcaaagagcccgctactgtagatccggcatttctcgatagtttgcgtgatcagccggatcagtcgttcccggtgaaacttggacccaagaccgtggacgtcacgctcaaggacgtggtgttcgatgctaccgatggcaatttcccccatcccaacacgatgacggtcaagctgatggcgggaaacaaggtgcttctcgagcaggaatattactccgtgggcggcggattcatcgagtggaaggggtataagccgccgaagaagaacgcacccaagtacccgttcgcgacgatgaaggagctgcggcagcacgccgaacaaaacaacctcacgatttccgatgtaattctcgcgaacgaaatgtcgattcccggcaggagccaggatgaggtctatgcgttcatcgacaagatcaccggcgcaatggtggcgatcgtgaaatctggcctgagcgcgccggatggcgtattgcccgggccgattaaactgcaatcgaaggccgctgaggtttacaagcgggcgatggacgaccagttcgaggctgaccgcggaatcggttgtctttcggcatacgcgttggcggggtcggaggaaaacgggcgaggccacctggtggtcaccgcgccgacaggcggttcggccggagtgcttccggcgcttgtctacgggctgggcgaaggagggcgcaaacttacgcaggaccagatccgtaagggcatgctcgccgcagccgcgatcggatacctgtgcaagcacaatgcgacgctttccgctgccgagggcggctgccaggcggagatcggcgtagcatccgcgatggcggcggcattagtcgccgcagcgtatgacgcgagccccagagtgatcgagaacgcagcggaatccgccctggagcaccatcttggaatgacctgcgacccggtagcgggttacgtgcaggtcccttgcatcgaacgatgcgcattcggggccgtgaaagcctggacagcctgggccatcgcgagcaacgagattgcatccaggcaccgggtggacctggatgcgaccatcacggcgatggctcagacggctaaggacatgaacagcaagtacaaggaaaccagccaggccggactcgcgcaatccgtaacgctttgctga

SEQ ID NO: 8260 - protein, 543 aa, Solibacter usitatus Ellin6076
MSDSPLKPLTQSGETEVDDPLGSVNDIASQDVPDGVDRRAFLMRSALIGATAIILDRPVSAQQKADRLATTPPTPQLSPTLNVVKEQKGPVMTTLDEFYKVGPGPSSSHTIGPMRITYDFYQRCTKLPAADLAQATALKVNLFGSLSATGKGHGTERASLAGLVGKEPATVDPAFLDSLRDQPDQSFPVKLGPKTVDVTLKDVVFDATDGNFPHPNTMTVKLMAGNKVLLEQEYYSVGGGFIEWKGYKPPKKNAPKYPFATMKELRQHAEQNNLTISDVILANEMSIPGRSQDEVYAFIDKITGAMVAIVKSGLSAPDGVLPGPIKLQSKAAEVYKRAMDDQFEADRGIGCLSAYALAGSEENGRGHLVVTAPTGGSAGVLPALVYGLGEGGRKLTQDQIRKGMLAAAAIGYLCKHNATLSAAEGGCQAEIGVASAMAAALVAAAYDASPRVIENAAESALEHHLGMTCDPVAGYVQVPCIERCAFGAVKAWTAWAIASNEIASRHRVDLDATITAMAQTAKDMNSKYKETSQAGLAQSVTLC

SEQ ID NO: 8261 - DNA, 1377 bp, Mycobacterium smegmatis str. MC2 155
  CDS (1)..(1377): transl_table=11
gtgttcgatctgttcagcgtcggtatcggtccctcgagttcgcacaccgtgggccccatgcgagcggccgcgcggtttgccgacgagctcgacgccatcggtgtgctcgatgcggtcgcaaccatcgacgtcgacctctatggatcgctggccgcgaccggcgcgggccacgggaccatgtcggcaattctcttgggtctggagggttctcggcccgagacgatcgaatcagaattcaaggaccggcgcatcgagcaaatgcgcgccgaaggccgcatccgcgtcggtgggcgtgtcgagatcacgctttccgagaacgacatccggttacatcccgagactgtcctgcccacgcactccaacggtatgcggttgtccgcggccggatccgacgggcgcccgctacatgcgcagacatacttctcggtcggcggaggtttcatcgtcgccgaaggtgccgacgaactcgggcaaggtcacggatcggaagacggcgacgtcacgttcagctccgctgccgaattgctggccctcgccgacaaattcgactcccccatcagctcggtaatgctcgcgttcgaaaccgagaccagaagcgaggatgaggtcagggcgcgtctgctgcacatccgcgacgtgatgttcgaatgcatggagcgcgggatcacccgcgacggcttcctccccggcacgttgagggtgcgccggcgtgcccgcgactggtaccaacgcctactcaccgacgatcccggccgggaccccgtctacgccgaagactgggtcaaccttgtcgcgcttgcagtcaacgaggagaacgcgtccggcggccgcatcgtcaccgctcccaccaacggcgccgccggcatcatcccggcagtcctctactacgcactgcactacacaccccagggcgcggcggaccccgacgacgcgagcgtccgattcctcctgaccgctggggcgatcggctcgttgtacaaagaacgcgcctcgatctcgggcgcggaggtcggatgtcagggagaggtcggttctgcggcctccatggccgctgccgggctcgccgaaatcctcggaggcacgcccgcgcaggtcgagaacgccgccgagatcgccatggaacacagcctgggactgacctgcgacccgatcgggggtctggtgcagatcccgtgcatagaacgcaacgccatctcggcgggaaaggcgatcaacgcagcgcgaatggcgttgcgcggcgacggaactcaccgcgtgagcctcgaccaggtgatcgagacgatgcgcagcaccgggcgtgacatgagtgccaagtacaaggagacatcgaccggtggactggcaacggccgtgccggtgaacgtcgtggagtgctga

SEQ ID NO: 8262 - protein, 458 aa, Mycobacterium smegmatis str. MC2 155
MFDLFSVGIGPSSSHTVGPMRAAARFADELDAIGVLDAVATIDVDLYGSLAATGAGHGTMSAILLGLEGSRPETIESEFKDRRIEQMRAEGRIRVGGRVEITLSENDIRLHPETVLPTHSNGMRLSAAGSDGRPLHAQTYFSVGGGFIVAEGADELGQGHGSEDGDVTFSSAAELLALADKFDSPISSVMLAFETETRSEDEVRARLLHIRDVMFECMERGITRDGFLPGTLRVRRRARDWYQRLLTDDPGRDPVYAEDWVNLVALAVNEENASGGRIVTAPTNGAAGIIPAVLYYALHYTPQGAADPDDASVRFLLTAGAIGSLYKERASISGAEVGCQGEVGSAASMAAAGLAEILGGTPAQVENAAEIAMEHSLGLTCDPIGGLVQIPCIERNAISAGKAINAARMALRGDGTHRVSLDQVIETMRSTGRDMSAKYKETSTGGLATAVPVNVVEC

SEQ ID NO: 8263 - DNA, 1389 bp, Acidovorax sp. JS42
  CDS (1)..(1389): transl_table=11
atggccgtcagcgttttcgacttgttcaagatcggcatcgggccgtccagttcgcacaccgtggggcccatgcgcgctgcgcggctgttcgcgcagcggctggcgcgcgagggggtgctggcgcaggtggcgcgcgtgcgcagcacgctctacggctcgctgggcgccacggggcgcgggcacgcgagcgaccgcgccgtgctgctgggcctggccggccatgcgccggacaccgtggaggtggacgccatcgagccgctcatcgcccgcatccgcagccggcgccgcctgccgctggccgacggccccgaagtggcattcgacgaggcggccgacctgctgctggtgcccgacgtcacgctgccactgcacgccaacggcatgcgtttcgaggctttcgatgcggcgggcggcacgctggccgcacaggtgtactactcggtgggcggcggcttcatcgtgagcgaggaggcggccgccgacgcacagcgccaggccgccatcgcacccgacaccgaggtgctaccgctgccctttcacagtggcgaacagctgctggcgcaggccgcggcgcagggcggatcgatcgcgcaggtgatgcgcgtgaacgaacgccactggcgcaccgacgccgagatcgacgccggcctgctcaccatctggcgcgccatgcaggactgcgtggcgcgcggctgcagcgtgggcggcgtgctgcccggcggcttccaggtgcgccggcgtgcgcccgcgctgcaccgggcgctgcagaacgcgcccgacacccagcaggacccgctgcaggtgatcgactgggtgaacctgttcgccctggccgtgaacgaggagaacgccgccggcgggcgcgtggtcacggcccccaccaatggcgcggcgggcatcgtgccggcagtgctgcattactactggcgcttcattcccggcgctaccgagggtggcgtggtcgacttcctgctcacggctggcgccatcggcatcctgtacaaggagaacgcctccatctcgggcgccgaggtgggctgccagggcgaggtgggtgtggcctgctccatggctgcggcgggcctgtgcgccgtgctgggcggcacgcccgcgcaggtggagaacgccgccgagatcggcatggagcaccacctgggcctgacctgcgacccggtgggcgggctggtgcagatcccgtgcatcgagcgcaacgccctggcttcggtgaaggccatcaacgccgcgcgcatggcgctgcatggcgacgggacgcaccatgtgagcctggaccaggtcatcaagaccatgcgcgagaccggcgcggacatgatgaccaagtacaaggagacttcgcgcggcggcctcgcggtgaacatcgtggagtgctga

SEQ ID NO: 8264 - protein, 462 aa, Acidovorax sp. JS42
MAVSVFDLFKIGIGPSSSHTVGPMRAARLFAQRLAREGVLAQVARVRSTLYGSLGATGRGHASDRAVLLGLAGHAPDTVEVDAIEPLIARIRSRRRLPLADGPEVAFDEAADLLLVPDVTLPLHANGMRFEAFDAAGGTLAAQVYYSVGGGFIVSEEAAADAQRQAAIAPDTEVLPLPFHSGEQLLAQAAAQGGSIAQVMRVNERHWRTDAEIDAGLLTIWRAMQDCVARGCSVGGVLPGGFQVRRRAPALHRALQNAPDTQQDPLQVIDWVNLFALAVNEENAAGGRVVTAPTNGAAGIVPAVLHYYWRFIPGATEGGVVDFLLTAGAIGILYKENASISGAEVGCQGEVGVACSMAAAGLCAVLGGTPAQVENAAEIGMEHHLGLTCDPVGGLVQIPCIERNALASVKAINAARMALHGDGTHHVSLDQVIKTMRETGADMMTKYKETSRGGLAVNIVEC

SEQ ID NO: 8265 - DNA, 1434 bp, Croceibacter atlanticus HTCC2559
  CDS (1)..(1434): transl_table=11
atggcaaatcgcgaagcgataagtatttttcatatgttaaagattggtgtgggaccttctagctcacacacattaggaccttggcgtgcagcgcaacgttggatagaagaacttaaagaacagaaaaagtttgataaggttacaaaagttcaagtagatttatatggttcattatcacttaccggaaaaggtcatgctacagatttagcatcactcttaggattaagtggatatgatcctgtaactattcctattgaaagtattgatggagagattgcgcaaataaaatctacaggaaaacttctactaaacggagaaaaacctattgaattcagctttaaagacgatgttatattcaacagaaactttaaaaaatttcatcctaatggaatgacgtttagtgctgttttagataaccaaaaaacaacaaatagtaccttctactctattggtggtggttttgtggttaaagaggaacgtaagcgtgccaaaaagaaagaagaaaaatttcaagacttcccatttcctatagataaggctacagagcttttagcattttgtcatcaagagaacaagaaagtgtctgaaattgttttagaaaacgaacgttcgctaagaacagacgcagaaatagatgaagagctaaaagctatatggaatgtcatgttagagtctatgtttgtaggctgccatacagaaggtactcttcctggcggtttaaatgtaagacgccgcgcctatgacactaataaaagactaattggtgataagccatatacaactaaagaagaatggatagcagccataagaagcaccgaagttaagtttagagaaattttaaaatgggtatcttgttttgcgttggcggttaatgaagtaaatgcttcgttaggccgtgtggtaactgctcctacaaatggaagtgctggtgttatacctgccgtaattatgtattttgctgttattgaaaatcacgatgctaattttgaagatatcaagcaatttttattggttgcaggagaaataggtagcctgtttaaaaaaggcgcaacaatttctgcagcaatgggtggttgccaagcagagattggtgtatcttcagcaatggctgcaggtgcgctaactgaacttatgggtggctctccagaacaagttcttatggctagtgaaattgcaatggagcatcatttaggaatgacctgcgatcctatagcaggtttggtacaaataccttgtatagagcgaaatgcaatgggtgctattaaagcaattaatgcgtgcgaactagcattggataccgatgctaaaaatgcaaaagttcctttagataaagtaattgaaactatgtgggaaaccgcaaaagacatgacttccaagtacaaagaaactagtgaaggtggtttagcggtaaaggtaaatatgagcgactgttaa

SEQ ID NO: 8266 - protein, 477 aa, Croceibacter atlanticus HTCC2559
MANREAISIFHMLKIGVGPSSSHTLGPWRAAQRWIEELKEQKKFDKVTKVQVDLYGSLSLTGKGHATDLASLLGLSGYDPVTIPIESIDGEIAQIKSTGKLLLNGEKPIEFSFKDDVIFNRNFKKFHPNGMTFSAVLDNQKTTNSTFYSIGGGFVVKEERKRAKKKEEKFQDFPFPIDKATELLAFCHQENKKVSEIVLENERSLRTDAEIDEELKAIWNVMLESMFVGCHTEGTLPGGLNVRRRAYDTNKRLIGDKPYTTKEEWIAAIRSTEVKFREILKWVSCFALAVNEVNASLGRVVTAPTNGSAGVIPAVIMYFAVIENHDANFEDIKQFLLVAGEIGSLFKKGATISAAMGGCQAEIGVSSAMAAGALTELMGGSPEQVLMASEIAMEHHLGMTCDPIAGLVQIPCIERNAMGAIKAINACELALDTDAKNAKVPLDKVIETMWETAKDMTSKYKETSEGGLAVKVNMSDC

SEQ ID NO: 8267 - DNA, 1374 bp, Sulfitobacter sp. EE-36
  CDS (1)..(1374): transl_table=11
atgtttctctctgtcttcgatatgttcaaagtgggcatcggcccgtcctcctcgcacacgatggggccgatggtggcggcggcgcggtttttggacctgatgcgcgcctcaccgttcaaattcgcgggcctgcgcgcgtccctgcacggcagtctggcctttaccggcgtgggccacgccacggaccgcgcgacgatccttggcctcgcggggttcacgccgcaagactacgacaatgaccgcgccgaagaggtactggccgagatcaaccgcacccagacgatcaccctgccagaccttggcacgctaagtttcgcgcccaagtccgatatgatctttgactacgacaccaagctggacggccacgccaacgggatgatgctgatggccaccgacgcccaaggcgacgtaagcttgcgcgagacctattattccatcggcggcggcttcgtgatgaccgaagccgaactggcggcgggcaaagacacagacgaaggcgcgccggtgcccttcccgttcaaatccgcaaccgagatgctgcaaatggcggcagagtccggcaagagcatcgcccagatgaaacgcgccaacgaggaatcgcgcggcggggcggcgcagctgcgcgacggcaccaagcggctgtggcaggtgatgaacgattgcatcaaccgtgggctcgaaaccgatggcatcctgcccggcgggttgaacgtcaaacgccgcgccaaggcgatccatgacgcgctggtgtcggagcgcggccagaaccagcgcgcgcctcacacgatcaacgactggatgagcgtttacgctatggcggtgaacgaggaaaacgccgccggtgggcaagtcgtcaccgcccccaccaacggcgcggcgggtgtgatgcccgcgaccttgcgctattatctggatcacgtccccggcgcatcagaggcgcatatcgaggatttcctgctcaccgctgcggcgatcggcgggctggtcaaattcaacgcgtcgatttcgggggcggaagcgggctgccaggccgaagtgggcagcgccgccgccatgtcggccgccgggctctgtgccgtgatgggcggcacgccgcaacagatcgagaacgccgccgaaatcgcgctggaacatcatctgggcatgacctgcgaccccgtgcgcggtctggtgcaggtgccgtgcatcgaacgcaatgggcttggcgcgatcaaggcggtctccgccgcgtcgcttgcgctgcgcggcgacggcacgcatctggtgccgctggacgcctgcatcgaaaccatgcgccagaccggtgcggatatgtctgaaaagtacaaagagacctcgcttggggggctggcggtcaacgtgccgaactgctga

SEQ ID NO: 8268 - protein, 457 aa, Sulfitobacter sp. EE-36
MFLSVFDMFKVGIGPSSSHTMGPMVAAARFLDLMRASPFKFAGLRASLHGSLAFTGVGHATDRATILGLAGFTPQDYDNDRAEEVLAEINRTQTITLPDLGTLSFAPKSDMIFDYDTKLDGHANGMMLMATDAQGDVSLRETYYSIGGGFVMTEAELAAGKDTDEGAPVPFPFKSATEMLQMAAESGKSIAQMKRANEESRGGAAQLRDGTKRLWQVMNDCINRGLETDGILPGGLNVKRRAKAIHDALVSERGQNQRAPHTINDWMSVYAMAVNEENAAGGQVVTAPTNGAAGVMPATLRYYLDHVPGASEAHIEDFLLTAAAIGGLVKFNASISGAEAGCQAEVGSAAAMSAAGLCAVMGGTPQQIENAAEIALEHHLGMTCDPVRGLVQVPCIERNGLGAIKAVSAASLALRGDGTHLVPLDACIETMRQTGADMSEKYKETSLGGLAVNVPNC

SEQ ID NO: 8269 - DNA, 1374 bp, Roseovarius nubinhibens ISM
  CDS (1)..(1374): transl_table=11
atgtttctctcggtgttcgatatgttcaaagtgggcgtaggcccgtcctcgtcgcacacgatggggccgatggtcgccgccgcccggtttctggacaagatacgcgccgcgccctttgcccccgcaggcgtcaagggctcgctgcatggcagcctcgccttcaccggcgtcggccatgccaccgaccgcgccacgatcctcgggctcgcagggttcctgcccgagagctacgatcatgaaaaggccgaggaaaccctcgcccagatccgcgagacccagacgctgcgccccgagggcctgcccgagctgcgctttcaccccaaggatgatctcatctttgatttcggccccaatctcgccggtcacgccaatggcatgatcctgatggccaccgacgcgcagggcgacgtgatcctgcaagagacctattattccatcggcggtggctttgtgctgaccgaggacgagctcgcccaagggcgcgacaccgatgatggcgcaccggtcccctacccgttcaaatccgccgccgagatgctcgagatggcggaaacctcgggcaagagcatcgcccagatgaaacgcgccaatgaagaggcgcgcggcggggcggaaaacctgcgcaccggggtggccaagatctggcaggtgatgagcgattgcatcgaccgtggccttgccaccgacggcatcctgcccggcgggctgcaggtgaaacgccgcgccaagggcattcacgaggcgctcttggccgagcgcggcaccaacctcagcgcgccgcataagatcaacgactggatgagcgtctatgccatggcggtgaacgaggaaaacgccgctggcggtcaggtcgtcaccgcgcccaccaatggcgcggcgggggtggtccctgcggtcatccgctactggctcgaccatgtgccgggggcaagcagcgaccgcgtcgaggatttcctgctcaccgcctcggccatcggcgggctggtcaagttcaacgcctccatctctggcgccgaagcgggctgtcaggccgaggtgggcagcgccgccgccatgggcgcggccggtctcgccgcggtgctgggcggcaccccggagcagatcgaaaacgccgccgagattgcgctcgaacatcacctcggcatgacatgcgacccggtcaaagggctggtgcaggtgccctgcatcgaacgcaacgggcttggcgcgatcaaggccgtctcggccgcgagcctcgcgctgcgcggcgatggcacgcatctggtgccgcttgacgcctgtatcgaaaccatgcgccagaccggcgcggatatgagcgagaaatacaaggaaacctcgctcggcggtctcgccgtcaacgtgcccaactgctga

SEQ ID NO: 8270 - protein, 457 aa, Roseovarius nubinhibens ISM
MFLSVFDMFKVGVGPSSSHTMGPMVAAARFLDKIRAAPFAPAGVKGSLHGSLAFTGVGHATDRATILGLAGFLPESYDHEKAEETLAQIRETQTLRPEGLPELRFHPKDDLIFDFGPNLAGHANGMILMATDAQGDVILQETYYSIGGGFVLTEDELAQGRDTDDGAPVPYPFKSAAEMLEMAETSGKSIAQMKRANEEARGGAENLRTGVAKIWQVMSDCIDRGLATDGILPGGLQVKRRAKGIHEALLAERGTNLSAPHKINDWMSVYAMAVNEENAAGGQVVTAPTNGAAGVVPAVIRYWLDHVPGASSDRVEDFLLTASAIGGLVKFNASISGAEAGCQAEVGSAAAMGAAGLAAVLGGTPEQIENAAEIALEHHLGMTCDPVKGLVQVPCIERNGLGAIKAVSAASLALRGDGTHLVPLDACIETMRQTGADMSEKYKETSLGGLAVNVPNC

SEQ ID NO: 8271 - DNA, 1371 bp, Oceanicola batsensis HTCC2597
  CDS (1)..(1371): transl_table=11
atgtttctttctgtcttcgaggtcttcaagatcggtgtcggcccctcgtcctcgcataccatggggcccatggtggccgcggcgcgcttcctcgaccggcttcgcggcgcgcccttcgcggccaagggggtccgggcgaccctgcacggatcgctggccttcaccgggcgcggccacgcgacggaccgggccgtcatcctggggctcgccggcttccggcccgagacctacgacgcggacgaggccgaggcgacgctgctgtccatcgccggatcgcgccggatctcggcgccgggcctgccgcaactgaccttcgatccgcgcagcgacctgcgcttcgactacgagaacgcgctgcccggccacgccaacggcatggtgatcgaggcgctggacgcgcagggcgacgtgatcctgtcggaaacctactattccatcggcggcgggttcgtcctgacggacgaggaactcacctccggcaaggccagggccgagggggcgccggtgcccttccccttcaagacggcgcaggagatgctcgacatggcggccgagtcgggcctgagcatcgcccagatgaaggagcgcaacgaggccgcgcgcaagaccggcgccctgcgccagggcacctaccgcatctggcaggtgatgaaatcctgcatggaccgcggtctcgccaccgggggcgtcctgcccggcgggctcaacgtgcgccgccgcgccccgggcatctacgccaagctgcgcgaggaacgcggtcagaacctgaccgcgccgcacgtggtcaacgactggatcggcacctacgccatggccgtgaacgaggagaacgccgccggtggccaggtcgtcacctcgcccaccaacggggccgccggcgtggtgcccgccgtcatgcgctactggctcgatcacgtgcccggcgcctccgagacgcgggtgcccgagttcctgctgaccgccgcggccattgccgggctggtcaagtacaacgcctcgatcagcggggccgaggcgggctgtcaggccgaggtgggctcggccgccgccatggccgcggccgggctgtgcgcggtgctgggcggaacccccgagcagatcgagaacgcggccgagatcgcgctggaacatcacctcggcatgacctgcgacccggtccgcgggttggtgcaggtgccctgcatcgaacgcaactctctcggggccatcaaggccgtcagtgccgcctcgctggccctgcgcggcgacggtcagcatttcgtcccgctcgacgcggcgatcgagaccatgcgccagaccggacgggacatgcacgagaaatacaaggaaacctcgctcggcgggcttgcggtcaacgtgccgaactgctga

SEQ ID NO: 8272 - protein, 456 aa, Oceanicola batsensis HTCC2597
MFLSVFEVFKIGVGPSSSHTMGPMVAAARFLDRLRGAPFAAKGVRATLHGSLAFTGRGHATDRAVILGLAGFRPETYDADEAEATLLSIAGSRRISAPGLPQLTFDPRSDLRFDYENALPGHANGMVIEALDAQGDVILSETYYSIGGGFVLTDEELTSGKARAEGAPVPFPFKTAQEMLDMAAESGLSIAQMKERNEAARKTGALRQGTYRIWQVMKSCMDRGLATGGVLPGGLNVRRRAPGIYAKLREERGQNLTAPHVVNDWIGTYAMAVNEENAAGGQVVTSPTNGAAGVVPAVMRYWLDHVPGASETRVPEFLLTAAAIAGLVKYNASISGAEAGCQAEVGSAAAMAAAGLCAVLGGTPEQIENAAEIALEHHLGMTCDPVRGLVQVPCIERNSLGAIKAVSAASLALRGDGQHFVPLDAAIETMRQTGRDMHEKYKETSLGGLAVNVPNC

SEQ ID NO: 8273 - DNA, 1377 bp, Pseudoalteromonas tunicata D2
  CDS (1)..(1377): transl_table=11
atgatcagtgcattcgatatgtttagtatcgggattggcccatcatcctctcacactgtaggtccgatgcgtgcatcacgcatgtttgttaaaaagctgcaagatttagctgtttttgaccaagtgactgaagtaaaagtagagctgtttggttcattaggacaaacaggcattggccatggctctggcaaagcggttattttaggacttgcaggctatgaccctgaaagcatcgacgcagatcaagtagatagtattctaaaaaaaatagaactagaacaaattatttaccttgatcaaagccatgcagttcaattcccaacgcaaggcgcaattgtatttcatcgtcgtaaaacattgccaaaacacagtaatgcaatggaaatcatcgcctataaaggccaagaaattatttgtcagcaagtttattattctattggtggtggttttattgtcacggctgaagattttgataatgaaaaagaagcggccattgaaatacggacacaaaatccaattccatttgacttcaattctgccaaagaactacttgaaatgtgtaaagaaagtggttttagtgtttcaacactgatgatggcaaatgaaaaaacccttcgtaccgaagaacaaattaaagatgagctttttaatttgtggttagtgatgaaagcctgtattgaacgcggcattcgtaccgaaggtatcttaccgggtggtttaaaagtaaaacgccgtgcgccgagtttatatctacaactgaatgtagaaaccaacgatgatccgttacgcgctatggattgggtcgatctttttgcacttgccgtaaatgaagaaaatgccgcgggtggtcgcgtggtcacagctccaacaaacggcgctgctggaattttacccgctgtactaatgtattacgataaattcatcaagcaagttgaccgtgatatcgccactcgttatttactcactgctgctgctattggtattttgtataaaaagaatgcctcgatttcaggtgcggaagttggctgccaaggtgaagtgggcgtggcttgctcaatggcggcaggcgcgttaactgaaatcgttggtggtaatgttgaacatgttgaaaatgcagcagagattggcatggagcacaacttaggcttaacttgcgacccagttggtggtttagtacaagtgccatgtattgaacgtaatgcgatgggcgccattaaagcgataaatgcatcacggttagcacttcgtggttctggtcaacaaaaagtatctttagataaagtgatcaaaaccatgtgggaaacaggtaatgatatgaaaactaaatataaagaaactgcacgcggtggcttagcggttaatatcattgaatgttaa

SEQ ID NO: 8274 - protein, 458 aa, Pseudoalteromonas tunicata D2
MISAFDMFSIGIGPSSSHTVGPMRASRMFVKKLQDLAVFDQVTEVKVELFGSLGQTGIGHGSGKAVILGLAGYDPESIDADQVDSILKKIELEQIIYLDQSHAVQFPTQGAIVFHRRKTLPKHSNAMEIIAYKGQEIICQQVYYSIGGGFIVTAEDFDNEKEAAIEIRTQNPIPFDFNSAKELLEMCKESGFSVSTLMMANEKTLRTEEQIKDELFNLWLVMKACIERGIRTEGILPGGLKVKRRAPSLYLQLNVETNDDPLRAMDWVDLFALAVNEENAAGGRVVTAPTNGAAGILPAVLMYYDKFIKQVDRDIATRYLLTAAAIGILYKKNASISGAEVGCQGEVGVACSMAAGALTEIVGGNVEHVENAAEIGMEHNLGLTCDPVGGLVQVPCIERNAMGAIKAINASRLALRGSGQQKVSLDKVIKTMWETGNDMKTKYKETARGGLAVNIIEC

SEQ ID NO: 8275 - DNA, 1362 bp, Photobacterium sp. SKA34
  CDS (1)..(1362): transl_table=11
atgatcagtgtttttgatatttacaaaattggtgtgggcccttccagctcacatactgtcggtccaatgaaagcaggtaaagagtttatcgatgatttacgtgcaatgggcaagttacgtgacataactaaaattacagttgacgtatacggctctctctctcttacaggtaaagggcaccatactgatatcgctatcatcatgggacttgctggtaacagccctgagcatgttgatatcgatagtattccaggctttattgcccgtgtagaagaaacggagcgtctgcctgttggtatgcattgtcataccgttgattttccacgtgatggcggtatgaatttccatacgaccaacctttcactgcacgaaaatggtatgtcaatccatgcttggatcgatgatgagaatgttttctctaaaacatattactctatcggtggtggttttattgttgatgaagaaaacttcggcaaaacacaagaatcaaatgttgtcgctccttacccatttaagtttgcatcagaacttattgaccaatgtaaagaacatggtttatcagtcagttctttagtcatggcgaacgaacgcgcaatgaacacagaagatgaaattagcaattactttgctaacatctggaaaacaatgcgtgattgtatggagcgcggtatgaacgaagaaggcatcctaccgggtcctcttcgagtacctcgccgagcagcagcacttcgtcaacaactaatgacctcagaaaagctaagcaacgatccaatgacagttgttgattgggtaaatatgtttgcttttgcagtgaatgaagaaaatgcagctggcggccgtgttgtaacagctccaacgaacggtgcttgtggcattattccggcagtacttgcttactacgacaagtttgttcagtctgttggtcctaaagagtacacacgttattttgccgcttctggtgctattggtagtctttacaagcgtaatgcctctatctctggtgctgaagttggatgtcagggtgaagttggcgttgcatgttctatggcggcagctggtcttgctgagctgatggggggtagcccagaacaagtttgcatggcagctgaaataggaatggaacacaaccttggtttaacgtgtgatcctgttgctggtcaagttcaggttccatgtatcgagcgtaacggtattgcggcagttaaagccattaacgctacacgtatggcacttcgccgctcatctgatccacgtgtttcacttgataaagtcattgaaacaatgcttgagacaggtaaagacatgaatgctaaataccgtgagacatctcaaggtggtctagcgattaaggttatttgctaa

SEQ ID NO: 8276 - protein, 453 aa, Photobacterium sp. SKA34
MISVFDIYKIGVGPSSSHTVGPMKAGKEFIDDLRAMGKLRDITKITVDVYGSLSLTGKGHHTDIAIIMGLAGNSPEHVDIDSIPGFIARVEETERLPVGMHCHTVDFPRDGGMNFHTTNLSLHENGMSIHAWIDDENVFSKTYYSIGGGFIVDEENFGKTQESNVVAPYPFKFASELIDQCKEHGLSVSSLVMANERAMNTEDEISNYFANIWKTMRDCMERGMNEEGILPGPLRVPRRAAALRQQLMTSEKLSNDPMTVVDWVNMFAFAVNEENAAGGRVVTAPTNGACGIIPAVLAYYDKFVQSVGPKEYTRYFAASGAIGSLYKRNASISGAEVGCQGEVGVACSMAAAGLAELMGGSPEQVCMAAEIGMEHNLGLTCDPVAGQVQVPCIERNGIAAVKAINATRMALRRSSDPRVSLDKVIETMLETGKDMNAKYRETSQGGLAIKVIC

SEQ ID NO: 8277 - DNA, 1347 bp, Xanthobacter autotrophicus Py2
  CDS (1)..(1347): transl_table=11
atgatcagcgtgttcgacctcttcaagatcggcatcgggccgtcctcgtcgcacacggtggggcccatggtggcggcgcggcggtttcgcgaggggctgccgcagggcacccggcgcgtcacggcggaactgttcggctcgctggcctggaccggcaagggccatggctccgacaccgccatctggctcggcctcatgggcgccgcgcccgatacgctcgacccggacgaggtgccggtgctcaccgcgcgcctcgccatccagaaattcatcgaggccggcggcgcgcgcatcgccttcgataccgagcgcgacctgatcttcgatttcgccaccctgctgccgctccactccaacggcatgcgcttccgcgcatttggagaagacggcgcgaccctcgaagaacgtgtgttctattccatcggcggtggcttcgtggtggaggagggtgagacccgcgaggcgccggcgcaggacgtgccccaccctttcgccacggcggcggagctgctctccgcctgcgcccgcgcgcaactctccatcgccgatctgcagatggccaacgaatgcgccctgcgcccgcgcgaagacgtggagcgggggctggatgccattctggacgccatgttcgcctccatcgaccggggccttgcccgcgagggcgccctgcccggccggctccgggtgaagcggcgcgccagggcaatccacgaccaactgcaggccgatcggctcaccaaccagcgtccgccccatgaggtcatggactgggtctcggtgttcgccatggcggtgaacgaggagaatgccgccggcgggcgcatcgtcaccgcccccaccaatggggcggcgggcatcgtgccggcggtgctgcgctatgtgcgcgacatctgccccgacacgagccacgcccagttgcgggacttccttttgaccgcagcggcggtgggcgcgctcatcaagcgcaacgcctccatctccggcgccgaggtgggctgccagggcgaggtgggctcggccgcctccatggcggcggcgggactcgcggcagtgctgggggcaagcccggcgcagatcgagaacgccgccgagatcgccatggaacatcacctcggcatgacctgcgaccccatcggcgggctggtgcagatcccgtgcatcgagcgcaacgccttcggcgccaacaaggccatcgcggcggcctcgctggcgctgcgcggcgacggcatccaccacgtctccctggaccaggtgatcgagaccatgcgccagaccggcgccgacatgcagtccaaatacaaggaaacctcgcagggcggcctcgcggtcaacgtgccggaatgctga

SEQ ID NO: 8278 - protein, 448 aa, Xanthobacter autotrophicus Py2
MISVFDLFKIGIGPSSSHTVGPMVAARRFREGLPQGTRRVTAELFGSLAWTGKGHGSDTAIWLGLMGAAPDTLDPDEVPVLTARLAIQKFIEAGGARIAFDTERDLIFDFATLLPLHSNGMRFRAFGEDGATLEERVFYSIGGGFVVEEGETREAPAQDVPHPFATAAELLSACARAQLSIADLQMANECALRPREDVERGLDAILDAMFASIDRGLAREGALPGRLRVKRRARAIHDQLQADRLTNQRPPHEVMDWVSVFAMAVNEENAAGGRIVTAPTNGAAGIVPAVLRYVRDICPDTSHAQLRDFLLTAAAVGALIKRNASISGAEVGCQGEVGSAASMAAAGLAAVLGASPAQIENAAEIAMEHHLGMTCDPIGGLVQIPCIERNAFGANKAIAAASLALRGDGIHHVSLDQVIETMRQTGADMQSKYKETSQGGLAVNVPEC

SEQ ID NO: 8279 - DNA, 1446 bp, Flavobacteria bacterium BBFL7
  CDS (1)..(1446): transl_table=11
atgatagagaccactaaaaagatagaatccataagtgtttttgacatgctcaaaataggtgtaggaccatccagttcacacaccttaggaccatggcgtgcagctagacgttttataaaaaagttgcaagacactaataaaatagctttagttaaaggtattgaagttgatttatatggatccttatcattaacaggtatagggcatgctacagatattgctgttataatgggtttattagacgcagatcctgagacttgtgaaattgatcaaataccggtagaagttgactatttaaaagagcataaaaagctacaaattgatggtgtgcatttagtcgattttaatcctagcgcccacattcatttccataagaagtttttaccttatcatcctaatgggatgcgtttcagagcttttctagaaaatggtaaaacagtttctgagaaatactattctattggtggtggttttgtagtgcaaaaagaacgcaaacgagcaaaacaaaagagacttgattttgaatgtttccctagacctatagaaaaagcaaaagacttacaagattattgtgatagagaagatcgtgctatatctgatatcatattagaaaacgaactatatctacacacagaagaagaaatcgataagcgttttagagaaatctgggacgtgatgctagactccatgtatataggttgtcatacagaaggtaaattacctggtggactgaatgtaaggcgacgtgcatatgacacacatttcaagcttaaaaaaggagctgaatattctgataaatatgaatggatagatgcgataagagctactgaggtaaaatttcgtgaaattttaaaatgggtttcttgttttgcactagcggtaaatgaagtgaacgcatcactaggtcgagtggtaacagcacctactaatggaagtgcaggtgtgattccagctgtaatgatgtattatatggtaattgaaaaccatgatgcagattttgaggatattaaaaagtatttactagttgccggtgcgataggttcattatttaaaaaaggtgcaaccattagtgctgcgatgggtggttgtcaggctgaaataggtgtaagtagtgctatggcagctggagctcttactgaattaatgggaggaacaccagcacaagttcttatggctagtgaaattgctatggagcatcatctagggatgacctgtgatcctataggtggattggttcaagtaccgtgtatagaacgtaatgctatgggagctattaaggccattaatgcttgtgaaatggctctagatgctgatgcagcaaatgcaaaagtgccattagataaggtcattgaaaccatgtggcaaacagcgcaagacatgaatactaaatataaagaaactagtgaaggtggattagctgtaaatgtgggactgtcagattgctaa

SEQ ID NO: 8280 - protein, 481 aa, Flavobacteria bacterium BBFL7
MIETTKKIESISVFDMLKIGVGPSSSHTLGPWRAARRFIKKLQDTNKIALVKGIEVDLYGSLSLTGIGHATDIAVIMGLLDADPETCEIDQIPVEVDYLKEHKKLQIDGVHLVDFNPSAHIHFHKKFLPYHPNGMRFRAFLENGKTVSEKYYSIGGGFVVQKERKRAKQKRLDFECFPRPIEKAKDLQDYCDREDRAISDIILENELYLHTEEEIDKRFREIWDVMLDSMYIGCHTEGKLPGGLNVRRRAYDTHFKLKKGAEYSDKYEWIDAIRATEVKFREILKWVSCFALAVNEVNASLGRVVTAPTNGSAGVIPAVMMYYMVIENHDADFEDIKKYLLVAGAIGSLFKKGATISAAMGGCQAEIGVSSAMAAGALTELMGGTPAQVLMASEIAMEHHLGMTCDPIGGLVQVPCIERNAMGAIKAINACEMALDADAANAKVPLDKVIETMWQTAQDMNTKYKETSEGGLAVNVGLSDC

SEQ ID NO: 8281 - DNA, 1413 bp, marine gamma proteobacterium HTCC2207
  CDS (1)..(1413): transl_table=11
atggcaattagcacctttgatttatttaccgttggtatagggccatccagctctcataccgtaggtcccatgcgcgcggcgctgcaatttgttgaagcccttgctgacactggccgtatgaccgaggtcacccgagtgcaggcggaaatgtatggctctctgggtgccactggcaaaggtcatggcactgccaaagccgtattgctgggttttgagggggatcagccggaatcagtagatgtgccatccattgctgagcgtatcgcggcgattcgagagggcggttttattactttgttaggtagtctgtcagacggccaccgcattggctttaacgataagactgacgtgttgttgcaccgtaagaaaacgctgtcctttcactctaacggtatgatttttaccgcctttaatagcggtggtgaggtggtcagtagaaagacctatttttcagtgggcggcggctttgtggtggatgagagtgctgccgagcaggattatctggttgaagataccagcgccattccctatccctttgattctgggagccagttactggatctctgtgagcggcatggcatgagtatttcacagttgatgatggagaatgagaaaacctggcgcagtgaacagcaggtccgcgaggagctgttaaatctctggtcggtaatgcagtcctgtgttgccaatggtatgagcaatggtggtatcttgcccggcggcctcaaggtgcgacgtcgtgccaaagaattgcatgaaaagttattgagtcgacccgaggcagccatgtcagatccactctcggtgttggattgggtgactctctacgccttggcagtgaatgaagaaaacgccgccggtggtcgagtggtaacagcgccaaccaatggcgcagcgggcattattccagcggtactgcactactatatgcgctttgtacccacagctactgccgagggagtagtgagatttttactcacggcggcggcgattggtacgctctacaaattgaatgcgtctatcagtggtgccgaagtaggctgtcagggggaggtgggttccgcctgttccatggcagccggtgctttggccgaagtgatgggcggtaccccagctcaggtggagaatgccgcggaaattggtatggaacacaatcttggtcttacttgcgatcctataggtggtctggtgcaggtgccctgtattgaacgcaacgctatgggctcagtgaaggccattcacgctgcgcgaatcgccctgcgtggtgatggtgaccactttgtatcgctggataaggtaattaaaaccatgcgtaagactgggcaggatatgcatgtgcgctacaaggaaacatctagaggtggactggcaacccatgtgctggaagtaccggtcaatattgttgaatgttaa

SEQ ID NO: 8282 - protein, 470 aa, marine gamma proteobacterium HTCC2207
MAISTFDLFTVGIGPSSSHTVGPMRAALQFVEALADTGRMTEVTRVQAEMYGSLGATGKGHGTAKAVLLGFEGDQPESVDVPSIAERIAAIREGGFITLLGSLSDGHRIGFNDKTDVLLHRKKTLSFHSNGMIFTAFNSGGEVVSRKTYFSVGGGFVVDESAAEQDYLVEDTSAIPYPFDSGSQLLDLCERHGMSISQLMMENEKTWRSEQQVREELLNLWSVMQSCVANGMSNGGILPGGLKVRRRAKELHEKLLSRPEAAMSDPLSVLDWVTLYALAVNEENAAGGRVVTAPTNGAAGIIPAVLHYYMRFVPTATAEGVVRFLLTAAAIGTLYKLNASISGAEVGCQGEVGSACSMAAGALAEVMGGTPAQVENAAEIGMEHNLGLTCDPIGGLVQVPCIERNAMGSVKAIHAARIALRGDGDHFVSLDKVIKTMRKTGQDMHVRYKETSRGGLATHVLEVPVNIVEC

SEQ ID NO: 8283 - DNA, 1392 bp, Rickettsiella grylli
  CDS (1)..(1392): transl_table=11
atggctattagtctatttgatctgttttccattggtataggcccatcgagctcacataccaatggccctatgaaagccgcctacgcgtttattgaaaagttaacgttcaatcgtgatttattgaatcaaacaagccgtatacaggttgaattgtttggctcattggcactcaccggtcgtggtcatggcacggataatgccattttaaatggactagagggatggcttccagataatgtcaatcccaatgaagttgtcccacgtgctcaacgcattattaaacgatgtaaaattaaattggcaggaaaaaaagatatttcattttcagaaaaaaccgatttattgtttcaacaaaaagaacaattgccgttacataccaatggtatgcgttttactgcgttcaatacaaaagagtgtgttgtaagctgtcaagtttattattctattggaggcggctttattgtgacggaacatacattgggttctcaatcagataacgttatttcaataccttattctttttctaatgcaatggagctatttagcctctgtgagcagaatcacttaacgattcctaaacttatgtttgccaatgaacagcatttatccccccatagagatgtatctgctgatttactgaacattgcagatatcatgcaaacgtgtgttgataaaggctgccagacgaaaggaacattacccggagcgcttcatgtgaaacgtcgagcgtccgatctttataataaaatgcataataaagcgcttccaacacaaaagatgattccaaacgccttattatggcccaccatttatgcgatggctgttaatgaagaaaatgcagcaggtggtcgcattgtcacggctcccacgaatggcgccgcgggtattgttcctgctgttttaacctattatcgtcgtttctatgacaacgtgagtcaacaatccattattgattttttactcgtagcgggcgctatcgcattactttataaaataaacgcttccatatcgggcgcagaggtcggttgtcagggagaggttggtgttgcgtgttcaatggctgcaggcgcgctaaccgctgttttaggaggtacattagcacaaattgaaaatgccgctgaaatggcgatggaacatcatttggggttaacgtgtgatccggttgcagggttggttcaaattccttgcattgaacgtaatggcgtcggtgcagaaaaagcgattaaattggctcatttagcgttaatggaaaatgggaagaataaaaaagtatctttagataaaatcattgaaaccatgtttgccaccggaaaagatatgatgtcactttataaggaaaccgctttaggtggtttagcaaagtcccttgcggttaatatacccgagtgttaa

SEQ ID NO: 8284 - protein, 463 aa, Rickettsiella grylli
MAISLFDLFSIGIGPSSSHTNGPMKAAYAFIEKLTFNRDLLNQTSRIQVELFGSLALTGRGHGTDNAILNGLEGWLPDNVNPNEVVPRAQRIIKRCKIKLAGKKDISFSEKTDLLFQQKEQLPLHTNGMRFTAFNTKECVVSCQVYYSIGGGFIVTEHTLGSQSDNVISIPYSFSNAMELFSLCEQNHLTIPKLMFANEQHLSPHRDVSADLLNIADIMQTCVDKGCQTKGTLPGALHVKRRASDLYNKMHNKALPTQKMIPNALLWPTIYAMAVNEENAAGGRIVTAPTNGAAGIVPAVLTYYRRFYDNVSQQSIIDFLLVAGAIALLYKINASISGAEVGCQGEVGVACSMAAGALTAVLGGTLAQIENAAEMAMEHHLGLTCDPVAGLVQIPCIERNGVGAEKAIKLAHLALMENGKNKKVSLDKIIETMFATGKDMMSLYKETALGGLAKSLAVNIPEC

SEQ ID NO: 8285 - DNA, 1362 bp, Vibrio sp. Ex25
  CDS (1)..(1362): transl_table=11
atgattagtgtttttgatatctataaaatcggtgttggaccttcaagctcacacactgtaggcccaatgaaagcgggtaaagagtttattgatgatcttcgtgcaatgggaaaactgcgcgacatcactaaaatcaccgttgacgtttatggatcactatcactgacagggaaaggtcaccacacagatattgctatcatcatgggtcttgcaggcaacactcctgagaaagttgatatcgattctatcccgggctttatcgctcgcgtagaagaaactgaacgccttcctgttggcatgcactgtcacacagtatcgttcccacgtgaaggtggaatgaacttccacaaaacaaaccttgagttacacgaaaacggcatgcaaatccacgcttggattgatgacgaaaaagcgtactcaaaaacttactactccatcggcggtggtttcatcgttgatgaagaaaacttcggtaaagaagttgagaatccagtaaaagttccttacccgtttacaacggcagaagagcttgtaaagcaatgtcatgaaagcggcctgtctatcagtgcgctaaccatgaaaaatgaacatgcgcttcattctgacgaagaaactcgtacttacttcgcaaacatctggcgcacaatgcgcgaatgtatggatcgcggtatgaacgaagaaggcattctgcctggtccactacgcgtgcctcgtcgtgcggcagcacttcgtcagcaactgcttacttctgaaaaaacaacgaacgatccaatgtctgttgttgactgggtaaacatgtttgcttttgcagtaaacgaagagaacgcagcaggtggtcgtgttgtaactgcgccgactaacggtgcatgtggcatcatccctgcggtactggcttactatgacaagtttattcaaaccgtaactgagaaagactacatccgttacttcgcagcttctggtgcaattggcggcctttacaagcgtaacgcgtctatctctggtgcagaagttggctgtcagggcgaagttggcgtggcatgttctatggcagcagcgggccttgctgagcttatgggtggtagcccagagcaagtatgtatggcggctgaaattgcgatggagcacaacctaggtctaacttgcgacccggttgcaggtcaggttcaggttccatgtatcgagcgtaatggtattgcagctgtaaaagcaatcaactcaactcgtatggcactgcgtcgttcttctgctcctactgtttctctagataaagttatcgaaacaatgctagagacaggtaaagacatgaacgcgaaataccgtgagacttctcaaggcggcctagcagtaaaagttatctgttaa

SEQ ID NO: 8286 - protein, 453 aa, Vibrio sp. Ex25
MISVFDIYKIGVGPSSSHTVGPMKAGKEFIDDLRAMGKLRDITKITVDVYGSLSLTGKGHHTDIAIIMGLAGNTPEKVDIDSIPGFIARVEETERLPVGMHCHTVSFPREGGMNFHKTNLELHENGMQIHAWIDDEKAYSKTYYSIGGGFIVDEENFGKEVENPVKVPYPFTTAEELVKQCHESGLSISALTMKNEHALHSDEETRTYFANIWRTMRECMDRGMNEEGILPGPLRVPRRAAALRQQLLTSEKTTNDPMSVVDWVNMFAFAVNEENAAGGRVVTAPTNGACGIIPAVLAYYDKFIQTVTEKDYIRYFAASGAIGGLYKRNASISGAEVGCQGEVGVACSMAAAGLAELMGGSPEQVCMAAEIAMEHNLGLTCDPVAGQVQVPCIERNGIAAVKAINSTRMALRRSSAPTVSLDKVIETMLETGKDMNAKYRETSQGGLAVKVIC

SEQ ID NO: 8287 - DNA, 1377 bp, Alteromonadales bacterium TW-7
  CDS (1)..(1377): transl_table=11
atgatcagtgcatttgatatgtttagcattggtattggcccttcgtcatcacacaccgttggcccaatgcgcgcatcacgcttatttgttaatgaactccatgaaaaacagctattgaaaagtgttaccgatataaaagtagagttatatggatcgttaggtcaaacaggtataggtcatggttctggcaaagctgttgtactcggcttagcaggctatgacccagaaacaatcgatgccgatttagtcgatgatattttattaactatcgagcaagaacaagttatttatttaaaccaaacacacaaagccaactttcctaagcaaggtgctattgtttttcatcgtcgtaaaacgctcccaaagcactctaatgcaatggagattattgcttcaaataatggtgaaaagctttatagcaaagtgtactactctatcggcggcggctttattgttaccgacgaagaatttgaaaacgaaaagcaagcagcgctcgatattagagaagaaaacccagcgccttacccttttagtagcgcaaaagagctacttgaaatgtgcaaagactcaggcctgagtgtttctagcttgatgatgaaaaacgaacgcacacttcgaatcgaagacgctataaaagatgagttatttcatatttggcaagtaatgaaagcctgtattgagcgcggaatgcgtactgaaggaattttacctggcggtttaaaagtaaaacgacgtgcccccagcctatacttaaaactgaatatcgaagtgagcaacgatccactcagagcaatggattgggtcgacctatttgcacttgccgttaatgaagaaaatgccgccggtggacgagtggtaacagcccccactaatggtgctgcaggcattctacccgctgtgcttatgtactatcatacatttgtaaaagaagtagaccgcgacattgccacgcgttatttactaacagccgctgcaattggtattttatataaaaaaaatgcgtctatttctggtgccgaagtgggctgccaaggcgaagtgggtgtagcgtgttcaatggccgctggagcattaactgaaattgtgggtggtaatgttgtacaagttgaaaacgcagctgaaataggcatggagcataatttaggtttaacgtgcgaccctgttggcggcttagtgcaagttccttgtattgaacgtaatgcgatgggggctataaaagccatcaatgcttctcgattggcaattcgtggtagtggcgagcaaaaagtatcacttgataaagtaataaaaaccatgcttgaaacaggtaatgatatgaaaacaaaatacaaagaaaccgcgcgcggtggtttagccgttaacattattgagtgttag

SEQ ID NO: 8288 - protein, 458 aa, Alteromonadales bacterium TW-7
MISAFDMFSIGIGPSSSHTVGPMRASRLFVNELHEKQLLKSVTDIKVELYGSLGQTGIGHGSGKAVVLGLAGYDPETIDADLVDDILLTIEQEQVIYLNQTHKANFPKQGAIVFHRRKTLPKHSNAMEIIASNNGEKLYSKVYYSIGGGFIVTDEEFENEKQAALDIREENPAPYPFSSAKELLEMCKDSGLSVSSLMMKNERTLRIEDAIKDELFHIWQVMKACIERGMRTEGILPGGLKVKRRAPSLYLKLNIEVSNDPLRAMDWVDLFALAVNEENAAGGRVVTAPTNGAAGILPAVLMYYHTFVKEVDRDIATRYLLTAAAIGILYKKNASISGAEVGCQGEVGVACSMAAGALTEIVGGNVVQVENAAEIGMEHNLGLTCDPVGGLVQVPCIERNAMGAIKAINASRLAIRGSGEQKVSLDKVIKTMLETGNDMKTKYKETARGGLAVNIIEC

SEQ ID NO: 8289 - DNA, 1407 bp, Pseudomonas putida GB-1
  CDS (1)..(1407): transl_table=11
atgcatatcagggtacggtcaggcattagcatggctatcagtgttttcgaccttttcaaaatcggcatcgggccgtccagttctcacaccgtcggcccgatgcgggcggccgctacctttgcccaggccctgcgcgagcaggggctgctggcgcgggtaacgcgcgtggaggtgcggctgtatggctcgctgtcggcgaccggggttggccatgccaccgaccgtgcgtgcctgcttggcctgatgggccagtggccagaccgcatcgacccagccactatcgaatcgcgtataggccaggccctgcaggagcactgcctgatgctcgatggcagccatccgctggccttcgaatatggccgtgacatgctgctgctcgacgagaacctgccttatcaccccaatgccatgagcctggaggccatggacgggcagggtagcctgttgtgccagacgtattattcggtgggcggcggtttcatcgtcgagcaggccgagatcgatgcgccggcaggcgaaacgaatgcagtgcgactgccctatgagttcgacagtggcgcccaattgctggctttgtgcaagggccatgacctgagcgtggcgcaactgatgatggccaacgaatgcgcctggcgcccggaggccgaggtccgggaagggttactgcgcatctgggcggccatgcgtgagtgcgtggcgaacggtctgcgcaatgagggcatcctgccaggcggcttgtacgtcaagcgtcgcgccgcgcggctgcaccgcagcctgcaggaactgggcaagcccaacgtgattggctcgacccttggcgccatggaatgggtcaacctgttcgctctggcggtcaatgaagagaatgccgccggtgggcgtatggttaccgcgcccaccaacggtgccgccggtattatcccggcggtattgcactactacatgaagttcaattccaacgcctgcgacgctgatgtcgtggacttcctgcttggcgcagcggcagtcggcatcttgtgcaagaagaatgcatcgatctccggtgccgaagtgggttgccagggggaggtcggctcagcctgctcgatggccgctgctggcctggcgcaggtgctgggggctacgccgccgcaactggaaaatgcggccgagattgccctggagcacaaccttgggctgacctgcgacccggtgggcggcctggtgcaggtgccgtgcatcgagcgcaatgcgattgctgcagtcaaagcgatcaacgctgtacagatggcgctgcggggagatggcgagcacttcatctcgctcgacagggtcatccgcaccctgcgtgataccggtgcggatatgcatgccaattacaaggaaacctcgcgcggcggtttggctgttgcgtttgttgagtgctga

SEQ ID NO: 8290 - protein, 468 aa, Pseudomonas putida GB-1
MHIRVRSGISMAISVFDLFKIGIGPSSSHTVGPMRAAATFAQALREQGLLARVTRVEVRLYGSLSATGVGHATDRACLLGLMGQWPDRIDPATIESRIGQALQEHCLMLDGSHPLAFEYGRDMLLLDENLPYHPNAMSLEAMDGQGSLLCQTYYSVGGGFIVEQAEIDAPAGETNAVRLPYEFDSGAQLLALCKGHDLSVAQLMMANECAWRPEAEVREGLLRIWAAMRECVANGLRNEGILPGGLYVKRRAARLHRSLQELGKPNVIGSTLGAMEWVNLFALAVNEENAAGGRMVTAPTNGAAGIIPAVLHYYMKFNSNACDADVVDFLLGAAAVGILCKKNASISGAEVGCQGEVGSACSMAAAGLAQVLGATPPQLENAAEIALEHNLGLTCDPVGGLVQVPCIERNAIAAVKAINAVQMALRGDGEHFISLDRVIRTLRDTGADMHANYKETSRGGLAVAFVEC

SEQ ID NO: 8291 - DNA, 1377 bp, Pseudomonas putida GB-1
  CDS (1)..(1377): transl_table=11
atgtcattgagtgtcttcgacctgttcaagatcggcatcggcccctccagttcacacacagtcggcccgatgcgtgccgctgcgcgctttgccgaagggctgcgccgtgacggcctgcttgccagcaccgccagcgtcagggccgagctgtatggctcactgggcgccaccggcaagggccatggcagtgacaaggccgtgctgctgggccttgaaggcgaacacccagacattatcgacaccgacagcatcccggctcggctgcaggccatccgcgacagcggccgcatcaacctgctgggcgagcacagcattgcgttcatcgaaaagcagcacctggcgatgatccgcaagccgctggactaccaccccaatggcatgatcttccgcgcgttcgacgaggccggcctgcaaatccgcagccgcgagtactactcggtgggcggcggtttcgtggtggatgaggacgccgccggccatgaccgcatcgtcgaggacagcactgtgctggcctaccccttcaagacggccaaggaactgctaggccattgctctgcaatgcaactgtcagtcagccaagtgatgttggccaacgaggccgcctggcgcccagaggcagaaacccgcgccgggctgctgcgcatctggcaggtgatgcaggattgcgtcgaagccggttgccagcacgaaggtatcttgccaggagggctcaaggtaaaacgccgggcaccagccctgtaccgccaactgagccgccacccggaggccagcctgcgtgacgccctgtcggtgcttgactgggtcaatctctacgctttggcggtgaacgaggaaaacgcctatggcgggcgtgtggttaccgcccccaccaacggtgcggcgggcatcgtcccggcggtactgcactactacatgcgtttcgtgccgggcgccagcgaggacggggtggtgcgctttctgctcaccgctgcggccatcggcatcctgtacaaggaaaacgcctccatatccggcgccgaagtgggctgccagggagaagtcggcgtcgcctgttcgatggccgccggggcgttgtgcgaagtgatgggcggcagcgtgcagcaggtggagaacgccgccgaaatcggcatggaacacaacctgggcctgacctgcgacccgatcggaggcctcgtgcaggtgccctgcatcgaacgcaatgccatgggttcggtgaaagccatcaacgcggtgcgcatggccttgcgcggggacggccagcacttcgtgtccctcgacaaggtcatccgcaccatgcgccagactggcgccgacatgaaaagcaaatacaaagagaccgcccgaggcggcctggccgtcaacatcatcgaatgttga

SEQ ID NO: 8292 - protein, 458 aa, Pseudomonas putida GB-1
MSLSVFDLFKIGIGPSSSHTVGPMRAAARFAEGLRRDGLLASTASVRAELYGSLGATGKGHGSDKAVLLGLEGEHPDIIDTDSIPARLQAIRDSGRINLLGEHSIAFIEKQHLAMIRKPLDYHPNGMIFRAFDEAGLQIRSREYYSVGGGFVVDEDAAGHDRIVEDSTVLAYPFKTAKELLGHCSAMQLSVSQVMLANEAAWRPEAETRAGLLRIWQVMQDCVEAGCQHEGILPGGLKVKRRAPALYRQLSRHPEASLRDALSVLDWVNLYALAVNEENAYGGRVVTAPTNGAAGIVPAVLHYYMRFVPGASEDGVVRFLLTAAAIGILYKENASISGAEVGCQGEVGVACSMAAGALCEVMGGSVQQVENAAEIGMEHNLGLTCDPIGGLVQVPCIERNAMGSVKAINAVRMALRGDGQHFVSLDKVIRTMRQTGADMKSKYKETARGGLAVNIIEC

SEQ ID NO: 8293 - DNA, 1377 bp, Pseudomonas putida GB-1
  CDS (1)..(1377): transl_table=11
atggccatcagcgtgttcgacctgttcaagatcggtgtcgggccctccagctcccacaccgtcggccccatgcgtgctggcgccctgttcgttcagggcctgcgcgaacgcggcgagctggagcgtgtgaaacggatcgaggtgcgtctttacggctcgctgtcggccaccggtatcggtcacggcaccgacaacgccaccatcatgggcctgatgggcgaatggcctgacgccattgacccgacccagatcgtgccgcgcatcgccgacctgcgcgaaaccgacaccctgcagctggacggccggctacccatcgaattcgtctgggcccgcgacatgctgctgctggacgagaacttgccataccaccccaacgccatgaccctgattgccgaaggcgagcagggtgagctgcaccgcgacacctactactcggtgggcggcggtttcgtggtcgatgctgcccaggccgccagcggcgtgctggatgccgaccagaccgtgctgccgtacgacttcaacagcgccgcggaactgctgcgcctgtgcaagcaaaacgacctcagcgtgtcgcaattgatgatggccaacgagaaggtctggcgcagcgagcaagagattcgcgcaggcctgcacaagctctgggaggccatgcaggaatgcgtcaacaacggcctcaagtacgaaggcacgctacctggcgggctgaatgtgcgccgccgcgccgccaagctgcaccgcagcctgcaggaaatcggcaagcccaacgtcatcggctcgaccatgagcgccatggagtgggtcaacttgttcgccctggcggtcaacgaagaaaacgccgccggcgggcgcatggtcaccgcgcctaccaatggcgcggccgggatcattccggcggtattgcactactacatgcgttttagcgatgaagtggacgagtcgagcgtggtcgacttcttcctcggtgctgctgcggtgggcatcttgtgcaagaagaacgcttcgatctccggtgccgaagtggggtgccagggtgaagtcggctcggcctgtgccatggctgcagcgggccttgccgaagtgctcggggctaccccgccacaagtggaaaacgctgctgaaattgccctggagcacaacctcggcctgacctgcgacccggtcggcgggctggtgcaggtgccgtgcatcgagcgcaacgcgattgctgcggtaaaggccatcaacgcggtgcagatggccttgcgcggggacggtgagcacttcatttctctcgaccaggtaatccgcaccatgcgcgataccggggccgacatgcacgacaagtacaaagaaacctcgcgcggtggcctggctgtcagtgctatcgaatgctaa

SEQ ID NO: 8294 - protein, 458 aa, Pseudomonas putida GB-1
MAISVFDLFKIGVGPSSSHTVGPMRAGALFVQGLRERGELERVKRIEVRLYGSLSATGIGHGTDNATIMGLMGEWPDAIDPTQIVPRIADLRETDTLQLDGRLPIEFVWARDMLLLDENLPYHPNAMTLIAEGEQGELHRDTYYSVGGGFVVDAAQAASGVLDADQTVLPYDFNSAAELLRLCKQNDLSVSQLMMANEKVWRSEQEIRAGLHKLWEAMQECVNNGLKYEGTLPGGLNVRRRAAKLHRSLQEIGKPNVIGSTMSAMEWVNLFALAVNEENAAGGRMVTAPTNGAAGIIPAVLHYYMRFSDEVDESSVVDFFLGAAAVGILCKKNASISGAEVGCQGEVGSACAMAAAGLAEVLGATPPQVENAAEIALEHNLGLTCDPVGGLVQVPCIERNAIAAVKAINAVQMALRGDGEHFISLDQVIRTMRDTGADMHDKYKETSRGGLAVSAIEC

SEQ ID NO: 8295 - DNA, 1368 bp, Haemophilus influenzae
  CDS (1)..(1368): transl_table=11
atgattagcgtatttgatatgtttaaagtgggaattgggccatccagttcccacacggtcggtccgatgaaagcgggtaaacaatttatagacgacttaattaaacgaaatcaatttgaacaaactactgaaattcacgtagatgtgtacggttctctttcaatgacaggacgaggacacagtacagatattgccattattatggggttagcgggttatttaccacataatgtggatattgatatgatttcaggtttcattgagaaagttaaacaaactgcgcttttacccattaatgtcggtcaaaagatagtaaaatttgattttgaaaataatctcattttccaccgcacttttttaaaattgcacgaaaatggcatgacaattaccgctcttgatgaaaatcgcacagagctttatcgccaaacctattattcgattgggggtggttttattgtcgatgaagcccattttggcaaagaagaaaaaaacacagtccaagtgccttatccttacaaaaatgccgaagatattttgaaacattgtagtgataacggcttaatgctttccactgtgatgttggaaaatgaaatcgcattgaatggcaaagaggctgttagtgctcatctagagaatgtctggaaaacgatgcaggcttgtattgaacacggcattcacacagagggtattttacccggcccattaagagtaccacgtcgtgcagcttcactttatcgtgcgttgcaagcaaatacgaatttatctaacgatccaatgcgcgtaatcgactgggtcaatatgtttgcgcttgctgtcaatgaagaaaatgcagcaggtggacgcgtggttacggcaccaactaatggtgcgtgcgggattattccagcggtattagcttactatgaaaaattcatctcgccattaacacctgaaatcattgaacgctatttattagccgcagggatgattggttcactttataagatgaacgcttctatttctggtgcagaagtgggttgccaaggtgaagtgggtgtagcctgttccatggcggctgcaggactagctgaaattttgggtggtaatccactacaagtatgcatcgcagctgaaattgcaatggagcataatttaggattaacttgcgaccctgtcggcggtcaagttcaagtaccttgtatcgaacgcaatgcgattgcttcagttaaagcaatcaatgcatcgcgtatggctttacgccgtaccactaatccaagagtaactttagataaagtgattgaaacaatgtacgaaacaggtaaagatatgaacgccaagtatcgcgaaacatctcaaggcggacttgcagttaagattgtttgtaactaa

SEQ ID NO: 8296 - protein, 455 aa, Haemophilus influenzae
MISVFDMFKVGIGPSSSHTVGPMKAGKQFIDDLIKRNQFEQTTEIHVDVYGSLSMTGRGHSTDIAIIMGLAGYLPHNVDIDMISGFIEKVKQTALLPINVGQKIVKFDFENNLIFHRTFLKLHENGMTITALDENRTELYRQTYYSIGGGFIVDEAHFGKEEKNTVQVPYPYKNAEDILKHCSDNGLMLSTVMLENEIALNGKEAVSAHLENVWKTMQACIEHGIHTEGILPGPLRVPRRAASLYRALQANTNLSNDPMRVIDWVNMFALAVNEENAAGGRVVTAPTNGACGIIPAVLAYYEKFISPLTPEIIERYLLAAGMIGSLYKMNASISGAEVGCQGEVGVACSMAAAGLAEILGGNPLQVCIAAEIAMEHNLGLTCDPVGGQVQVPCIERNAIASVKAINASRMALRRTTNPRVTLDKVIETMYETGKDMNAKYRETSQGGLAVKIVCN

SEQ ID NO: 8297 - DNA, 1368 bp, Helicobacter pylori J99
  CDS (1)..(1368): transl_table=11
atggctagtttttccattttatccatttttaaaatcggcgtggggcctagctcttcacacaccataggacctatggaagcgggggcgagattttgcgggttgttaaaaggcattttagagcaggttgaacgcgttcaaatcaccttgcatggctcattagccttaaccggtaaagggcatttgagcgatgaggcggttttgattggcttgcatggtatttatgctaacgaattagatataacaaccaaaaaagccttattgcatgaagcgtttgagaataaagttttaaaactcgctaaccagcatcatatcccttttgattatgctaaagatttgatttttgacaacaaacctttagccagacaccaaaacgccctcattctaaaagcttttaatgctaaaaatgaggttttaaaagaagagacttattattctgttggtggagggtttgtttatactgaaaaagaattagacaacttatctgaagagggtgaaaatgaaagcgttgcttatgatttttcaagcgctaaggaattgctagaattgtgccaaaaacaccaaaaaagcatcgctgaaatcgtgcgtttgagagaaaacgccctcaaaaaccaccctgatgcaacgatgaccaaaatctatcatgcgatgcttgagtgttatcataatggggctaattctaaagaaaggtatctgcccggttctttgaaagtaacacgattagccccaagcgttaaaacgcgcctagaaaagcaccccacaagcgggaaagaccccttagccttgattgattacatttcgctttacgctcgctccattgccgaagaaaacgctagcggaggcaaggtggtaaccgcccccactaatggggcgtgcgcggtggtgccaagcgtgctttcatacgccaaaaaccatttgtttgaaaatttatcgcaaaaatctatcaatgattttttactcactagtgcggcgattggctatctttacaaaaaaaacgcttccttaagcggcgcagaagccgggtgtcaggctgaaattggtgtggcaagctctatggctgcgggggggttagcccatttgtgccaagcgaccacgcaacaggttttgatcgctagtgaaatcgctatggagcaccatttaggattgacatgcgatccggtggggggcttggtgcaaatcccttgcattgaacgcaatgttttaggggcgattaaagcgattagcgcttctaaactggccttagaagatgaatacaagcctaaagtgagtctagatgaagtgatcgctacgatgtatgcgactgggaaagacatgaatgaaaaatacaaagagacttcgttaggggggctagctaaaaccttaaaatgctaa

SEQ ID NO: 8298 - protein, 455 aa, Helicobacter pylori J99
MASFSILSIFKIGVGPSSSHTIGPMEAGARFCGLLKGILEQVERVQITLHGSLALTGKGHLSDEAVLIGLHGIYANELDITTKKALLHEAFENKVLKLANQHHIPFDYAKDLIFDNKPLARHQNALILKAFNAKNEVLKEETYYSVGGGFVYTEKELDNLSEEGENESVAYDFSSAKELLELCQKHQKSIAEIVRLRENALKNHPDATMTKIYHAMLECYHNGANSKERYLPGSLKVTRLAPSVKTRLEKHPTSGKDPLALIDYISLYARSIAEENASGGKVVTAPTNGACAVVPSVLSYAKNHLFENLSQKSINDFLLTSAAIGYLYKKNASLSGAEAGCQAEIGVASSMAAGGLAHLCQATTQQVLIASEIAMEHHLGLTCDPVGGLVQIPCIERNVLGAIKAISASKLALEDEYKPKVSLDEVIATMYATGKDMNEKYKETSLGGLAKTLKC

SEQ ID NO: 8299 - DNA, 1368 bp, Helicobacter pylori
  CDS (1)..(1368): transl_table=11
atggctagtttttctattttatctatttttaaaatcggcgtggggcctagctcttcacacactatagggcctatggaagcgggagcgagattttgcgagtcgttaaaaggcattttagagcaggttgtgcgcgttcaaatcaccttgcatggctcattagctttaaccggtaaagggcatttgagcgatgaggcggttttaattggcttgcatggcatttacgctaacgaattagaggtaacaaccaaaaaagccttattgcatgaagcgcttgagaataaagttttaaaactcgctaaccagcatcatatcccttttgattatgctaaagatttgatttttgacaacaagcctttaacaagacaccaaaacgccctcattctaaaagcttttaactctaaaaatgaggttttaaaagaagagacttactattctgttggtggagggtttgtctatactgaaaaagaattagacaacttgtctgaagaggatgggaatgaaagtattgcctatgatttttcaagcgctaaggagttgctagaattgtgccaaaaacaccaaaaaagcatcgctgaaatcgtgcgtttgagagaaaacgccctgaaaaaccaccctgatgcaacgatggttaaaatttatcatgcgatgcttgagtgttatgataatggggctaattctaaagaaaggtatctgcctggttctttgaaagtaacacgattggccccaagcattaaaacgcgcctagaaaaacaccccacaagcgggaaagaccccttagccttgattgattacatttcgctttacgctcgcgccattgctgaagaaaacgctagcggaggcaaggtggtaaccgcccccactaatggggcgtgcgcggtggtgccaagcgtgcttttatacgctaaaaaccatttgtttgaaaatttatcgcaaaaggctatcaatgattttttactcactagtgcggcgattggctatctttacaagaaaaacgcttccttgagtggcgcagaagccgggtgtcaggctgaaattggcgtggcaagctctatggctgcgggggggttagctcatttgtgccaagcgaccacgcaacaggttttgatcgctagtgaaatcgctatggaacaccatttaggattgacatgcgatccggtggggggcttggtgcaaatcccttgcattgaacgcaatgttttaggggcgattaaagcgatcagcgcttctaaactagccttagaagatgaatacaagcctaaagtgagtctggatgaagtgatcgctacaatgtatgcgaccggaaaagacatgaatgaaaaatacaaagagacttcgttaggggggttagccaaaaccttaaaatgctaa

SEQ ID NO: 8300 - protein, 455 aa, Helicobacter pylori
MASFSILSIFKIGVGPSSSHTIGPMEAGARFCESLKGILEQVVRVQITLHGSLALTGKGHLSDEAVLIGLHGIYANELEVTTKKALLHEALENKVLKLANQHHIPFDYAKDLIFDNKPLTRHQNALILKAFNSKNEVLKEETYYSVGGGFVYTEKELDNLSEEDGNESIAYDFSSAKELLELCQKHQKSIAEIVRLRENALKNHPDATMVKIYHAMLECYDNGANSKERYLPGSLKVTRLAPSIKTRLEKHPTSGKDPLALIDYISLYARAIAEENASGGKVVTAPTNGACAVVPSVLLYAKNHLFENLSQKAINDFLLTSAAIGYLYKKNASLSGAEAGCQAEIGVASSMAAGGLAHLCQATTQQVLIASEIAMEHHLGLTCDPVGGLVQIPCIERNVLGAIKAISASKLALEDEYKPKVSLDEVIATMYATGKDMNEKYKETSLGGLAKTLKC

SEQ ID NO: 8301 - DNA, 1368 bp, Escherichia coli
  CDS (1)..(1368): transl_table=11
atgattagcgtattcgatattttcaaaatcggcattggcccttccagttctcataccgttggaccaatgaaagcgggtaaacaatttaccgacgatctgattgcccgtaacctgcttaaagacgtgacccgcgtggtggttgacgtgtacggctcgctctctctgaccggtaaaggccaccacactgatatcgccattattatgggcctggcgggtaacctgccggataccgtggatatcgattccatccccagttttattcaggatgtgaatactcatggtcgcctgatgctggcaaacggtcagcatgaagtggagttcccggttgatcagtgcatgaacttccacgccgacaacctttctctgcatgaaaacggtatgcgcattaccgcgctggcgggcgataaagtcgtttacagccagacttactactctattggcggtggctttatcgttgatgaagagcattttggccagcaggatagcgcaccggttgaagttccttatccgtacagttcagcagccgatctgcaaaaacattgtcaggaaaccgggctgtcactctctggcctgatgatgaaaaacgagctggcgctgcacagcaaagaagagctggaacagcacctggcgaacgtctgggaagtcatgcgcggcggtattgagcgcggtatttccaccgaaggcgtgttgcctggcaaactgcgcgttccacgccgtgctgcggcactacgccggatgctggtcagccaggataaaaccaccactgacccgatggcggttgttgactggatcaacatgtttgcactggcagtgaacgaagagaacgctgctggcggtcgcgtggtgactgcgccgactaacggtgcgtgcgggattatcccggcagttctggcgtactacgacaagtttatccgcgaagtgaacgctaactcactggctcgttacctgctggtagccagcgccattggttctctttataagatgaacgcgtcgatttctggtgctgaagtgggttgccagggtgaagttggcgtggcgtgctcaatggcggcggctggtctggcagaactattaggcgcaagcccggcgcaggtgtgcatcgcggcggaaatcgccatggagcacaacctcggtctgacgtgtgacccggtcgccggacaggtacaggtgccatgcatcgagcgtaacgccattgcggcagtaaaagcggtgaacgccgcacgtatggcgctgcgccgtaccagcgagccgcgcgtctgcctcgataaagttatcgaaaccatgtacgaaacaggtaaagatatgaacgccaagtaccgcgaaacctctcgcggcggcctggcaatgaagatcgttgcctgcgattaa

SEQ ID NO: 8302 - protein, 455 aa, Escherichia coli
MISVFDIFKIGIGPSSSHTVGPMKAGKQFTDDLIARNLLKDVTRVVVDVYGSLSLTGKGHHTDIAIIMGLAGNLPDTVDIDSIPSFIQDVNTHGRLMLANGQHEVEFPVDQCMNFHADNLSLHENGMRITALAGDKVVYSQTYYSIGGGFIVDEEHFGQQDSAPVEVPYPYSSAADLQKHCQETGLSLSGLMMKNELALHSKEELEQHLANVWEVMRGGIERGISTEGVLPGKLRVPRRAAALRRMLVSQDKTTTDPMAVVDWINMFALAVNEENAAGGRVVTAPTNGACGIIPAVLAYYDKFIREVNANSLARYLLVASAIGSLYKMNASISGAEVGCQGEVGVACSMAAAGLAELLGASPAQVCIAAEIAMEHNLGLTCDPVAGQVQVPCIERNAIAAVKAVNAARMALRRTSEPRVCLDKVIETMYETGKDMNAKYRETSRGGLAMKIVACD

SEQ ID NO: 8303 - DNA, 1365 bp, Escherichia coli
  CDS (1)..(1365): transl_table=11
atgattagtgcattcgatattttcaaaattgggattggtccctccagttcgcataccgtggggccaatgaatgccggaaaaagttttattgatcggctggaaagtagcggcttattaaccgcgacgagccatattgtggtcgatctgtacgggtcgttgtcactgacgggcaaaggccatgccacggatgtcgccatcatcatgggactggcaggaaacagtccgcaggatgttgtcattgatgagatccctgcatttatagagttagtaacgcgcagcgggcggctgccagtggcatctggtgcgcatattgttgattttcctgtagcaaagaacattatcttccatcccgaaatgttgcctcgccatgagaacggaatgcggatcactgcctggaagggacaggaagagctattaagtaaaacctattactctgtcggcggcgggtttattgtcgaagaagaacacttcggcctgtcgcacgatgtcgaaacgtccgtaccttacgatttccactcagcaggtgaactgctgaaaatgtgtgattacaacggcctgtctatatctggtctgatgatgcacaacgagctagcgctgcgcagcaaagcggaaattgacgccggttttgcccgtatctggcaagtgatgcatgacggtattgaacgtgggatgaacactgaaggcgtgctgcctggtccgctcaatgtgccgcgccgtgccgtagcgctgcgtcgtcagctggtttccagcgataacatctctaacgatccgatgaatgtcatcgactggatcaacatgtacgcgctggcggttagtgaagaaaacgcagctggcgggcgcgtggtaacggcaccgactaacggtgcgtgcggcattattccggcagtactggcttattacgataagttccgtcgtccggtaaacgagcggtcaattgcccgctattttctggccgcgggggctattggcgcgctgtataaaatgaacgcctccatctctggcgcggaagtcggctgtcagggggagattggcgtggcctgttcaatggcggcggcagggttaactgaactactgggcggcagtccggcgcaggtatgcaatgcggcggaaatcgcgatggagcataaccttgggctgacctgcgatccggttgccggacaggtacaaatcccgtgcattgaacgtaatgccattaatgccgtgaaagcagtaaacgccgcgcggatggcgatgcgccgcacctcggcaccgcgtgtttcactcgataaagtgatcgagacgatgtatgaaaccggcaaagatatgaacgataaataccgcgaaacatcacgcggaggactggccattaaagtggtctgcggctga

SEQ ID NO: 8304 - protein, 454 aa, Escherichia coli
MISAFDIFKIGIGPSSSHTVGPMNAGKSFIDRLESSGLLTATSHIVVDLYGSLSLTGKGHATDVAIIMGLAGNSPQDVVIDEIPAFIELVTRSGRLPVASGAHIVDFPVAKNIIFHPEMLPRHENGMRITAWKGQEELLSKTYYSVGGGFIVEEEHFGLSHDVETSVPYDFHSAGELLKMCDYNGLSISGLMMHNELALRSKAEIDAGFARIWQVMHDGIERGMNTEGVLPGPLNVPRRAVALRRQLVSSDNISNDPMNVIDWINMYALAVSEENAAGGRVVTAPTNGACGIIPAVLAYYDKFRRPVNERSIARYFLAAGAIGALYKMNASISGAEVGCQGEIGVACSMAAAGLTELLGGSPAQVCNAAEIAMEHNLGLTCDPVAGQVQIPCIERNAINAVKAVNAARMAMRRTSAPRVSLDKVIETMYETGKDMNDKYRETSRGGLAIKVVCG

SEQ ID NO: 8305 - DNA, 27 bp, Artificial sequence
  primer
atgattagtctattcgacatgtttaag

SEQ ID NO: 8306 - DNA, 24 bp, Artificial sequence
  primer
ttagtcacactggactttgattgc

SEQ ID NO: 8307 - protein, 742 aa, Artificial sequence
  consensus sequence
  Variant (2)..(2): Xaa in position 2 is any amino acid
  Variant (3)..(24): Xaa in position 3 to 24 is any or no amino acid
  Variant (27)..(27): Xaa in position 27 is any amino acid
  Variant (30)..(30): Xaa in position 30 is any amino acid
  Variant (32)..(32): Xaa in position 32 is any amino acid
  Variant (40)..(40): Xaa in position 40 is any amino acid
  Variant (44)..(44): Xaa in position 44 is any amino acid
  Variant (46)..(48): Xaa in position 46 to 48 is any amino acid
  Variant (50)..(64): Xaa in position 50 to 64 is any amino acid
  Variant (65)..(75): Xaa in position 65 to 75 is any or no amino acid
  Variant (79)..(80): Xaa in position 79 to 80 is any amino acid
  Variant (83)..(83): Xaa in position 83 is any amino acid
  Variant (86)..(86): Xaa in position 86 is any amino acid
  Variant (89)..(89): Xaa in position 89 is any amino acid
  Variant (91)..(93): Xaa in position 91 to 93 is any amino acid
  Variant (96)..(96): Xaa in position 96 is any amino acid
  Variant (98)..(99): Xaa in position 98 to 99 is any amino acid
  Variant (101)..(111): Xaa in position 101 to 111 is any amino acid
  Variant (112)..(163): Xaa in position 112 to 163 is any or no amino acid
  Variant (165)..(165): Xaa in position 165 is any amino acid
  Variant (166)..(186): Xaa in position 166 to 186 is any or no amino acid
  Variant (188)..(188): Xaa in position 188 is any amino acid
  Variant (190)..(190): Xaa in position 190 is any amino acid
  Variant (192)..(194): Xaa in position 192 to 194 is any amino acid
  Variant (196)..(206): Xaa in position 196 to 206 is any amino acid
  Variant (207)..(219): Xaa in position 207 to 219 is any or no amino acid
  Variant (221)..(221): Xaa in position 221 is any amino acid
  Variant (223)..(223): Xaa in position 223 is any amino acid
  Variant (228)..(243): Xaa in position 228 to 243 is any amino acid
  Variant (244)..(351): Xaa in position 244 to 351 is any or no amino acid
  Variant (353)..(375): Xaa in position 353 to 375 is any amino acid
  Variant (378)..(388): Xaa in position 378 to 388 is any amino acid
  Variant (389)..(395): Xaa in position 389 to 395 is any or no amino acid
  Variant (397)..(398): Xaa in position 397 to 398 is any amino acid
  Variant (400)..(405): Xaa in position 400 to 405 is any amino acid
  Variant (407)..(410): Xaa in position 407 to 410 is any amino acid
  Variant (411)..(415): Xaa in position 411 to 415 is any or no amino acid
  Variant (417)..(417): Xaa in position 417 is any amino acid
  Variant (421)..(421): Xaa in position 421 is any amino acid
  Variant (423)..(423): Xaa in position 423 is any amino acid
  Variant (425)..(425): Xaa in position 425 is any amino acid
  Variant (429)..(434): Xaa in position 429 to 434 is any amino acid
  Variant (436)..(443): Xaa in position 436 to 443 is any amino acid
  Variant (444)..(525): Xaa in position 444 to 525 is any or no amino acid
  Variant (527)..(530): Xaa in position 527 to 530 is any amino acid
  Variant (532)..(532): Xaa in position 532 is any amino acid
  Variant (540)..(540): Xaa in position 540 is any amino acid
  Variant (544)..(544): Xaa in position 544 is any amino acid
  Variant (553)..(553): Xaa in position 553 is any amino acid
  Variant (555)..(556): Xaa in position 555 to 556 is any amino acid
  Variant (561)..(561): Xaa in position 561 is any amino acid
  Variant (563)..(578): Xaa in position 563 to 578 is any amino acid
  Variant (579)..(592): Xaa in position 579 to 592 is any or no amino acid
  Variant (594)..(594): Xaa in position 594 is any amino acid
  Variant (596)..(596): Xaa in position 596 is any amino acid
  Variant (600)..(600): Xaa in position 600 is any amino acid
  Variant (602)..(602): Xaa in position 602 is any amino acid
  Variant (604)..(604): Xaa in position 604 is any amino acid
  Variant (621)..(621): Xaa in position 621 is any amino acid
  Variant (623)..(624): Xaa in position 623 to 624 is any amino acid
  Variant (628)..(629): Xaa in position 628 to 629 is any amino acid
  Variant (631)..(634): Xaa in position 631 to 634 is any amino acid
  Variant (636)..(639): Xaa in position 636 to 639 is any amino acid
  Variant (641)..(643): Xaa in position 641 to 643 is any amino acid
  Variant (648)..(649): Xaa in position 648 to 649 is any amino acid
  Variant (652)..(652): Xaa in position 652 is any amino acid
  Variant (655)..(655): Xaa in position 655 is any amino acid
  Variant (660)..(661): Xaa in position 660 to 661 is any amino acid
  Variant (663)..(663): Xaa in position 663 is any amino acid
  Variant (666)..(666): Xaa in position 666 is any amino acid
  Variant (674)..(677): Xaa in position 674 to 677 is any amino acid
  Variant (680)..(681): Xaa in position 680 to 681 is any amino acid
  Variant (683)..(685): Xaa in position 683 to 685 is any amino acid
  Variant (687)..(693): Xaa in position 687 to 693 is any amino acid
  Variant (694)..(695): Xaa in position 694 to 695 is any or no amino acid
  Variant (697)..(697): Xaa in position 697 is any amino acid
  Variant (700)..(700): Xaa in position 700 is any amino acid
  Variant (703)..(703): Xaa in position 703 is any amino acid
  Variant (706)..(707): Xaa in position 706 to 707 is any amino acid
  Variant (710)..(710): Xaa in position 710 is any amino acid
  Variant (713)..(714): Xaa in position 713 to 714 is any amino acid
  Variant (717)..(717): Xaa in position 717 is any amino acid
  Variant (721)..(721): Xaa in position 721 is any amino acid
  Variant (726)..(729): Xaa in position 726 to 729 is any amino acid
  Variant (730)..(741): Xaa in position 730 to 741 is any or no amino acid
SXXXXXXXXXXXXXXXXXXXXXXXFDXFKXGXGPSSSHTXGPMXAXXXFXXXXXXXXXXXXXXXXXXXXXXXXXXGSLXXTGXGHXTDXAXXXGLXGXXPXXXXXXXXXXXXXXXXXXXXXXXXXXXXXXXXXXXXXXXXXXXXXXXXXXXXXXXXXXXXXXXFXXXXXXXXXXXXXXXXXXXXXXHXNXMXXXAXXXXXXXXXXXXXXXXXXXXXXXXYXSXGGGFXXXXXXXXXXXXXXXXXXXXXXXXXXXXXXXXXXXXXXXXXXXXXXXXXXXXXXXXXXXXXXXXXXXXXXXXXXXXXXXXXXXXXXXXXXXXXXXXXXXXXXXXXXXXXXXXXXXXXXXXXXXXFXXXXXXXXXXXXXXXXXXXXXXXNEXXXXXXXXXXXXXXXXXXWXXMXXXXXXGXXXXXXXXXGXLPGXLXVXRRAXXXXXXLXXXXXXXXXXXXXXXXXXXXXXXXXXXXXXXXXXXXXXXXXXXXXXXXXXXXXXXXXXXXXXXXXXXXXXXXXXXXXXXXXXXXXXXXXXWXXXXAXAVNEENAXGGRXVTAPTNGAXGXXPAVLXYXXXXXXXXXXXXXXXXXXXXXXXXXXXXXXLXAXAIGXLXKXNASISGAEVGCQGEVGXAXXMAAXXLXXXXGXXXXQXXXAAEIXXEHXLGXTCDPXXGXVQXPCIERNAXXXXKAXXAXXXAXXXXXXXXXVXLDXVIXTMXXTGXDMXXKYXETSXGGLAXXXXXXXXXXXXXXXXC

SEQ ID NO: 8308 - protein, 38 aa, Artificial sequence
  protein pattern
  Variant (2)..(3): Xaa in position 2 to 3 is any or no amino acid
  Variant (7)..(7): Xaa in position 7 is Ala or Gly
  Variant (8)..(8): Xaa in position 8 is Leu or Met
  Variant (11)..(11): Xaa in position 11 is any amino acid
  Variant (14)..(14): Xaa in position 14 is Leu or Met
  Variant (19)..(19): Xaa in position 19 is Ile or Val
  Variant (20)..(20): Xaa in position 20 is any amino acid
  Variant (22)..(22): Xaa in position 22 is any amino acid
  Variant (25)..(25): Xaa in position 25 is Ile or Val
  Variant (32)..(32): Xaa in position 32 is Ala, Gly, Ser or Thr
  Variant (33)..(33): Xaa in position 33 is Phe, Ile, Leu, Met or Val
  Variant (34)..(34): Xaa in position 34 is Ala, Gly, Asn or Ser
  Variant (35)..(35): Xaa in position 35 is Ala or Ser
  Variant (36)..(36): Xaa in position 36 is any amino acid
AXXAEIXXEHXLGXTCDPXXGXVQXPCIERNXXXXXKA

SEQ ID NO: 8309 - protein, 38 aa, Artificial sequence
  protein pattern
  Variant (2)..(5): Xaa in position 2 to 5 is any amino acid
  Variant (7)..(7): Xaa in position 7 is Phe, Ile, Leu or Met
  Variant (10)..(10): Xaa in position 10 is Asn or Ser
  Variant (15)..(15): Xaa in position 15 is any amino acid
  Variant (18)..(18): Xaa in position 18 is any amino acid
  Variant (19)..(19): Xaa in position 19 is any or no amino acid
  Variant (21)..(21): Xaa in position 21 is any or no amino acid
  Variant (23)..(23): Xaa in position 23 is Ala or Ser
  Variant (29)..(29): Xaa in position 29 is Ala or Cys
  Variant (31)..(31): Xaa in position 31 is any amino acid
  Variant (32)..(32): Xaa in position 32 is Ile, Leu, Met or Val
  Variant (34)..(34): Xaa in position 34 is Ala or Ser
  Variant (35)..(35): Xaa in position 35 is Ala, Cys, Thr or Val
  Variant (36)..(37): Xaa in position 36 to 37 is any amino acid
  Variant (38)..(38): Xaa in position 38 is Phe, His, Trp or Tyr
WXXXXAXAVXEENAXGGXXVXTXPTNGAXGXXPXXXXX

SEQ ID NO: 8310 - protein, 36 aa, Artificial sequence
  protein pattern
  Variant (2)..(2): Xaa in position 2 is any amino acid
  Variant (3)..(4): Xaa in position 3 to 4 is any or no amino acid
  Variant (6)..(7): Xaa in position 6 to 7 is any amino acid
  Variant (8)..(9): Xaa in position 8 to 9 is any or no amino acid
  Variant (11)..(12): Xaa in position 11 to 12 is any amino acid
  Variant (15)..(15): Xaa in position 15 is Ile or Leu
  Variant (19)..(19): Xaa in position 19 is Asp or Glu
  Variant (20)..(20): Xaa in position 20 is any amino acid
  Variant (24)..(24): Xaa in position 24 is Ala or Gly
  Variant (26)..(26): Xaa in position 26 is Ile or Val
  Variant (28)..(28): Xaa in position 28 is Ala, Ser, Thr or Val
  Variant (29)..(29): Xaa in position 29 is Ala or Ser
  Variant (30)..(30): Xaa in position 30 is Ala, Cys or Ser
  Variant (31)..(31): Xaa in position 31 is Ala or Ser
  Variant (33)..(33): Xaa in position 33 is Ala, Gly or Ser
  Variant (35)..(35): Xaa in position 35 is Ala, Gly or Ser
  Variant (36)..(36): Xaa in position 36 is Ala or Gly
AXXXIXXXXKXXASXSGAXXGCQXEXGXXXXMXAXX

SEQ ID NO: 8311 - protein, 30 aa, Artificial sequence
  protein pattern
  Variant (3)..(3): Xaa in position 3 is any amino acid
  Variant (4)..(4): Xaa in position 4 is Ala, Cys or Val
  Variant (5)..(5): Xaa in position 5 is Ile, Met or Val
  Variant (6)..(6): Xaa in position 6 is any amino acid
  Variant (7)..(7): Xaa in position 7 is Ala, Thr or Val
  Variant (9)..(11): Xaa in position 9 to 11 is any amino acid
  Variant (12)..(12): Xaa in position 12 is Ala or Gly
  Variant (13)..(13): Xaa in position 13 is any amino acid
  Variant (16)..(17): Xaa in position 16 to 17 is any or no amino acid
  Variant (19)..(20): Xaa in position 19 to 20 is any or no amino acid
  Variant (22)..(22): Xaa in position 22 is Lys or Arg
  Variant (25)..(25): Xaa in position 25 is Ala or Ser
  Variant (26)..(26): Xaa in position 26 is any amino acid
  Variant (27)..(27): Xaa in position 27 is Ala or Gly
LDXXXXXMXXXXXDMXXKXXYXETXXXGLA

SEQ ID NO: 8312 - protein, 27 aa, Artificial sequence
  protein pattern
  Variant (2)..(2): Xaa in position 2 is any amino acid
  Variant (5)..(5): Xaa in position 5 is Ile, Leu, Met or Val
  Variant (6)..(6): Xaa in position 6 is Phe or Tyr
  Variant (7)..(7): Xaa in position 7 is any amino acid
  Variant (8)..(8): Xaa in position 8 is Ala, Ile, Leu or Val
  Variant (10)..(10): Xaa in position 10 is Ile, Pro or Val
  Variant (18)..(18): Xaa in position 18 is any amino acid
  Variant (22)..(22): Xaa in position 22 is any amino acid
  Variant (24)..(24): Xaa in position 24 is Ala, Gly or Ser
  Variant (25)..(26): Xaa in position 25 to 26 is any amino acid
SXFDXXXXGXGPSSSHTXGPMXAXXXF

SEQ ID NO: 8313 - protein, 25 aa, Artificial sequence
  protein pattern
  Variant (4)..(6): Xaa in position 4 to 6 is any or no amino acid
  Variant (8)..(8): Xaa in position 8 is any amino acid
  Variant (11)..(11): Xaa in position 11 is any amino acid
  Variant (12)..(12): Xaa in position 12 is Ser or Thr
  Variant (13)..(14): Xaa in position 13 to 14 is any amino acid
  Variant (16)..(18): Xaa in position 16 to 18 is any amino acid
  Variant (21)..(21): Xaa in position 21 is any amino acid
  Variant (23)..(24): Xaa in position 23 to 24 is any amino acid
  Variant (25)..(25): Xaa in position 25 is Ala, Cys, Pro or Val
GSLXXXGXGHXXXXAXXXGLXGXXX

SEQ ID NO: 8314 - protein, 9 aa, Artificial sequence
  protein pattern
  Variant (2)..(2): Xaa in position 2 is any amino acid
  Variant (4)..(4): Xaa in position 4 is Ile or Val
  Variant (9)..(9): Xaa in position 9 is Ile or Val
YXSXGGGFX

SEQ ID NO: 8315 - protein, 13 aa, Artificial sequence
  protein pattern
  Variant (2)..(2): Xaa in position 2 is any amino acid
  Variant (6)..(6): Xaa in position 6 is any amino acid
  Variant (7)..(7): Xaa in position 7 is Phe, Leu or Met
  Variant (8)..(8): Xaa in position 8 is any amino acid
  Variant (9)..(9): Xaa in position 9 is Ile, Leu or Val
  Variant (10)..(10): Xaa in position 10 is any amino acid
  Variant (12)..(12): Xaa in position 12 is Lys or Arg
GXLPGXXXXXRXA

SEQ ID NO: 8316 - DNA, 660 bp, Escherichia coli
  CDS (1)..(660): transl_table=11
atgatgaaacagcctgcgcccgtttatcagagaattgcgggtcatcaatggcgacatatctggctttctggcgatatacacggttgtcttgagcagttgcgccgcaaattatggcattgtcgttttgatccgtggcgagatttacttatctcagtgggagacgttatcgatcgtgggccgcaaagtttacgttgtctgcagttactggaacaacattgggtttgtgcggtaagaggcaatcatgaacagatggcgatggatgcgctggcatcccagcagatgtctttgtggttgatgaatggcggcgactggtttattgcgctggcagataatcaacagaaacaagcgaaaacggcgctggaaaaatgtcagcatttgccctttattcttgaagtacacagtcgcaccggcaagcatgttattgctcatgccgattatccagatgatgtttatgaatggcaaaaggacgttgatttgcatcaggtcttgtggagccgctcgcgattaggtgaacgccaaaaagggcagggaattacaggtgctgatcatttctggtttggtcatacaccgttgcgacatcgcgtggatattggcaacctgcattatattgataccggtgctgtctttgggggcgaactgactcttgtgcaattgcaataa

SEQ ID NO: 8317 - protein, 219 aa, Escherichia coli
MMKQPAPVYQRIAGHQWRHIWLSGDIHGCLEQLRRKLWHCRFDPWRDLLISVGDVIDRGPQSLRCLQLLEQHWVCAVRGNHEQMAMDALASQQMSLWLMNGGDWFIALADNQQKQAKTALEKCQHLPFILEVHSRTGKHVIAHADYPDDVYEWQKDVDLHQVLWSRSRLGERQKGQGITGADHFWFGHTPLRHRVDIGNLHYIDTGAVFGGELTLVQLQ

SEQ ID NO: 8318 - DNA, 666 bp, Escherichia coli; 0157:H7
  CDS (1)..(666)
atgaatatctacgaaagaattgatggcagcaaataccgaaatatttgggtagttggcgatctgcacggatgctacacgaacctgatgaaaaaactggagacgataggattcgacaccaaaaaagacctgcttatctcggtgggcgatttggttgatcgcggtacagagaacgtagaatgcctggaattaatcacattcccctggttcagagctgtacgtggaaaccatgagcaaatgatgattgatggcttatcagagcgtggaaacgtcaatcactggctgcttaatggcggtggctggttctttaatctcgattacgacaaagaaattctggctaaagctcttgcccataaagcagatgaacttccgttaatcatcgaactggtgagtaaaggaaaaaaatatgtcatctgccacgccgattatccttgtgataaatacgagtttggaaagccagttgatcatcagcaggtaatctggaaccgcgaacgaatcagcaactcacaagacgggatcgtgaaagaaatcaaaggcgcggacacgttcatctttggtcatacgccagcagtgaaaccactcaaatttgccaaccagatgtatatcgatactggcgcagtgttctgcggaaacctcacattgattcaggtacagggagaaggcgcatga

SEQ ID NO: 8319 - protein, 221 aa, Escherichia coli; 0157:H7
MNIYERIDGSKYRNIWVVGDLHGCYTNLMKKLETIGFDTKKDLLISVGDLVDRGTENVECLELITFPWFRAVRGNHEQMMIDGLSERGNVNHWLLNGGGWFFNLDYDKEILAKALAHKADELPLIIELVSKGKKYVICHADYPCDKYEFGKPVDHQQVIWNRERISNSQDGIVKEIKGADTFIFGHTPAVKPLKFANQMYIDTGAVFCGNLTLIQVQGEGA

SEQ ID NO: 8320 - DNA, 660 bp, Escherichia coli O157:H7 EDL933
  CDS (1)..(660): transl_table=11
ttgatgaaacagcctgcgcccgtttatcagagaattgcgggtcatcaatggcgacatatctggctttctggcgatatacacggttgtcttgagcagttgcgccgcaaattatggcattgtcgttttgatccgtggcgagatttacttatctcagtgggagacgttatcgatcgtgggccgcaaagtttacgttgtctgcagttactggaacaacattgggttcgtgcggtaagaggcaatcatgaacagatggcgatggatgcgctggcatcccagcagatgtctttgtggttgatgaatggcggcgactggtttattgcgctggcagataatcaacagaaacaagcgaaaacggcgctggaaaaatgtcagcatttgccctttattcttgaagtacacagccgcaccggcaaacatgttattgctcatgccgattatccagatgatgtttatgaatggcaaaaggacgttgatttgcatcaggtcttgtggagccgctcgcgattaagtgaacgccaaaaagggcagggaattacaggtgctgatcatttctggtttggtcatacaccgttgcgccatcgcgtggatattggcaacctgcattatattgataccggcgctgtctttgggggcgaactgactttcgtgcaattgcaataa

SEQ ID NO: 8321 - protein, 219 aa, Escherichia coli O157:H7 EDL933
MMKQPAPVYQRIAGHQWRHIWLSGDIHGCLEQLRRKLWHCRFDPWRDLLISVGDVIDRGPQSLRCLQLLEQHWVRAVRGNHEQMAMDALASQQMSLWLMNGGDWFIALADNQQKQAKTALEKCQHLPFILEVHSRTGKHVIAHADYPDDVYEWQKDVDLHQVLWSRSRLSERQKGQGITGADHFWFGHTPLRHRVDIGNLHYIDTGAVFGGELTFVQLQ

SEQ ID NO: 8322 - DNA, 708 bp, Listeria monocytogenes EGD-e
  CDS (1)..(708): transl_table=11
atgaagccaatttttgctgtaggagatgtacacggagagattacgcttttagacgaattactcgaaaactgggataaagagcgagaacggcttttgtttgtaggagatttgattgaccgcggcgaaaacccagctgcagtacttagaagagtgaaagcattagctgaccaaacaggagccattgtcttaaaaggaaaccacgaacaaatgctactagattttctcgaaaatccttctgggaaaatgcattattatttaagtcaaggtggaatggaaacgattcaatctttaatcgcggactctttagataaaaaaatgacgccggagggattagcaaagcgggtaaaagaagaagcttctgaactcattgatttcattcggaaattgccgctctattatgaagaaggcaaatatgtatttgtgcatgcaggtgtagatttgacgaaaaaagattggcatgatactgaggagcgtgattttttctggattcgcgaacctttcttatttggacagaataaaacggggaaagtctttattttcggacataccccggtacaaaatttacatattgatgaaagttctggtatttgggtttcggaagataaaacgagacttgatattgatggtggtgcggtttttggcggagaacttcacggagtagtcgttgaagaaaaagtcatcacaaaaagtttttctgtaaaaaaataa

SEQ ID NO: 8323 - protein, 235 aa, Listeria monocytogenes EGD-e
MKPIFAVGDVHGEITLLDELLENWDKERERLLFVGDLIDRGENPAAVLRRVKALADQTGAIVLKGNHEQMLLDFLENPSGKMHYYLSQGGMETIQSLIADSLDKKMTPEGLAKRVKEEASELIDFIRKLPLYYEEGKYVFVHAGVDLTKKDWHDTEERDFFWIREPFLFGQNKTGKVFIFGHTPVQNLHIDESSGIWVSEDKTRLDIDGGAVFGGELHGVVVEEKVITKSFSVKK

SEQ ID NO: 8324 - DNA, 726 bp, Pseudomonas putida KT2440
  CDS (1)..(726): transl_table=11
atggcacggtttcggcggatgatcgccaatatccggggacgggatctggccgtaggcgatatccatggccacttccagcgcctgcaacaatgcctggatgcggtagggttcgatccggcggtggaccgcctgttcagcgtgggtgacctggtcgaccgtgggccgcacagcgaggcagcgttggaatggctggcccagccttggttccatgccgtccagggcaatcatgaggccttggcaatcacccgcgtgcgcggtgggcggctcgacctgggcatgtaccgcgccgccgggggtggttggttccttgacttgccgcggcgcgagcaactgcgtttcgtggagcgtttcgagcagttgccgattgccatggaagtggagagtgcagacggtctggtaggcctgctgcatgcagacagcccgtttgccgactggacagacttacgctcctggctggaactggatgacgaccctgaagtgcgccaagtgtgccagtggtcgcgtcggcgcctgaaagagggggacacccaaccggtgcagggcctgcgagccctgctggtcggccacaccccggtgctggaggccaagctgctgggcaatgtgtggcacctggacacggggggctgggccagcggccatttcaccttggtcgacatgcgcaccttgcaacaagtcagccccgggccagatgcagcaacaacgcccccgccaacatcaccagcatga

SEQ ID NO: 8325 - protein, 241 aa, Pseudomonas putida KT2440
MARFRRMIANIRGRDLAVGDIHGHFQRLQQCLDAVGFDPAVDRLFSVGDLVDRGPHSEAALEWLAQPWFHAVQGNHEALAITRVRGGRLDLGMYRAAGGGWFLDLPRREQLRFVERFEQLPIAMEVESADGLVGLLHADSPFADWTDLRSWLELDDDPEVRQVCQWSRRRLKEGDTQPVQGLRALLVGHTPVLEAKLLGNVWHLDTGGWASGHFTLVDMRTLQQVSPGPDAATTPPPTSPA

SEQ ID NO: 8326 - DNA, 660 bp, Escherichia coli CFT073
  CDS (1)..(660): transl_table=11
ttgatgaaacagcctgcgcccgtttatcagagaattgcgggtcatcaatggcgacatatctggctttcaggcgatatacacggttgtcttgagcagttgcgccgcaaattatggcattgtcgttttgatccgtggcgagatttacttatctcagtgggagacgttatcgatcgtgggccgcaaagtttacgttgcctgcagttactggaacaacattgggttcgtgcggtaagaggcaatcatgaacagatggcgatggatgcgctggcatcccggcagatgtctttatggttgataaatggcggcgactggtttattgcgctggcagataatcaacagaaacaagcgaaaacggcgctggaaaaatgtcagcatttgccctttattcttgaattacacagtcgcaccggcaaacatgttattgctcatgccgattatccagatgatgtctatgaatggcaaaaggacgtcgatttgcatcaggtcttgtggagccgctcgcgattaggtgaacgccaaaaagggcagggaattgcaggtgctgatcatttctggtttggtcatacacctttgcgccatcgcgtggatattggcaacctgcattatattgataccggtgctgtctttgggggagaactgactcttgtgcaattgcaataa

SEQ ID NO: 8327 - protein, 219 aa, Escherichia coli CFT073
MMKQPAPVYQRIAGHQWRHIWLSGDIHGCLEQLRRKLWHCRFDPWRDLLISVGDVIDRGPQSLRCLQLLEQHWVRAVRGNHEQMAMDALASRQMSLWLINGGDWFIALADNQQKQAKTALEKCQHLPFILELHSRTGKHVIAHADYPDDVYEWQKDVDLHQVLWSRSRLGERQKGQGIAGADHFWFGHTPLRHRVDIGNLHYIDTGAVFGGELTLVQLQ

SEQ ID NO: 8328 - DNA, 657 bp, Escherichia coli CFT073
  CDS (1)..(657): transl_table=11
atgccatctacgcgctatcaaaaaatcaatgcccatcactatcgccatatatgggccgttggtgatattcatggtgactatcaattattacaatcccgcttacatcaactctctttttgtcctgaaaccgacttacttatttctgtcggcgataacattgatcatgggccggagagtcttaacgtgctgcgcctgttaaaccagccctggtttacatcggctaaaggcaaccacgaagcgatggcgcttgaggcattcgaaactggcgatggaaatatgtggcttgccagcggtggtgactggtttttcgatttaaatgattcagagcaacaagaggcaatagatctgttgctgaaattccatcaccttccacatattattgaaatcactaacgacaccataaaatatgtcatcgcacatgcagattatccggggaaggagtatcagtttggcaaagaaatagcggagagcgaattactctggcctgttgatcgtgtgcagaaatcacttaatagcgaattacaaaaaataaacggcgccgacttctttatatttggtcatatgatgtttgataacattcagacgttcgctaaccagatttatatagataccggatcgccgaaaagcgggcggctgtcattttataaaataaagtag

SEQ ID NO: 8329 - protein, 218 aa, Escherichia coli CFT073
MPSTRYQKINAHHYRHIWAVGDIHGDYQLLQSRLHQLSFCPETDLLISVGDNIDHGPESLNVLRLLNQPWFTSAKGNHEAMALEAFETGDGNMWLASGGDWFFDLNDSEQQEAIDLLLKFHHLPHIIEITNDTIKYVIAHADYPGKEYQFGKEIAESELLWPVDRVQKSLNSELQKINGADFFIFGHMMFDNIQTFANQIYIDTGSPKSGRLSFYKIK

SEQ ID NO: 8330 - DNA, 651 bp, Salmonella enterica subsp. enterica serovar Typhi Ty2
  CDS (1)..(651): transl_table=11
atgatgcggcctgaagagatttatcagcgaatagaggcaaagaattggcggcatgtctgggtggtcggcgatattcacggctgtttttcaatgttaatgaaaaggttacgtgagtgtcaatttgatccgcaacaagacttgttagtttctgtgggcgatctcattgatagaggcccggacagcctgggttgcctggctttactgcgtgagtcctggatgacggcggttcgcggcaatcatgaacaaatggcgctggatgcgcgggcctcatcgcagtcgacgctgtggttgatgaatggtggcgactggtttacccgcctgacggctgaacacgctgcgcaagctgaagcgctttttattctttgtcagcggctgccctggatactggaagttcgctgccgccatagcacgcatgtgatcgctcatgcagattatccagcgtcaacctatcaatggcaaaaaaaggtcgacttacatcaggttctctggagccgcgaacggctcataaataagcgcggcgggattagcggagccgatcatttttggtttggccatacgccgttgcgtcggcgcatggatttcgccaacatacactatattgatacgggcgcggtatttggcgggcaattgacgttagcgcggatacaatag

SEQ ID NO: 8331 - protein, 216 aa, Salmonella enterica subsp. enterica serovar Typhi Ty2
MMRPEEIYQRIEAKNWRHVWVVGDIHGCFSMLMKRLRECQFDPQQDLLVSVGDLIDRGPDSLGCLALLRESWMTAVRGNHEQMALDARASSQSTLWLMNGGDWFTRLTAEHAAQAEALFILCQRLPWILEVRCRHSTHVIAHADYPASTYQWQKKVDLHQVLWSRERLINKRGGISGADHFWFGHTPLRRRMDFANIHYIDTGAVFGGQLTLARIQ

SEQ ID NO: 8332 - DNA, 657 bp, Salmonella enterica subsp. enterica serovar Typhi Ty2
  CDS (1)..(657): transl_table=11
atggaattaattcgttatgctgacatcaacagcgttctctatcgccacatttgggtcgttggtgatattcatggatgttactccttattgttaaccagactggctcaattaaatttctctcctgataccgatctcttgatctccactggagataacattgatcgaggaaaagaaaaccttgaaacactgagactgttaaatacctcatggtttatttctgtagtgggtaatcatgaagctatggcgcttgacgcttttgaaacacaggatggcaatttctggtatgtaaacggtggttactggtacgactcggtcacccaaaaagacaggcaagaagccactgagctattactaacttttaagcagcgtcctcacatcatagaggttaaaacgtcctcaaagaagtacgtgattgcccatgccgattatccagatgacagctacgattatgggaagcaagttgatattgatagcgttctatggtcacgcgatcgtctgcttagttcgttacaggggaatatccatccaatacgcggtgcggatactttcatcttcggccatatgattgttgattacacaacaacattcgccaatcaaatctacattgacaccggttctttctgttcaggcaatctgtctttttttaaaataaagtag

SEQ ID NO: 8333 - protein, 218 aa, Salmonella enterica subsp. enterica serovar Typhi Ty2
MELIRYADINSVLYRHIWVVGDIHGCYSLLLTRLAQLNFSPDTDLLISTGDNIDRGKENLETLRLLNTSWFISVVGNHEAMALDAFETQDGNFWYVNGGYWYDSVTQKDRQEATELLLTFKQRPHIIEVKTSSKKYVIAHADYPDDSYDYGKQVDIDSVLWSRDRLLSSLQGNIHPIRGADTFIFGHMIVDYTTTFANQIYIDTGSFCSGNLSFFKIK

SEQ ID NO: 8334 - DNA, 735 bp, Bordetella pertussis Tohama I
  CDS (1)..(735): transl_table=11
atggccccgaacctgcagtaccccgctttcctgcgcctgccgcgcaaccccgccggacgcgacttcgccgtgggcgatatccatggccatttctcccgcctcgagcaggcgctggacgaatgcggcttcgatccgcggcgcgaccgcctgttctcggtgggagacctgatagaccgggggccggacagcgaggccgcggtgcaatggctggcgcatccgtggttctacgccgtgcagggcaaccacgaggactatgccatccgccatgtgcgcaccggcctggtcgaccaggacaattggcgcagctatggcggcggctggtttctcgatgccgcgcccgagcgccagcgcgcctgggccggcgcgttcgcggccttgccggtggtgatcgaggtggcgacgcaggccggcccggtgggcttgctgcacgccgattgcccggtgcgggactggagccggctcgagtatttcctgcaggcgcggcccaagcgggcgcgctcggtctgccagtggtcgcgcgagcggctggccagcggcgacgcgcgcggcgtggacggcatccgcgccgtggtggcgggccatacgccggtcagcgagcccgtggtgctgggcaatgtctatcacatcgacacccagggctggcgtccgcatggctatttcaccttgttcgacctctgtacgctgagcgcctggccgcgcccggcgcaggccggcgcgccggccgcgcgcggctga

SEQ ID NO: 8335 - protein, 244 aa, Bordetella pertussis Tohama I
MAPNLQYPAFLRLPRNPAGRDFAVGDIHGHFSRLEQALDECGFDPRRDRLFSVGDLIDRGPDSEAAVQWLAHPWFYAVQGNHEDYAIRHVRTGLVDQDNWRSYGGGWFLDAAPERQRAWAGAFAALPVVIEVATQAGPVGLLHADCPVRDWSRLEYFLQARPKRARSVCQWSRERLASGDARGVDGIRAVVAGHTPVSEPVVLGNVYHIDTQGWRPHGYFTLFDLCTLSAWPRPAQAGAPAARG

SEQ ID NO: 8336 - DNA, 723 bp, Chromobacterium violaceum ATCC 12472
  CDS (1)..(723): transl_table=11
atgatgatcaggaaactgccgcgcaacacgcaaggccgggactgggtggtcggcgacgttcacggctgcttcgcccaactggcccggctgctcaagatcatcgccttcgatcccgcccgcgaccgcctgctatccgtcggcgacctggtggatagggggccggacagcgcgatggtcggcgaatggctggcccagccgtggtttcacgccgtgcgaggcaatcacgagcaaatggcgctggacgcgatgcgggatcccctgcgcgacctggagcgtcatctgcgcaacggcggccgctggctgacggaattgtctcccgccgagcgcgacgcctgcgtggccgccctgtccggcttgccgctggcgctggaggtggacaccgagggcggcaagataggcgtgctccacgccgactgccccggcaacgactggaccgcgatggccgcgaggctggaagccggccagcccgccgcgcaagacagcgatgtgctgctgtgggcgcgcgaccgcgtgcaaaacggcggcggcggcgccgcggccggcgtggagctggtgctggccggacacacgccgcaaccccgcgccatcctgtacgacaatgtgatgcacctggacaccggcgccgtctacggcggcaagctcaccgtgttctgccttcaggatttcgtcgaagtgtcgctgccgtccggtttcgagcacctggcccgcttcgagctgcattga

SEQ ID NO: 8337 - protein, 240 aa, Chromobacterium violaceum ATCC 12472
MMIRKLPRNTQGRDWVVGDVHGCFAQLARLLKIIAFDPARDRLLSVGDLVDRGPDSAMVGEWLAQPWFHAVRGNHEQMALDAMRDPLRDLERHLRNGGRWLTELSPAERDACVAALSGLPLALEVDTEGGKIGVLHADCPGNDWTAMAARLEAGQPAAQDSDVLLWARDRVQNGGGGAAAGVELVLAGHTPQPRAILYDNVMHLDTGAVYGGKLTVFCLQDFVEVSLPSGFEHLARFELH

SEQ ID NO: 8338 - DNA, 738 bp, Vibrio vulnificus YJ016
  CDS (1)..(738): transl_table=11
atggaatttaagcatcggtttatcgatggaagccgatatcaacggatttttgtgattggtgatatccacggaaaattggccttgttgcaggacacactaaaacgagtggattttcacggtgaacgtgatctgttgatttccgtcggtgatctgattgatcgcggccccgactcggttggcgtcttggatttctatcaaacgcatcattggtttgaagcggtgatgggaaaccatgaatggatgatggtcaacgcgttggatgcacaaaacaaattggagcgttcagagaaggaagcgtacttcattaaaatatggcatcgaaatggctgtgaatggtcacaaaatctaaccgatgctgaaaaacagaggttgcgggatgcggttgcccaactgccaagcgtgattacggtggagttggaagatggccgccgctttggcatttcacatgctcagccgcactcactagattggaacgaaatgatcgattggcaaggggatatgtgggacaaccctcgctggatttggggaagaacgcgcattgcggaagatcagccacaagcgattgctaatgttgatttaacactacacggccacactcgcagtgaaggggtgaaaagagtggccaatagtctttttattgataccgcctccaatgacgactatcagggcgcattcagcctttatgaactgcgtacaggtgaggtttttgttggggtaaaacagagcgcactcgtttaa

SEQ ID NO: 8339 - protein, 245 aa, Vibrio vulnificus YJ016
MEFKHRFIDGSRYQRIFVIGDIHGKLALLQDTLKRVDFHGERDLLISVGDLIDRGPDSVGVLDFYQTHHWFEAVMGNHEWMMVNALDAQNKLERSEKEAYFIKIWHRNGCEWSQNLTDAEKQRLRDAVAQLPSVITVELEDGRRFGISHAQPHSLDWNEMIDWQGDMWDNPRWIWGRTRIAEDQPQAIANVDLTLHGHTRSEGVKRVANSLFIDTASNDDYQGAFSLYELRTGEVFVGVKQSALV

SEQ ID NO: 8340 - DNA, 1131 bp, Strongylocentrotus purpuratus
  CDS (1)..(1131)
atggatgaggaaataggggacattcaaaggactactgaagataacaggttagctagagatggccagatagctgaagaagacaagacagctaaatatagacaaatcactgaaggtgaccggatggccatagatgaagagacaactaaagaggaccagaaagtttcagtagaccagttagcaagagatgaccaggtagttgtagaagatgagataggtcaaggagatgacgtggcaggacatgacgcgaaagcagaggataaaatgataaatgaagaagaatacatttcagaactttgcagaaaatattctgcagacagaccaatacctgaagaggaagcggaactcttcctcaaagagttgacctttcctataccaaccaaacctcatctcaccctgagcgaagatgatgttgctggcaagagaatcttcgtgattggtgatgttcacggttgctatgataacctcctaactctcctgcacgttgctgatattgacaagaaccccaatgcgctgctgatttttgtcggagacatcatcaacaaaggtcccaagagtttggaggttctcaatttcgtccgctcgtcaaactcttactccgtcatgggaaaccacgaacgagctgcagtcaggaaactgcgtctcataaagatgaatgttggatacgagccaaaggcctccaagcagtggctgcatgacttgaatggaagtgattatgagtacttgcaggagctgccctacaccatcagtatacctagtctcaatgccgtcatcgtccatggaggactcctgccaggtaaacccttggaggaacacacccaagacgagatgctcctgatgaggaacatcatcgtggaaggcaacgagctgaaagctaccaagcacatcagccaagggcagctctggggtgagctctggaaaggtcctcggcatgtctactttggtcaccatgccctagagggactacagaggtacccttacgcaacgggtctagacacgggatgcgtgtaccacggatcactcacaggggtgttccttactggagataagaagttggtgtccgtcaaaaacgagggctgcagaaataaggaagtgatccaatctgaagaaggagatccaggtgcagcgatgtag

SEQ ID NO: 8341 - protein, 376 aa, Strongylocentrotus purpuratus
MDEEIGDIQRTTEDNRLARDGQIAEEDKTAKYRQITEGDRMAIDEETTKEDQKVSVDQLARDDQVVVEDEIGQGDDVAGHDAKAEDKMINEEEYISELCRKYSADRPIPEEEAELFLKELTFPIPTKPHLTLSEDDVAGKRIFVIGDVHGCYDNLLTLLHVADIDKNPNALLIFVGDIINKGPKSLEVLNFVRSSNSYSVMGNHERAAVRKLRLIKMNVGYEPKASKQWLHDLNGSDYEYLQELPYTISIPSLNAVIVHGGLLPGKPLEEHTQDEMLLMRNIIVEGNELKATKHISQGQLWGELWKGPRHVYFGHHALEGLQRYPYATGLDTGCVYHGSLTGVFLTGDKKLVSVKNEGCRNKEVIQSEEGDPGAAM

SEQ ID NO: 8342 - DNA, 657 bp, Mannheimia succiniciproducens MBEL55E
  CDS (1)..(657): transl_table=11
atgactcgacgggattatgaaaaaatcgacggttctgcctatgccaatatttatgcggtcggcgatttacacggttgctatgaattatttatgcgagaacttgaatcggtcaaattcgatactacccgggatctggttatttctgtgggcgacctgattgatcgcggtccgcacagcctgtcctgtttgcggttaattcgtaattcctggtttaaagcggtgaaaggcaaccatgaatgcatggctattgaggggttgctggggcaagacgagcattatcaacggctatggctatataacgcgggagactgggttttatctttaaatccgaccgaacgagccgaagtactggatttacttaaattttgtgctggcttgccgttggttatcgaacttaacgatgaggggtttaaaaccgttatcgctcatgctgattatccttatgatcaataccgttttggccggcccttgacgcaggaacaggcagtatgggagcgcagacggattgaaatgcgcgacgaaacggaaatcaagggcgcggatgcatttatattcggtcacaccccgctgaaacgggtgatgcagctgggcaatcgcctgtatatcgataccggtgccgtatttttcggcaatctgacgttgctcaggttgaaataa

SEQ ID NO: 8343 - protein, 218 aa, Mannheimia succiniciproducens MBEL55E
MTRRDYEKIDGSAYANIYAVGDLHGCYELFMRELESVKFDTTRDLVISVGDLIDRGPHSLSCLRLIRNSWFKAVKGNHECMAIEGLLGQDEHYQRLWLYNAGDWVLSLNPTERAEVLDLLKFCAGLPLVIELNDEGFKTVIAHADYPYDQYRFGRPLTQEQAVWERRRIEMRDETEIKGADAFIFGHTPLKRVMQLGNRLYIDTGAVFFGNLTLLRLK

SEQ ID NO: 8344 - DNA, 642 bp, Syntrophus aciditrophicus SB
  CDS (1)..(642): transl_table=11
atgggacggatctttgctgtcggggatatccatggctgtctggaccagctgaaagagatgatctccctgctggacatcgacaggaatcaggacaccctggtctttatcggcgattatatcgatcgggggcctgattcgaaaggcgtcctggatttcatcctcgagctgaaaaaagagatgaaaaccgtggtctgcctccggggcaatcacgaggagatgtttctcgacttctatctggaacagaaaaacggacctctgtttctgctgaacggcggccggaacacactctcatcctacgggatgaagaaaacagatcaaggatatgcagccagactgccggatgcgcatcttcattttttaaagacgcttcccctttattttgaagccggaaattttctttttgtccatgccgggctgcggcccggcattcctctgaaacagcaggatcctcacgatctgctgtggatccgggatgaatttttcctttcccatgccgattttcccagggtcgtggtgttcggccatacgccttttcctcggccttttctgatggagaataaaatcggcatcgacacgggggcggtctacgggggacaactgacctgtgttcgacttccggacgggcggttctatcaggtatag

SEQ ID NO: 8345 - protein, 213 aa, Syntrophus aciditrophicus SB
MGRIFAVGDIHGCLDQLKEMISLLDIDRNQDTLVFIGDYIDRGPDSKGVLDFILELKKEMKTVVCLRGNHEEMFLDFYLEQKNGPLFLLNGGRNTLSSYGMKKTDQGYAARLPDAHLHFLKTLPLYFEAGNFLFVHAGLRPGIPLKQQDPHDLLWIRDEFFLSHADFPRVVVFGHTPFPRPFLMENKIGIDTGAVYGGQLTCVRLPDGRFYQV

SEQ ID NO: 8346 - DNA, 759 bp, Burkholderia xenovorans LB400
  CDS (1)..(759): transl_table=11
atgccgcattatcatggactcatggcttccgtactcgtcaatcccgttgaacatcacccggccaaccggagcggtcgcgacttcgtggtcggcgatctgcatggctgcgtcgatgcattgcgctatctgctgcgcgtgattacgttcgacccggcgcgtgaccggctcttttcggtcggcgatctggtggaccgcggcgagcattccgaactcgctttggccctgctcgacaagccgtggttttttgccgtgctcggcaatcacgaagacatgctgtgcgccgtcgccgatggacgcgtgcggcgccagtggtggtatggcatcggcggtctatgggcggcgcaattatccgacgaacgcttgcagcactacgcggaggttttgcgcggcttgccgctcgcgcgcgtggtcggcagcggcaaggagcgtttcaacgtgcttcacgcggaattcttcggcacggacgccgaactcgacgcggggaatttctccgccgaaacccgccagcaattgctgtggggacgcgaactggcgctgggcaatggcgatccgcagcggcagcgcggactctcgctgacctattgcggccacacgccgatgcgcgacatcaagcaggtcggctcgcaggtgtttatcgacaccggcgcgttcgggccgggcggcaagctcacgatcgtggagccgctggcgttgcgccgctggtcgatctcggtcgaagaggcccgcgcggaaggcgcggcagcgctggcgctgccttga

SEQ ID NO: 8347 - protein, 252 aa, Burkholderia xenovorans LB400
MPHYHGLMASVLVNPVEHHPANRSGRDFVVGDLHGCVDALRYLLRVITFDPARDRLFSVGDLVDRGEHSELALALLDKPWFFAVLGNHEDMLCAVADGRVRRQWWYGIGGLWAAQLSDERLQHYAEVLRGLPLARVVGSGKERFNVLHAEFFGTDAELDAGNFSAETRQQLLWGRELALGNGDPQRQRGLSLTYCGHTPMRDIKQVGSQVFIDTGAFGPGGKLTIVEPLALRRWSISVEEARAEGAAALALP

SEQ ID NO: 8348 - DNA, 780 bp, Alkalilimnicola ehrlichei MLHE-1
  CDS (1)..(780): transl_table=11
atggctcgacaccagaccatcattgagcggttgccgcctaaccaccagcgccgggactgggtggtcggtgacctgcacggttgccgttccctgctcaatgaggggttgcaacgggtcgacttcaacccggaagggggcgaccgtctgctgtgcgtgggcgatctgaccgaccgggggccggagtcggtggcctgcctggaactgctgctggcgtcctggttccacagcgtacggggcaatcacgacgatatgatccgggactggctggaggcaccgcccgggtccctgcgcaggatcgaggcggcccacctgttgctggccaacggcgccgacacctgggcgcaggacctgctgctcgatcccgaccccgcggaccacccgctgatgcccctgctccacatgcaggccgagttgccccatgtgctggtggtgggcagcggcgccgggcgctttcaactggtccatgccgaactggtgagtccgggggcgccacaggggctgctgagtgacgccgacatcgacgccggcctgcccggcgtcgacccgacgccgctgctctggtcccgacggctcatggggcggctgcgcagccccctgcccgagcgcagtgaatcgctgtccaccacttattgcggccacaccgtcggtcgcaccctccgccggcgcctgtcccacgtctgcctggataccggggccttcgtgcgggtgacccgcggcaccaccgacttcgggctgacgctggtcaacccgcagagcggtgaggtggtgttcgtgccctag

SEQ ID NO: 8349 - protein, 259 aa, Alkalilimnicola ehrlichei MLHE-1
MARHQTIIERLPPNHQRRDWVVGDLHGCRSLLNEGLQRVDFNPEGGDRLLCVGDLTDRGPESVACLELLLASWFHSVRGNHDDMIRDWLEAPPGSLRRIEAAHLLLANGADTWAQDLLLDPDPADHPLMPLLHMQAELPHVLVVGSGAGRFQLVHAELVSPGAPQGLLSDADIDAGLPGVDPTPLLWSRRLMGRLRSPLPERSESLSTTYCGHTVGRTLRRRLSHVCLDTGAFVRVTRGTTDFGLTLVNPQSGEVVFVP

SEQ ID NO: 8350 - DNA, 657 bp, Escherichia coli
  CDS (1)..(657): transl_table=11
atgccatctacacgctatcaaaaaatcaatacccatcactatcgccatatatgggtcgttggtgatattcatggtgaatatcagttattacaatcccgcttacatcaactctcttttttccccgaaaccgacttacttatttctgtcggcgataatattgatcgtgggccggagagtcttaacgtcctgcgcctgctaaaccagccctggtttatctccgttaaaggcaaccacgaagcaatggcgctggatgcgttcgccaccggcgatggcaatatgtggcttgccagcggtggtgactggtttttcgatttaaatgattcagagcaaaaagaagctacagatctgttgctgaaattccatcaccttccacatattattgaaatcactaacgacaacataaaatatgtcatcgcacatgcagattatccggggagtgaatgtctctttggtaaagaaatagcggagagcgaattactctggcctgttgatcgtgtgcagaaatcgcttaatggcgagttacaacaaataaacggcgctgattattttatatttggacatatgatgtttgataacattcagacgttcgctaaccagatttatattgataccggatcgccgaaaagcgggcggctgtcattttataaaataaagtaa

SEQ ID NO: 8351 - protein, 218 aa, Escherichia coli
MPSTRYQKINTHHYRHIWVVGDIHGEYQLLQSRLHQLSFFPETDLLISVGDNIDRGPESLNVLRLLNQPWFISVKGNHEAMALDAFATGDGNMWLASGGDWFFDLNDSEQKEATDLLLKFHHLPHIIEITNDNIKYVIAHADYPGSECLFGKEIAESELLWPVDRVQKSLNGELQQINGADYFIFGHMMFDNIQTFANQIYIDTGSPKSGRLSFYKIK

SEQ ID NO: 8352 - DNA, 732 bp, Salmonella typhimurium
  CDS (54)..(704): transl_table=11
ctgcacacgctatctttttatatctgtcctggataatgaacgacaggaaaaacatgatgcggcctgaagagatttatcagcgaatagaggcaaagaattggcggcatgtctgggtggttggcgatattcacggctgtttttcaatgttaatgaaaaggttacgtgagtgtcgatttgatccgcaacaagacttgttagtttctgtgggcgatctcattgatagaggcccggacagcctgggctgcctggctttactgcgtgagtcctggatgacggcggttcgcggcaatcatgaacaaatggcgctggatgcgcgggcctcatcgcagtcgacgctgtggttgatgaatggtggcgactggtttacccgcctgacggctgaacacgctgcgcaagctgaagcgctttttattctttgtcagcggctgccctggatactggaagttcgttgccgccatagcacgcatgtgatcgctcatgcagattatcccgcgtcaacctatcaatggcaaaaaaaggtcgacttacatcaggttctctggagccgcgaacggctcataaataagcgcggcgggattagcggagccgatcatttttggtttggccatacgccgttgcgtcggcgcatggattttgccaacgtacactatattgatacgggcgcggtatttggcgggcaattgacgttagcgcggatacaatagcggtatcagcgaccagggttaaaaatcg

SEQ ID NO: 8353 - protein, 216 aa, Salmonella typhimurium
MMRPEEIYQRIEAKNWRHVWVVGDIHGCFSMLMKRLRECRFDPQQDLLVSVGDLIDRGPDSLGCLALLRESWMTAVRGNHEQMALDARASSQSTLWLMNGGDWFTRLTAEHAAQAEALFILCQRLPWILEVRCRHSTHVIAHADYPASTYQWQKKVDLHQVLWSRERLINKRGGISGADHFWFGHTPLRRRMDFANVHYIDTGAVFGGQLTLARIQ

SEQ ID NO: 8354 - DNA, 657 bp, Escherichia coli
  CDS (1)..(657): transl_table=11
atgccatctacacgctatcaaaaaatcaatgcccatcactatcgccatatatgggtcgttggtgatattcatggtgaatatcagttattacaatcccgcttacatcaactctcttttttccccaaaatcgacttacttatttctgtcggcgataatattgatcgtggaccggagagtcttgacgtcctgcgcctgctaaaccaaccctggtttacgtcggttaaaggcaaccacgaagcgatggcgcttgaggcattcgaaactggcgatggcaatatgtggcttgccagcggtggtgactggtttttcgatttaaatgattcagagcaacaagaggcaatagatctgttgctgaaattccatcaccttccacatattattgaaatcactaacgacaacataaaatatgccatcgcacatgcagattatccggggagtgaatatctctttggtaaagaaatagcggagagcgaattactctggcctgttgatcgtgtgcagaaatcgcttaatggcgagttacaacaaataaacggcgctgattattttatatttggacatatgatgtttgataacattcagacgttcgctaaccagatttatattgataccggatcgccgaacagcgggcggctgtcattttataaaataaagtag

SEQ ID NO: 8355 - protein, 218 aa, Escherichia coli
MPSTRYQKINAHHYRHIWVVGDIHGEYQLLQSRLHQLSFFPKIDLLISVGDNIDRGPESLDVLRLLNQPWFTSVKGNHEAMALEAFETGDGNMWLASGGDWFFDLNDSEQQEAIDLLLKFHHLPHIIEITNDNIKYAIAHADYPGSEYLFGKEIAESELLWPVDRVQKSLNGELQQINGADYFIFGHMMFDNIQTFANQIYIDTGSPNSGRLSFYKIK

SEQ ID NO: 8356 - DNA, 735 bp, Salmonella typhimurium
  CDS (36)..(692): transl_table=11
aataccagactccaaaattgtgctataggaacatcatggaattaattcgttatgctgacatcaacagcgatctctatcgccacatttgggtcgttggtgatattcatggatgttactccttattgttaaccagactggctcaattaaatttctctcctgataccgatctcttgatctccactggagataacattgatcgaggaaaagaaaaccttgaaacactgagactgttaaataccccatggtttatttctgtagtgggtaatcatgaagctatggcgcttgacgcttttgaaacacaggatggcaatttctggtatgtaaacggtggttactggtacgactcggtcaccgaaaaagacaggcaagaagccactgagctattactaacttttaagcagcgtcctcacatcatagaagttgaaacgtcctcaaagaagtacgtgattgcccatgccgattatccagatgacagctacgattatgggaagcaagttgatattgatagcgttctatggtcacgcgatcgtctgcttggttcgttacaggggaatatccatccaatacgcggtgcggatacttttatcttcggccatatgattgttgactacacaacaacattcgccaatcaaatctacattgacaccggttctttctgttcaggcaatctgtctttttttaaaataaagtaatctggaaatagaattatataatatcaaccctccctgcattatg

SEQ ID NO: 8357 - protein, 218 aa, Salmonella typhimurium
MELIRYADINSDLYRHIWVVGDIHGCYSLLLTRLAQLNFSPDTDLLISTGDNIDRGKENLETLRLLNTPWFISVVGNHEAMALDAFETQDGNFWYVNGGYWYDSVTEKDRQEATELLLTFKQRPHIIEVETSSKKYVIAHADYPDDSYDYGKQVDIDSVLWSRDRLLGSLQGNIHPIRGADTFIFGHMIVDYTTTFANQIYIDTGSFCSGNLSFFKIK

SEQ ID NO: 8358 - DNA, 22 bp, Artificial sequence
  primer
atgatgaaacagcctgcgcccg

SEQ ID NO: 8359 - DNA, 25 bp, Artificial sequence
  primer
ttattgcaattgcacaagagtcagt

SEQ ID NO: 8360 - protein, 245 aa, Artificial sequence
  consensus sequence
  Variant (3)..(3): Xaa in position 3 is any amino acid
  Variant (6)..(9): Xaa in position 6 to 9 is any amino acid
  Variant (11)..(13): Xaa in position 11 to 13 is any amino acid
  Variant (15)..(18): Xaa in position 15 to 18 is any amino acid
  Variant (20)..(21): Xaa in position 20 to 21 is any amino acid
  Variant (22)..(24): Xaa in position 22 to 24 is any or no amino acid
  Variant (26)..(26): Xaa in position 26 is any amino acid
  Variant (28)..(28): Xaa in position 28 is any amino acid
  Variant (33)..(34): Xaa in position 33 to 34 is any amino acid
  Variant (38)..(39): Xaa in position 38 to 39 is any amino acid
  Variant (41)..(43): Xaa in position 41 to 43 is any amino acid
  Variant (45)..(50): Xaa in position 45 to 50 is any amino acid
  Variant (51)..(55): Xaa in position 51 to 55 is any or no amino acid
  Variant (57)..(59): Xaa in position 57 to 59 is any amino acid
  Variant (61)..(61): Xaa in position 61 is any amino acid
  Variant (66)..(66): Xaa in position 66 is any amino acid
  Variant (68)..(83): Xaa in position 68 to 83 is any amino acid
  Variant (84)..(90): Xaa in position 84 to 90 is any or no amino acid
  Variant (93)..(93): Xaa in position 93 is any amino acid
  Variant (94)..(101): Xaa in position 94 to 101 is any or no amino acid
  Variant (103)..(121): Xaa in position 103 to 121 is any amino acid
  Variant (122)..(127): Xaa in position 122 to 127 is any or no amino acid
  Variant (129)..(143): Xaa in position 129 to 143 is any amino acid
  Variant (144)..(144): Xaa in position 144 is any or no amino acid
  Variant (147)..(163): Xaa in position 147 to 163 is any amino acid
  Variant (164)..(176): Xaa in position 164 to 176 is any or no amino acid
  Variant (178)..(178): Xaa in position 178 is any amino acid
  Variant (180)..(188): Xaa in position 180 to 188 is any amino acid
  Variant (189)..(194): Xaa in position 189 to 194 is any or no amino acid
  Variant (196)..(201): Xaa in position 196 to 201 is any amino acid
  Variant (204)..(213): Xaa in position 204 to 213 is any amino acid
  Variant (215)..(217): Xaa in position 215 to 217 is any amino acid
  Variant (218)..(227): Xaa in position 218 to 227 is any or no amino acid
  Variant (232)..(235): Xaa in position 232 to 235 is any amino acid
  Variant (236)..(244): Xaa in position 236 to 244 is any or no amino acid
GDXHGXXXXLXXXLXXXXFXXXXXDXLXSVGDXXDRGXXSXXXLXXXXXXXXXXXWXXXVXGNHEXMXXXXXXXXXXXXXXXXXXXXXXXGGXXXXXXXXXWXXXXXXXXXXXXXXXXXXXXXXXXXPXXXXXXXXXXXXXXXXHAXXXXXXXXXXXXXXXXXXXXXXXXXXXXXXWXRXXXXXXXXXXXXXXXGXXXXXXGHXXXXXXXXXXNXXXXXXXXXXXXXIDTGXXXXXXXXXXXXXG

SEQ ID NO: 8361 - protein, 29 aa, Artificial sequence
  protein pattern
  Variant (2)..(2): Xaa in position 2 is any or no amino acid
  Variant (4)..(4): Xaa in position 4 is any amino acid
  Variant (5)..(5): Xaa in position 5 is any or no amino acid
  Variant (7)..(7): Xaa in position 7 is Thr or Val
  Variant (10)..(10): Xaa in position 10 is any amino acid
  Variant (11)..(11): Xaa in position 11 is Ile or Val
  Variant (13)..(13): Xaa in position 13 is His or Arg
  Variant (15)..(27): Xaa in position 15 to 27 is any amino acid
  Variant (28)..(28): Xaa in position 28 is any or no amino acid
DXLXXSXGDXXDXGXXXXXXXXXXXXXXW

SEQ ID NO: 8362 - protein, 30 aa, Artificial sequence
  protein pattern
  Variant (3)..(11): Xaa in position 3 to 11 is any amino acid
  Variant (12)..(12): Xaa in position 12 is Ala, Asp, Glu or Gly
  Variant (14)..(16): Xaa in position 14 to 16 is any amino acid
  Variant (17)..(17): Xaa in position 17 is Ile or Leu
  Variant (20)..(24): Xaa in position 20 to 24 is any amino acid
  Variant (25)..(26): Xaa in position 25 to 26 is any or no amino acid
  Variant (28)..(28): Xaa in position 28 is any amino acid
  Variant (29)..(29): Xaa in position 29 is Phe or Leu
  Variant (30)..(30): Xaa in position 30 is Ser or Thr
GHXXXXXXXXXXNXXXXDTXXXXXXXGXXX

SEQ ID NO: 8363 - DNA, 1443 bp, Escherichia coli
  CDS (1)..(1443): transl_table=11
atgtccagaaggcttcgcagaacaaaaatcgttaccacgttaggcccagcaacagatcgcgataataatcttgaaaaagttatcgcggcgggtgccaacgttgtacgtatgaacttttctcacggctcgcctgaagatcacaaaatgcgcgcggataaagttcgtgagattgccgcaaaactggggcgtcatgtggctattctgggtgacctccaggggcccaaaatccgtgtatccacctttaaagaaggcaaagttttcctcaatattggggataaattcctgctcgacgccaacctgggtaaaggtgaaggcgacaaagaaaaagtcggtatcgactacaaaggcctgcctgctgacgtcgtgcctggtgacatcctgctgctggacgatggtcgcgtccagttaaaagtactggaagttcagggcatgaaagtgttcaccgaagtcaccgtcggtggtcccctctccaacaataaaggtatcaacaaacttggcggcggtttgtcggctgaagcgctgaccgaaaaagacaaagcagacattaagactgcggcgttgattggcgtagattacctggctgtctccttcccacgctgtggcgaagatctgaactatgcccgtcgcctggcacgcgatgcaggatgtgatgcgaaaattgttgccaaggttgaacgtgcggaagccgtttgcagccaggatgcaatggatgacatcatcctcgcctctgacgtggtaatggttgcacgtggcgacctcggtgtggaaattggcgacccggaactggtcggcattcagaaagcgttgatccgtcgtgcgcgtcagctaaaccgagcggtaatcacggcgacccagatgatggagtcaatgattactaacccgatgccgacgcgtgcagaagtcatggacgtagcaaacgccgttctggatggtactgacgctgtgatgctgtctgcagaaactgccgctgggcagtatccgtcagaaaccgttgcagccatggcgcgcgtttgcctgggtgcggaaaaaatcccgagcatcaacgtttctaaacaccgtctggacgttcagttcgacaatgtggaagaagctattgccatgtcagcaatgtacgcagctaaccacctgaaaggcgttacggcgatcatcaccatgaccgaatcgggtcgtaccgcgctgatgacctcccgtatcagctctggtctgccaattttcgccatgtcgcgccatgaacgtacgctgaacctgactgctctctatcgtggcgttacgccggtgcactttgatagcgctaatgacggcgtagcagctgccagcgaagcggttaatctgctgcgcgataaaggttacttgatgtctggtgacctggtgattgtcacccagggcgacgtgatgagtaccgtgggttctactaataccacgcgtattttaacggtagagtaa

SEQ ID NO: 8364 - protein, 480 aa, Escherichia coli
MSRRLRRTKIVTTLGPATDRDNNLEKVIAAGANVVRMNFSHGSPEDHKMRADKVREIAAKLGRHVAILGDLQGPKIRVSTFKEGKVFLNIGDKFLLDANLGKGEGDKEKVGIDYKGLPADVVPGDILLLDDGRVQLKVLEVQGMKVFTEVTVGGPLSNNKGINKLGGGLSAEALTEKDKADIKTAALIGVDYLAVSFPRCGEDLNYARRLARDAGCDAKIVAKVERAEAVCSQDAMDDIILASDVVMVARGDLGVEIGDPELVGIQKALIRRARQLNRAVITATQMMESMITNPMPTRAEVMDVANAVLDGTDAVMLSAETAAGQYPSETVAAMARVCLGAEKIPSINVSKHRLDVQFDNVEEAIAMSAMYAANHLKGVTAIITMTESGRTALMTSRISSGLPIFAMSRHERTLNLTALYRGVTPVHFDSANDGVAAASEAVNLLRDKGYLMSGDLVIVTQGDVMSTVGSTNTTRILTVE

SEQ ID NO: 8365 - DNA, 1458 bp, Photobacterium profundum
  CDS (1)..(1458): transl_table=11
atggagtttcaaatgtctgaacaactaagacgtaccaaaatcgtaactacacttggtcctgctactgaccgcgataacaaccttgaaaaaattatcgccgctggagctaacgtagttcgaatgaacttctctcacggtagccctgaagatcatattcaacgtacaaaaatggtacgtgaaattgcagcaaagctaggtaagcatattgctattcttggcgaccttcaaggtccgaaaattcgagtttctacttttaaagacggtaaaatacaattggctatcggtgataagttcacgctagatagtgaccttccaaaaggtgaaggccatcaagatgctgtcggtcttgactataaagagctacccaatgatgttgtgactggcgatcttttacttctagatgatggtcgagttcagttaaaagtaacagcagtgagtggtaataaagtacataccgaagtcaccgttggtggtccgttatctaataacaaaggcatcaataaaaaaggcggtgggctttcagctgaagcactaacagagaaagacaaagccgacattattactgcagcccaaatgggtgtggactaccttgcagtgtcattcccacgtaacggcgaagacatgaagtatgctcgaagcttggcattagatgctggtcttgaagctaagttagtcgctaaagttgagcgtgcagaagccgtagcaacaacagaagcaatggatgacatcatcatggcatctgatgtggtaatggttgctcgtggtgaccttggggttgaaattggtgaccctgagctggttggtgttcagaagaaattaattcgtcgtgctcgtagccttaaccgtaccgtcattactgcaactcaaatgatggagtcaatgattactagcccaatgccaacacgtgcagaagtcatggacgttgctaacgccgtattggatggtacagatgctgtaatgctttcagcagaaacagcagctggtgatttcccagttgaaaccgttcaagcaatgtcgagtgtttgtgtgggtgctgaaaaagagcctagcatcaatgtatccaatcaccgcttaactcgcacatttgcttcgcctgaagaaactatcgcaatgtctaccatgtatgctgcaaaccatatggaaggcgtaaaagcgatggtagcaatgaccgaatctggtcgtacagcattaatgatgtctcgtatctcatctggtttacctattttcgctatgtcacgtaacgaaagtacattgaatcgttcttcactataccgcggtgtaacacctgtctatttcgaccgtgatagcgacgcaggtcttgaagcggctaaacacgcactggttgtgcttaaagagcatggttacttagcaacgggtgatcttgtcattatcacccaaggtgacgtaatggatacgattggttctaccaacaatatgcgtattcttactgttgaataa

SEQ ID NO: 8366 - protein, 485 aa, Photobacterium profundum
MEFQMSEQLRRTKIVTTLGPATDRDNNLEKIIAAGANVVRMNFSHGSPEDHIQRTKMVREIAAKLGKHIAILGDLQGPKIRVSTFKDGKIQLAIGDKFTLDSDLPKGEGHQDAVGLDYKELPNDVVTGDLLLLDDGRVQLKVTAVSGNKVHTEVTVGGPLSNNKGINKKGGGLSAEALTEKDKADIITAAQMGVDYLAVSFPRNGEDMKYARSLALDAGLEAKLVAKVERAEAVATTEAMDDIIMASDVVMVARGDLGVEIGDPELVGVQKKLIRRARSLNRTVITATQMMESMITSPMPTRAEVMDVANAVLDGTDAVMLSAETAAGDFPVETVQAMSSVCVGAEKEPSINVSNHRLTRTFASPEETIAMSTMYAANHMEGVKAMVAMTESGRTALMMSRISSGLPIFAMSRNESTLNRSSLYRGVTPVYFDRDSDAGLEAAKHALVVLKEHGYLATGDLVIITQGDVMDTIGSTNNMRILTVE

SEQ ID NO: 8367 - DNA, 1449 bp, Vibrio vulnificus
  CDS (1)..(1449): transl_table=11
atgactcagccattaagaagaacaaaaatcgtgaccactttaggtccttcaactgacaaagataatgtactagaagaaattattcgagccggcgcgaatgtggtcaggatgaatttttctcacggcagcgcagaggatcataaaactcgcgcagaaaaagtgcgcaatattgccgccagacttggcagacaagtggctattttaggtgatttacaaggcccgaagatccgagtatcaacctttaaagaagggaaaattttcctttcagtgggtgacctcttcactttagacagtgacttgcccaaaggcgaaggcgatcaaaaatcagtgggattagactataaagcactgcctcaggatgtgggaccagaagatattctgctgcttgatgatggacgtgtacaactgcaagtgctgacggtcgatggcaacaaggtgaacactcgtgtgatagtgggcggaccgctgtcaaacaataaaggtatcaataaaaaagggggcggcctctctgctgacgctctaacggaaaaagacaaacaagacatcttgctcgccgccgagatcaaagtcgattatctcgcgatctcctttccacgtaatggtgccgacatggactatgctcgtcgcttggccagagatgccggcttggaagccaaacttgttgccaaagttgaacgagcagaaaccgttcgaaacgatgaaaacatcgacgatattatcatggcttccgatgtcattatggttgctcgtggcgatctaggggtagaaatcggcgatccggaattgatcggtgtacagaaaaaactcatcaaacgagccaaagaactcaatcgtgtcgtcatcacggcaacacaaatgatggaatcgatgattgaaaatccaatgcccactcgagcagaagtcatggacgtagccaacgcggtgctggatggcaccgatgccgtgatgctttcaggggaaaccgccgctggtaaatacccagtcgaaacggtgcgctctatggcagaagtctgcattggggcagaaaaaacgtgggaaccgggcagccagaattatcgcatcgataaatcctttgtcaccgccgaagaaaccattgcaatgtcgacaatctacgccgcaaatcatatggaaggcgtcaaagcgatggtgacgttgactgaatcgggaagaaccgcattaatgacgtcaagattgaactcaacactgcccatttttgcgctttcgcctaatgagcgaacccttaatcgctgctctctctatcgtggcgtcactcccgtattttttgataccaaagtagaaactggatttgatgtcgcaatggccgcattgagcacgcttagaaagaaaaaactgctcgattttggggatttagtgatcatcacacagggggacatcatggatgttgaaggctcgactaactgcatgagaatcctgcctgtttttgactaa

SEQ ID NO: 8368 - protein, 482 aa, Vibrio vulnificus
MTQPLRRTKIVTTLGPSTDKDNVLEEIIRAGANVVRMNFSHGSAEDHKTRAEKVRNIAARLGRQVAILGDLQGPKIRVSTFKEGKIFLSVGDLFTLDSDLPKGEGDQKSVGLDYKALPQDVGPEDILLLDDGRVQLQVLTVDGNKVNTRVIVGGPLSNNKGINKKGGGLSADALTEKDKQDILLAAEIKVDYLAISFPRNGADMDYARRLARDAGLEAKLVAKVERAETVRNDENIDDIIMASDVIMVARGDLGVEIGDPELIGVQKKLIKRAKELNRVVITATQMMESMIENPMPTRAEVMDVANAVLDGTDAVMLSGETAAGKYPVETVRSMAEVCIGAEKTWEPGSQNYRIDKSFVTAEETIAMSTIYAANHMEGVKAMVTLTESGRTALMTSRLNSTLPIFALSPNERTLNRCSLYRGVTPVFFDTKVETGFDVAMAALSTLRKKKLLDFGDLVIITQGDIMDVEGSTNCMRILPVFD

SEQ ID NO: 8369 - DNA, 1440 bp, Haemophilus ducreyi 35000HP
  CDS (1)..(1440): transl_table=11
atgtctagaaaacttagaagaaccaaaattgtttgtacaatggggcctgcaactgatcgtagcaataatttggaaagaattatcgctgcaggagcaaacatggttcgtatgaacttctcacacggcgtgcctgaagaccatattgaacgagcaaataaagttcgtgaaatagctgcacgcttgggtaaacatgttgctattttaggtgacttacaaggtccaaaaattcgtgtatcgacgttcaaagaaggaaaaattttcttaaacataggcgataaatttaccttagatgctgatttacctcgtggtgaaggagatcaacaagtggtcggtttagattataaaaacttacccaacgatgtcgtacccggtgatatccttttattagatgatggtaatgtacaattaaaagttatttctgtagagggtgctaaagtacatactgaagtcacgcttggtggccctttatcaaataataaaggcattaataagttaggcggtggtttatctgctcctgcactaacggaaaaagataaagaagatattaaattagctgcgcgtatcggtgtagattatttagcggtttcatttccacaatctagtcaagacttacactatgcacgtcaattagcagaagaagcgggcttagatgccaaaattgtcgccaaagtagaacgtgctgaaactgtagcaactgaagaagcaatggacgatatcattttaggtgctgatgtggtgatggttgcacgtggtgacttaggtgttgagattggtgatgctgcattagttggcgtacaaaaacgattaattcgtcgtgcaagaaagttaaaccgcgtagtgatcaccgcaactcaaatgatggaatcaatgatcaagaaaccaatgccaacacgtgctgaagtaatggatgtggctaatgccgtgttagatggcactgatgccgtaatgttgtcaggcgaaactgcaagcggtgattaccctgtagaaactgttaaatcaatggcagaagtctgtttaggtgcagaaactatgccaagtattaatatttctcgccaccgcatgcaaggcaaattcgccgccattgatgaagccgttgcaatgtctgcgatgtacacggctaaccatctagaaagcgtttctgcaatcattgcattgactcactccggtgaaacggcaaaattaatgagccgtattagttctggcttaccaatttatgcgctatcacgtaatcaacaagcattaaatcgtaccgcactttatcgtggtgtaacgcccgtatactataacgaagaaagccgtacaatcgaaggagctaaaaaaggtattgcattgctcaaagaaaaaggctatttgatgaccggtgatttagtcttattaacacaaggtagcgaatcaaaagatggcggtactaatacttgtcgaattttaaaagtggaataa

SEQ ID NO: 8370 - protein, 479 aa, Haemophilus ducreyi 35000HP
MSRKLRRTKIVCTMGPATDRSNNLERIIAAGANMVRMNFSHGVPEDHIERANKVREIAARLGKHVAILGDLQGPKIRVSTFKEGKIFLNIGDKFTLDADLPRGEGDQQVVGLDYKNLPNDVVPGDILLLDDGNVQLKVISVEGAKVHTEVTLGGPLSNNKGINKLGGGLSAPALTEKDKEDIKLAARIGVDYLAVSFPQSSQDLHYARQLAEEAGLDAKIVAKVERAETVATEEAMDDIILGADVVMVARGDLGVEIGDAALVGVQKRLIRRARKLNRVVITATQMMESMIKKPMPTRAEVMDVANAVLDGTDAVMLSGETASGDYPVETVKSMAEVCLGAETMPSINISRHRMQGKFAAIDEAVAMSAMYTANHLESVSAIIALTHSGETAKLMSRISSGLPIYALSRNQQALNRTALYRGVTPVYYNEESRTIEGAKKGIALLKEKGYLMTGDLVLLTQGSESKDGGTNTCRILKVE

SEQ ID NO: 8371 - DNA, 1440 bp, Shewanella oneidensis
  CDS (1)..(1440): transl_table=11
atgttccgcagaaccaaaatcgtcaccacactgggtcccgccactgaccgtgacgataacttacgccgtattattgcggcaggtgcaaacgttgttcgtcttaacttctcccacggctcccccgaagatcatctcaaacgcgctactcaagctcgcgaaatcgcaaaagaattaggtgtacatgttgctattttaggtgacctacaaggccctaaaatccgtgtgtctacctttaaagacaacaagaaaattcaactgaaattaggccaaacctatattcttgacgccgaacttgctaaaggtgaaggcgatgagaatcaagtcggtatcgactataagcaattgcctgatgatgtgaatgttggcgacatcctgatgctcgatgacggccgagtacaactgcgtgttgagcgcgttgaaggtcgtaaagtccatactactgtgacggttgcaggtcctttatcgaacaataaagggatcaacaagcaaggtggtggtttgtcggctgcggcactaactgaaaaagacaaggcagacattctcaccgcagctatgatccaagtggattacttagccgtgtcattcccacgtagcggtgcagatctcgaatatgcacgctctttagcgcagcaggctggcagtaacgcactgatcgtcgcgaaggttgaacgtgcagaagcggttgccagtgatgaagcaatggatgatgtgattttagcctctgatgttgtgatggttgcccgcggtgatttaggggttgagattggtgatgctgcactggtagcagtacaaaagaaactcatcgcccgttcacgtcagctcaataaaatcgtcatcaccgcgacccaaatgatggaatcgatgatctcgagcccaatgccaacccgtgcagaagtgatggacgtggcaaacgccgtgcttgatggtaccgacgctgtgatgttatcagccgaaaccgcagcgggtgacttcccagaagaaactgttaaagcaatggcgaatgtgtgtgtcggtgcagaatctcacccaagtgtgaaagtttctaagcacagattagatgcacgtttcacgtcggttgaagaaaccatcgccctatcgactatgtatgcggcaaaccacctagaaggtgttaaagcgattatcgctttaacagagtcaggtgcgacacctaaactgatgtcgcgtatcagttcatctttaccaatccttggcctatctcgccatgacacaacactggcgaagatggctctgtaccgtggtgtactaccgatttacttcgactcaacgatctatccagccgatgagcttgcacaaaaagcattggaatcattaaccaaagcgggttacttgcacagcggtgacttagtgttaatgaccaaaggtgatgcgatggaaaccatcggtggcacgaacacttgtaaagtgctgattgtcgcttaa

SEQ ID NO: 8372 - protein, 479 aa, Shewanella oneidensis
MFRRTKIVTTLGPATDRDDNLRRIIAAGANVVRLNFSHGSPEDHLKRATQAREIAKELGVHVAILGDLQGPKIRVSTFKDNKKIQLKLGQTYILDAELAKGEGDENQVGIDYKQLPDDVNVGDILMLDDGRVQLRVERVEGRKVHTTVTVAGPLSNNKGINKQGGGLSAAALTEKDKADILTAAMIQVDYLAVSFPRSGADLEYARSLAQQAGSNALIVAKVERAEAVASDEAMDDVILASDVVMVARGDLGVEIGDAALVAVQKKLIARSRQLNKIVITATQMMESMISSPMPTRAEVMDVANAVLDGTDAVMLSAETAAGDFPEETVKAMANVCVGAESHPSVKVSKHRLDARFTSVEETIALSTMYAANHLEGVKAIIALTESGATPKLMSRISSSLPILGLSRHDTTLAKMALYRGVLPIYFDSTIYPADELAQKALESLTKAGYLHSGDLVLMTKGDAMETIGGTNTCKVLIVA

SEQ ID NO: 8373 - DNA, 1437 bp, Haemophilus influenzae
  CDS (1)..(1437): transl_table=11
atgtctagaagactaagaagaacgaagattgtatgtactatgggcccatcaactgaccgtgataacaatcttgaaaaaattatcgcagcgggcgcaaacgtagttcgtatgaacttctctcacggtacacctgatgaccatatcggacgtgctgaacgtgtacgttctattgcgaaaaaattaggtaaaaccgtggcaatcttaggtgatttacaaggtcctaaaattcgtgtttctacttttaaagacggtaaaattttcttaaacgttggcgataaattcattcttgatgcagagttaccaaaaggcgaaggcactcaagaatccgttggtttagactataaaacgcttcctcaagatgttgtgccgggcgatattcttttattagatgatggccgtgttcaattaaaagtattatcaactgatggtgcaaaagttttcactgaagttactgttggtggtccattatcaaataataaaggtatcaataaattaggtggcggtttatctgcggatgccctaacagaaaaagataaagccgacattattaccgctgcacgcattggtgttgatttcttagccgtttctttccctcgttcaagtgcagatttaaattatgcacgtgaacttgctcaacaagcaggtttaaatgcaaaaatcgttgctaaagttgaacgtgcagaaaccgttgctaatgatgaagccatggacgatattattttagcctctgatgtaattatggttgcacgtggtgacttaggtgtagaaatcggcgatcctgaattagtcggtgtacagaaaaaattaatccgtcgttcacgtcaattaaatcgtgctgtaattacagcgactcaaatgatggaatcaatgattagtaacccaatgccaactcgtgctgaagtaatggacgttgcaaacgcagtattagatggaactgatgcagttatgctttctgcagaaacagcagctggtcaatatccttctgaaacagtggcagcaatggctagcgtatgtttaggtgcagaaaaaatgccaagcattaacgtttctcgtcaccgtatggataaagaatttgaaactattgaagaatctgttgcgatgtctgcaatgtatgcagcaaaccacatgaaaggtgtagcggcaatcgtcactttaagtagcacaggccgtactccattattaatgtcacgcattagctctggcttaccaatctttgctttatctcgtaatcaagaaaccctaaacctttgtgcactataccgcggtgtaacaccaatttatcacggcgaagaaagtcgtacagaagctggtgcaaaagcagcacctcaatcattaaaagaaaaaggttatttatctactggcgatttagtgctggtaacccaaggtggtcaaggtgcgacacaaactaacgtatgtcgtacattaattgttgaataa

SEQ ID NO: 8374 - protein, 478 aa, Haemophilus influenzae
MSRRLRRTKIVCTMGPSTDRDNNLEKIIAAGANVVRMNFSHGTPDDHIGRAERVRSIAKKLGKTVAILGDLQGPKIRVSTFKDGKIFLNVGDKFILDAELPKGEGTQESVGLDYKTLPQDVVPGDILLLDDGRVQLKVLSTDGAKVFTEVTVGGPLSNNKGINKLGGGLSADALTEKDKADIITAARIGVDFLAVSFPRSSADLNYARELAQQAGLNAKIVAKVERAETVANDEAMDDIILASDVIMVARGDLGVEIGDPELVGVQKKLIRRSRQLNRAVITATQMMESMISNPMPTRAEVMDVANAVLDGTDAVMLSAETAAGQYPSETVAAMASVCLGAEKMPSINVSRHRMDKEFETIEESVAMSAMYAANHMKGVAAIVTLSSTGRTPLLMSRISSGLPIFALSRNQETLNLCALYRGVTPIYHGEESRTEAGAKAAPQSLKEKGYLSTGDLVLVTQGGQGATQTNVCRTLIVE

SEQ ID NO: 8375 - DNA, 1443 bp, Salmomella typhi
  CDS (1)..(1443)
atgtccagaaggcttcgcagaaccaaaatcgttaccacgttaggcccggcaactgaccgcgataacaaccttgagaaggttatcgccgcgggcgcaaacgtagtacgtatgaacttctctcacggctcgccggaagatcataaaatgcgtgctgataaagtccgtgagattgccgccaaattggggcgtcatgtggctattttaggcgacctgcaagggccaaaaattcgcgtttccacttttaaagaaggcaaagtgttcctcaatatcggggacaaatttctgttagacgctaacctgggtaaaggcgaaggcgataaagaaaaagtcggcattgattacaaagggttgccggcagacgtcgttcctggcgatatcctgctgcttgacgatggtcgagtgcagttgaaagtgcttgaagtccagggcatgaaagtctttaccgaggtcaccgtcggcggcccgctgtctaacaataaaggcattaacaagctcggcggcgggctttctgctgaagcgctgaccgaaaaagataaagccgatattcaaaccgctgcgctgataggcgttgactatctggcagtctccttcccgcgctgcggcgaagatctgaactatgcacgccgcctggcgcgcgacgccggctgtgacgcgaaaattgtggctaaagtcgaacgcgccgaagcggtatgcgatcaaaacgctatggacgatatcattctggcctctgacgttgtgatggtcgcacgtggcaacctgggcgttgaaatcggcgatccggagctggttggtatccagaaggcgctgattcgccgtgcgcgtcagctaaaccgcgcagtcatcaccgcaacgcagatgatggagtcgatgatcaccaacccgatgccgacccgtgcggaagtgatggacgtggcgaacgccgtcctggatggcacggatgcagttatgctgtctgccgaaaccgcagccggtcagtatccttctgaaaccgttgccgcaatggcgcgcgtctgtctgggcgcagaaaaaatccccagcatcaatgtgtctaaacaccgtctcgacgtgcagttcgacaatgttgaagaagccattgccatgtctgcgatgtatgcggcaaaccatctgaaaggcgttaccgcgatcatcaccatgacggaatccggtcgtaccgcgctaatgacttcccgtatcagctccggcctgccgattttcgccatgtcgcgccatgaacgcacgctgaacctgaccgcgctctaccgcggagtaacgccggtgcattttgatagcgcggctgatggcgttgtcgcggcgcatgaagctgttaatctgctgcgcgataaagggtatctggtttccggtgacctggttatcgtgacccagggcgatgtcatgagcaccgtcggttcaaccaataccacgcgtattttgaccgttgagtaa

SEQ ID NO: 8376 - protein, 480 aa, Salmomella typhi
MSRRLRRTKIVTTLGPATDRDNNLEKVIAAGANVVRMNFSHGSPEDHKMRADKVREIAAKLGRHVAILGDLQGPKIRVSTFKEGKVFLNIGDKFLLDANLGKGEGDKEKVGIDYKGLPADVVPGDILLLDDGRVQLKVLEVQGMKVFTEVTVGGPLSNNKGINKLGGGLSAEALTEKDKADIQTAALIGVDYLAVSFPRCGEDLNYARRLARDAGCDAKIVAKVERAEAVCDQNAMDDIILASDVVMVARGNLGVEIGDPELVGIQKALIRRARQLNRAVITATQMMESMITNPMPTRAEVMDVANAVLDGTDAVMLSAETAAGQYPSETVAAMARVCLGAEKIPSINVSKHRLDVQFDNVEEAIAMSAMYAANHLKGVTAIITMTESGRTALMTSRISSGLPIFAMSRHERTLNLTALYRGVTPVHFDSAADGVVAAHEAVNLLRDKGYLVSGDLVIVTQGDVMSTVGSTNTTRILTVE

SEQ ID NO: 8377 - DNA, 1455 bp, Dichelobacter nodosus VCS1703A
  CDS (1)..(1455): transl_table=11
atgccatttaaaagagatttacaccgtattagccaccacaccaaaatcgttgcaactttggggccggcaagcaatagcgtagaaatgttggagcaactcattcgcgtgggattaaacgtggtgcgcatgaatttttctcacggcgatcgtgcgtttcatgctgaaaatgcccgtcgcgtgcggttagcgtcagaaaatgtgggacgacaagttgccattattgccgatttacaaggccctaaaatccgaattggggcgattgccggcggtaaagtgtcgttaattgaagggcaaacttatattttagacgccgcatattgtggtgaaggaacggcggagcgcgtgggattagattatgccgatttgcccaaagacgttcgaattggagacgtgttattgcttgatgatggtttggtgacgttaaccgtgagcaaaattgttggcgatgaaattcataccgttgtgggcaattcggcgctgttaaaaagtaataaaggcattaataaacaaggcggcggactttcggcaccggcgttaaccgataaagatcgccaagatttaaaaacggcagtggaattgggcgcggattatttggcggtgagttttgttaaatcagccgcagatatggagttggcgcggcaattggttgcgcaagcttgccccaatacgcatcaccccgcgctgattgccaaaattgaacgcgccgaagccattactcatttggaagaaatcgtgatggcaagcgacggcattatggtggcgcgcggtgatttagcggtggaagtgggcaatgcggcggtgccggttttgcaaaaacgtatgattaaactcgcgcggcggcatcgtcgttttgtgattacagcaacgcaaatgatggaaagtatgattacgaatcccgtgccgacgcgggcggaagtttctgacgtggcaaacgcggtaattgatggtactgatgcggtgatgttatcggcagaatcagccgttggtttgtatccttttgaaacggtgcaaacgatggcgctcgtttgtcaggcggtagaaaatgcgcaaaatccgatggaaaatattgatatggatattcccatcacggatcgcattgatcatacgattgccgccggcgccgtttttaccgctcaaaaaattggtgctaaagctattattgccttaactaacagcggtaccacggcgtttcaattaagccgttatggcatcaatattccgatttatgcgttaaccagcagtttgagtgtgcaacgcaaaatggcgatgtatcgcggcgtgcgtcctttaatggcggatatcagtaatgatcatcaaaatgcgattgcggaggcagaagcgcatttggcgtggcgcggtgttgttcatagcggggatttatatgtgattaccagcggcatgaaaatggggttgacgggttcgacgaatactttgcaaatttgtcgcgccaaataa

SEQ ID NO: 8378 - protein, 484 aa, Dichelobacter nodosus VCS1703A
MPFKRDLHRISHHTKIVATLGPASNSVEMLEQLIRVGLNVVRMNFSHGDRAFHAENARRVRLASENVGRQVAIIADLQGPKIRIGAIAGGKVSLIEGQTYILDAAYCGEGTAERVGLDYADLPKDVRIGDVLLLDDGLVTLTVSKIVGDEIHTVVGNSALLKSNKGINKQGGGLSAPALTDKDRQDLKTAVELGADYLAVSFVKSAADMELARQLVAQACPNTHHPALIAKIERAEAITHLEEIVMASDGIMVARGDLAVEVGNAAVPVLQKRMIKLARRHRRFVITATQMMESMITNPVPTRAEVSDVANAVIDGTDAVMLSAESAVGLYPFETVQTMALVCQAVENAQNPMENIDMDIPITDRIDHTIAAGAVFTAQKIGAKAIIALTNSGTTAFQLSRYGINIPIYALTSSLSVQRKMAMYRGVRPLMADISNDHQNAIAEAEAHLAWRGVVHSGDLYVITSGMKMGLTGSTNTLQICRAK

SEQ ID NO: 8379 - DNA, 1647 bp, Oryza sativa (japonica cultivar-group)
  CDS (1)..(1647)
atggcaacctccgccgccgccgccgcgagcaccttgccttacctcgtcgccgccgcctcctcctccgcggcggcgcgccgccgcggggcccaccggatccgggcgtcgtcggcggcggcggaggtggagggggcgatggacgtggtgtcggaggcggagctgcgggagaaggggttcatggggctccggaagacgaagctggtgtgcacggtggggcccgcgtgcgtgggggctttgccggcgctggcgcgcggcgggatgggcgtggcgcgggtcaacctgtgccacgggggccgcggctggcaccgcgccgtgatgcgcgaggtgcggaggctcaacgaggaggaaggcttctgcgtctccctcatggtcgacaccgaggggtcccagctcctcgtcgccgaccacggcggcgccgcctccgtcaaggccgaggatggctctgaatggctatttacaagtaaaagaaccgatgaatctcatccattcacaatgcatgttaactttgataagttttctgaagacattctagttggtgatgagcttgtaattgatggaggaatggcaacatttgaagttattgagaaggtcggaaatgatttgcgctgtaagtgcacagacccaggtttgcttcttcctcgagccaaactgtcattctggaggaatggaaaattagttgaaaggaactttgggcttcctacattgtcagcaaaggattgggctgacattgaatttgggatagctgaaggagttgattgcatcgctctttcatttgtaaaagatgctaatgacatcaagtatctcaagacttacctctccagaaaatcattagaacacatcaaaatattcgcgaaggttgagagtcttgaatcactcaagaaccttaaagacatcatagaggcatctgatggagttatggtagcacgtggtgatcttggagttcagattcctttagaacaaatcccagccatccaagaggcaattgttgatctttgtcgacggttgaacaagccagtgatagttgcctctcagcttcttgaatcaatggttgagtatccaacaccaactcgtgcagaggtagcagacgtttctgaagcagtacggcaatatgctgatgccgtaatgttatcggcagagtcagctataggtgcatatccccagaaagctctagcagtcctccgtgctgctagtgagaggatggaatcatggagccgtgaggaaaacatgcagaaacttcttccacaacatcagcttgcaatagctttgcctgataggatctcagagcaaatttgcaccagtgctgcagaaatggcaaacaaccttgcggtggatgccatctttgtttacacaaagtatggtcacatggcgtcgcttctttcgcgcaaccggcccaaccctcccatttttgctttcactgataatgccaactcaagaaagagcatgaacctctactggggagtaattccacttcagctaccactgtcaaataacatggaagataacttcaatcaaaccatcaagcttatgaagtcgaagggttcagtgaaatctggagacacagtcttggtcgtcgccgactctgatctgaaccgaccccgtgctgctacctcagttttccaatccattcaagttcgaatagtggactag

SEQ ID NO: 8380 - protein, 548 aa, Oryza sativa (japonica cultivar-group)
MATSAAAAASTLPYLVAAASSSAAARRRGAHRIRASSAAAEVEGAMDVVSEAELREKGFMGLRKTKLVCTVGPACVGALPALARGGMGVARVNLCHGGRGWHRAVMREVRRLNEEEGFCVSLMVDTEGSQLLVADHGGAASVKAEDGSEWLFTSKRTDESHPFTMHVNFDKFSEDILVGDELVIDGGMATFEVIEKVGNDLRCKCTDPGLLLPRAKLSFWRNGKLVERNFGLPTLSAKDWADIEFGIAEGVDCIALSFVKDANDIKYLKTYLSRKSLEHIKIFAKVESLESLKNLKDIIEASDGVMVARGDLGVQIPLEQIPAIQEAIVDLCRRLNKPVIVASQLLESMVEYPTPTRAEVADVSEAVRQYADAVMLSAESAIGAYPQKALAVLRAASERMESWSREENMQKLLPQHQLAIALPDRISEQICTSAAEMANNLAVDAIFVYTKYGHMASLLSRNRPNPPIFAFTDNANSRKSMNLYWGVIPLQLPLSNNMEDNFNQTIKLMKSKGSVKSGDTVLVVADSDLNRPRAATSVFQSIQVRIVD

SEQ ID NO: 8381 - DNA, 1536 bp, Oryza sativa (japonica cultivar-group)
  CDS (1)..(1536)
atggcgaacatcgacatggggaagatcctggcggggctggagaacgacgacgcgcgggtgcccaagaccaagctggtctgcacgctcggcccggcctcccgctccgtccccatgctcgagaagctgctccgcgccgggatgaacgtcgcgcgcttcaacttctcccacggcacccacgagtaccaccaggagaccctcgacaacctccgccaggccatgcacaacaccggcgtcctctgcgccgtcatgctcgataccaagggtcctgagattcgtactggatttttgaaggatggcaagccaatcaagctaacaaagggtcaagaactcactgttaccaccgattatgagatcaagggtgatgagaacatgattaccatgagttacaagaaactgccagttgatgtgaagcctggaaatgtcattctctgcgccgatggtacaatctctttgactgttttgtcctgtgatccaaaggctggaactgtgaggtgtaggtgtgagaacacagcaatgcttggcgagagaaagaattgcaatctgccaggaattgttgtggaccttcctacactgactgagaaggataaagaagacattttgggatggggtgtgccaaatgacatagacatgattgctctgtcgtttgtccgtaaaggatcagatttggttaccgtcagacaacttcttggacagcatgcaaagcgcatcaagctgatgtcaaaggttgaaaaccaagagggtgttgtaaacttcgatgagatcttgagggaaacggatgcatttatggttgctagaggtgatcttggaatggagattccagttgagaagatattccttgcacagaagatgatgatttacaagtgcaaccttgctggaaagcctgttgtgactgctactcagatgcttgagtcgatgatcaaatcaccacgtccaactcgtgctgaggcaactgacgttgcaaatgcagttcttgatggaactgactgcgtcatgcttagtggagagagtgctgctggagcataccctgaagtagctgtgaagatcatggcacgtatatgtgttgaggcagagtcttcccttgacaacgaagctgtcttcaaggagatgatcaggtctgcgccccttccgatgagcccattggagtctctcgcatcctctgctgtacgcacagccaacaaggccaaggcagccctgattgttgtcttgactcgtggtggtaccacggcaaagctggttgccaagtatcgtcccagggttccaatcctctctgtggttgtccccgtgttgacaaccgattcattcgactggacaatcagctcggagggcccagcaaggcacagcctaatctacagaggtcttgttcctctcctggctgagggttctgccaaagccaccgattcggagtcgacagaggtcatccttgatgctgctctcaagtcagctgtacagaagcagttgtgcaagcctggtgatgctgttgttgctctgcaccgtattggcgtcgcatccgtgatcaagatctgcatcgtgaagtaa

SEQ ID NO: 8382 - protein, 511 aa, Oryza sativa (japonica cultivar-group)
MANIDMGKILAGLENDDARVPKTKLVCTLGPASRSVPMLEKLLRAGMNVARFNFSHGTHEYHQETLDNLRQAMHNTGVLCAVMLDTKGPEIRTGFLKDGKPIKLTKGQELTVTTDYEIKGDENMITMSYKKLPVDVKPGNVILCADGTISLTVLSCDPKAGTVRCRCENTAMLGERKNCNLPGIVVDLPTLTEKDKEDILGWGVPNDIDMIALSFVRKGSDLVTVRQLLGQHAKRIKLMSKVENQEGVVNFDEILRETDAFMVARGDLGMEIPVEKIFLAQKMMIYKCNLAGKPVVTATQMLESMIKSPRPTRAEATDVANAVLDGTDCVMLSGESAAGAYPEVAVKIMARICVEAESSLDNEAVFKEMIRSAPLPMSPLESLASSAVRTANKAKAALIVVLTRGGTTAKLVAKYRPRVPILSVVVPVLTTDSFDWTISSEGPARHSLIYRGLVPLLAEGSAKATDSESTEVILDAALKSAVQKQLCKPGDAVVALHRIGVASVIKICIVK

SEQ ID NO: 8383 - DNA, 1713 bp, Oryza sativa (japonica cultivar-group)
  CDS (1)..(1713)
atggcggcggcggcggctgagatcgtggggtccgcggcggcgcgcatggcggcgccggcagtgaggccggctccgcccgcggcggcggcggcggcggcgcccccgcagccgaggagggccgtggcggcgcgctccctcaggacctccacctccgacagggtggcggcggatctcgcgctcgggagcaacggctccctctccgctcagaacattgctgagaataccgctgacgctacttcgcaagtggtctctgcgaattcccgtaggaagacaaagattgtttgcaccataggcccctcaaccaacacacgcgagatgatatggaaacttgctgagactggaatgaacgtcgcacgcatgaatatgtcccatggtgaccaccagtcgcaccagaaggtgattgatttggtgaaggagtacaatgcgaagaatactgatggcaatgtcattgctattatgctggataccaagggtccagaagtgagaagtggggatgttccagaaccaatcatgctcgaggaaggtcaagagttcaattttactattaaaagaggggtgagcaccaaagacaccgtcagtgtgaattacgatgacttcataaacgatgttgaagttggggacatactgttggtggatggaggaatgatgtcactcgctgtcaagtctaaaacagctgatacggttaagtgtgaagtagttgatggtggggaactgaaatcaaggcgccacctaaatgtccgtggaaagagtgcgactttgccatctattacagagaaagattgggaggacataaagtttggtgttgaaaatggtgttgatttctatgccgtttcctttgtgaaggatgcaaaagttattcatgaactgaaggactaccttaaaagtgctaatgcagatatacatgtcattccaaagattgaaagtgcagattcaataccaaacctccagtccattattgctgcttcagatggggcgatggtggcaagaggggatcttggtgctgaacttccaattgaggaagttcctttgctgcaggaggagattgtcagaacatgccgaagcatgcagaaaccagttattgttgccacgaatatgttagagagcatgatagaccatcccactccaacaagagcagaagtttctgatatagcaattgcagttcgtgaaggttctgatgccatcatgctgtctggtgaaactgcccatggaaagttcccactgaaggcagtcaaggtgatgcacacagtggcacagagaacagaatccagcctgtataacccaactacatctcctagtcttgttgcacatcctcaggctctgctcaacgaggaattttcgcaaagccaactaagcaaaatgtttggatctcatgctacaatgatggcgaacaccctttgcaccccaattattgtgtttacacgaaccggctccatggcagtccttctcagccactaccggccctcgtctacaatttttgcatttacaaatgaggaacgagtgaagcaacgtctggcactctaccagggtgtggttcccatttacatgaagttttctgatgatgcagaggaaactttctctagagcaattagtagcttgctgaacgcccaattcgtgaaagaaggggactacgtgacccttgttcagagtggagtgaagtcgatctggagagaggagtctactcaccacattcaagtgaggaaagtccagggctaa

SEQ ID NO: 8384 - protein, 570 aa, Oryza sativa (japonica cultivar-group)
MAAAAAEIVGSAAARMAAPAVRPAPPAAAAAAAPPQPRRAVAARSLRTSTSDRVAADLALGSNGSLSAQNIAENTADATSQVVSANSRRKTKIVCTIGPSTNTREMIWKLAETGMNVARMNMSHGDHQSHQKVIDLVKEYNAKNTDGNVIAIMLDTKGPEVRSGDVPEPIMLEEGQEFNFTIKRGVSTKDTVSVNYDDFINDVEVGDILLVDGGMMSLAVKSKTADTVKCEVVDGGELKSRRHLNVRGKSATLPSITEKDWEDIKFGVENGVDFYAVSFVKDAKVIHELKDYLKSANADIHVIPKIESADSIPNLQSIIAASDGAMVARGDLGAELPIEEVPLLQEEIVRTCRSMQKPVIVATNMLESMIDHPTPTRAEVSDIAIAVREGSDAIMLSGETAHGKFPLKAVKVMHTVAQRTESSLYNPTTSPSLVAHPQALLNEEFSQSQLSKMFGSHATMMANTLCTPIIVFTRTGSMAVLLSHYRPSSTIFAFTNEERVKQRLALYQGVVPIYMKFSDDAEETFSRAISSLLNAQFVKEGDYVTLVQSGVKSIWREESTHHIQVRKVQG

SEQ ID NO: 8385 - DNA, 1584 bp, Oryza sativa (japonica cultivar-group)
  CDS (1)..(1584)
atgcattcgacgaatctgctgctggaggagcccatcaggatggcatccatcctggagccatccaagccgagctttttcccggcgatgaccaagatcgtggggacgctgggtcccaagtcgcgcgccgtcgacaccatctcctcctgcctcaaggccggcatgtcggttgccaggttcgatttctcgtggggagacgctgagtaccaccaggaaaccctcgaaaacctcaagctcgccatcaagtccaccaagaagctctgtgctgtcatgctcgacactgtcggcccggagttgcaggtggtgaacaagagtgaggctgcaatctcccttgaagcgaatggcactgttgttctcacccctgaccaggggcaggaggcctcctccgaattgctgcccatcaacttctccgggcttgctaaggctctgaaaccaggtgctacaatttttgtggggcaatacttgttcactggcagtgagactacttcagtttggttagaggtttctgaagttaaaggagatgatgtggtttgtgtgataaaaaattcggctactctggctggttcactgttcaccctgcattgttctcagattcatatcgacttacctacactgtctgatgaggacaaggaggttatcagaagatggggagctccaaacaagattgacttcctctctctgtcttatacaagacacgcggaagatgtgcgacaggcacgtgagttcctctcaaagttaggcgaccttagccaaactcagatttttgccaaaattgagaatgttgagggtttgaatcattttgatgaaatcctgcaagaggcggatggtatcattctgtcaagaggaaaccttggaattgatcttccacctgaaaaggtgtttttgtttcaaaagtctgctctgcacaagtgcaacatggctggaaagcctgctgttgttactcgtgttgtggacagtatgactgacaacctcaggcctactcgtgcggaggctactgatgtggcaaatgctgtacttgacgggagtgatgccattctccttggtgctgagactctccgtggtctgtacccagttgagactatctcaattgtgggcaaaatttgcgctgaggcagagaaggtattcaaccaagatttatacttcaagcggactgtgaaatatgttggggagcccatgacccacttggagtctatcgcttcttctgcggtgcgagctgctatcaaagtgaaggcttctgtcattatttgcttcacatcatctggacgcgctgcaagactaattgccaagtacaggcccaccatgcctgttctatctgttgtcattcctcgtctgaaaacaaaccaactgaggtggagtttcactggcgcatttgaagcaagacaatcactcatagttagaggtctctttccgatgcttgctgatcctcgccatccagctgaatcgaccagcgctaccaatgagtcagttttgaaggttgctcttgaccatggcaaagcttccggtgtgatcaagtcgcatgatcgcgttgttgtctgccagaaagtgggtgattcctcggttgtgaagatcattgagctggacgattag

SEQ ID NO: 8386 - protein, 527 aa, Oryza sativa (japonica cultivar-group)
MHSTNLLLEEPIRMASILEPSKPSFFPAMTKIVGTLGPKSRAVDTISSCLKAGMSVARFDFSWGDAEYHQETLENLKLAIKSTKKLCAVMLDTVGPELQVVNKSEAAISLEANGTVVLTPDQGQEASSELLPINFSGLAKALKPGATIFVGQYLFTGSETTSVWLEVSEVKGDDVVCVIKNSATLAGSLFTLHCSQIHIDLPTLSDEDKEVIRRWGAPNKIDFLSLSYTRHAEDVRQAREFLSKLGDLSQTQIFAKIENVEGLNHFDEILQEADGIILSRGNLGIDLPPEKVFLFQKSALHKCNMAGKPAVVTRVVDSMTDNLRPTRAEATDVANAVLDGSDAILLGAETLRGLYPVETISIVGKICAEAEKVFNQDLYFKRTVKYVGEPMTHLESIASSAVRAAIKVKASVIICFTSSGRAARLIAKYRPTMPVLSVVIPRLKTNQLRWSFTGAFEARQSLIVRGLFPMLADPRHPAESTSATNESVLKVALDHGKASGVIKSHDRVVVCQKVGDSSVVKIIELDD

SEQ ID NO: 8387 - DNA, 1584 bp, Oryza sativa (japonica cultivar-group)
  CDS (1)..(1584)
atgcattcgacgaatctgctgctggaggagcccatcaggatggcatccatcctggagccatccaagcccagcttcttcccggcgatgaccaagatcgtggggacgctggggccaaagtcgcgctccgtcgacaccatctcctcctgcctcaaggccggcatgtcggtggcccgatttgatttctcgtggggagacgccgagtaccaccaggaaacccttgagaacctcaaggtcgccatcaagtccaccaagaagctctgcgcggtcatgcttgacacggtcggcccagagttgcaggtggtgaacaagagcgaagcctccatctccctcgaggagaacggcactgttattctcacccctgaccaggggcaggaggcctcctcacaagtgctgccaattaacttcgctgggcttgctaaggctgtgaagccaggtgacacaatatttgttgggcaatacttgttcacaggcagtgagactacttcagtttggttagaggtttctcaaattaaaggagatgatgtggtctgtgtgataaaaaacacagcaactctggctgggtcgctcttcacattgcattgctcgcagattcacatcgacttacctaccctatctgatgaggacaaggaggttatcagaaaatggggtgccccaaacaagattgacttcctctctctttcttatacaagacatgtagaagatgtgcgacaggcacgtgaattcctctcaaagttaggtgaccttagccagacccagatttttgcaaaaatcgagaatgtggaggggttgaataattttgatgaaatcctccaagaagctgatggtatcatcctgtcaagaggaaaccttggaattgatcttccacctgaaaaggtgtttttatttcaaaagtctgctctgcacaagtgcaacatggctggaaagcctgctgttgttactcgtgttgtagacagtatgactgacaacctcaggcctactcgtgcagaggctacggatgtggcaaatgcagtgcttgacgggagtgatgccattctccttggtgctgagactctgcgtggtttatacccagttgagactatttcaatagtgggtaaaatttgtgctgaggctgagaaggtcttcaaccaagatttatacttcaagagaactgtgaaacatgtgggggagcccatgacccacttggagtctattgcttcctctgcggtgcgagctgctattaaagtgaaggcgtctgtcataatttgcttcacatcatctggacgtgctgcaaggctaattgccaagtataggccaaccatgcctgttctatctgttgtcattcctcgtctaaaaacaaatcaactgaggtggagtttcactggcgcatttgaagcaagacaatcgctcatagttagaggcctctttccgatgcttgctgatccgaggcatccagctgaatcaaccaacgctacaaatgaatccgttttgaaggttgctcttgaccacggtaaagtttctggtgtgataaagtcgcatgatcgcgttgttgtctgccagaaggtgggagattcctcggttgtgaagatcattgagctggacgattag

SEQ ID NO: 8388 - protein, 527 aa, Oryza sativa (japonica cultivar-group)
MHSTNLLLEEPIRMASILEPSKPSFFPAMTKIVGTLGPKSRSVDTISSCLKAGMSVARFDFSWGDAEYHQETLENLKVAIKSTKKLCAVMLDTVGPELQVVNKSEASISLEENGTVILTPDQGQEASSQVLPINFAGLAKAVKPGDTIFVGQYLFTGSETTSVWLEVSQIKGDDVVCVIKNTATLAGSLFTLHCSQIHIDLPTLSDEDKEVIRKWGAPNKIDFLSLSYTRHVEDVRQAREFLSKLGDLSQTQIFAKIENVEGLNNFDEILQEADGIILSRGNLGIDLPPEKVFLFQKSALHKCNMAGKPAVVTRVVDSMTDNLRPTRAEATDVANAVLDGSDAILLGAETLRGLYPVETISIVGKICAEAEKVFNQDLYFKRTVKHVGEPMTHLESIASSAVRAAIKVKASVIICFTSSGRAARLIAKYRPTMPVLSVVIPRLKTNQLRWSFTGAFEARQSLIVRGLFPMLADPRHPAESTNATNESVLKVALDHGKVSGVIKSHDRVVVCQKVGDSSVVKIIELDD

SEQ ID NO: 8389 - DNA, 1437 bp, Mesorhizobium loti MAFF303099
  CDS (1)..(1437): transl_table=11
atgagacgcagccgcaaggtcaagatcctagccacaatcggtccggcctcctcctccgaggagatgctgcagaagctgttcgaagcgggcgccgatgtgttccgcatcaacatgagccataccgaccacgaactgatgcgcacgctggtcgggcgcatccgcgccgtcgaggaaaaggtcggccggccgatcggcatcctcgccgacctgcaaggccccaagctgcgcgtcggcaagttcgccaatggcaaggaggtgctgacgccaggccagaccttcacgctcgacgacaatcccgagcccggcacgtcgagcagggtctatctgccgcatccggaaatcctgagttcggtcgagcccggtcaccgtcttttgatcgacgacggcaagctcgagctgaaggcggtgaagagcgatggcaagtcgatcgtctgcacggtcgtcgccggcaccacgatttccgacaagaagggcgtcagcctgcccgataccgacctgccggtcggcgctctgaccgaaaaggaccgcaaggatctcgacgcggtgctcgccacgggcgtcgactggatcgcgctgtccttcgtgcagcgccccgaggatctggccgaggcgcgcaagatcgcgcggggccgggcgctgatcatggccaagatcgaaaagccgcaggccgtcgcccgcttggccgagatcatcgaactgtccgacgcgctgatggtcgcccgtggcgatctcggcgtcgaaatgccgctggaagccgttcccggcatccagaagcagatcacgcgcgccgcgcgccgcgccggcaagccggtggtggtcgccacgcaaatgctggaatcgatgatcaccgccccggtgccgacccgcgccgaagtctccgacgtctcgatcgccgtcttcgagggcgccgacgccatcatgctgtcggcggaatcggcggcgggtgcctatcccgtcgaagccgtggcgatgatggaccgcatcgccaccaaggtcgaaaccgatccgacctatgccggcatcatcaacgcccagcgctccgagccggaagcgaccggagccgacgcgatctcgctggctgcccgcgaaatcgccgagactctgaaactgtcggcgatcatcacctacacggcgtccggcaccaccgggctgcgcgccgcgcgcgaacggccacaggtgccgatcatcgctctgtcgccgatcctcaacaccgcacggcggctgtcgcttctgtggggcacgcactgtgtcgtttcgcccgatgccaccgatctcgacgacatggtcaaccgcgcctgccgcattgcgctggaagaagagttcggcaagccgggcgaccgcgtcatcatcacggccggtgtgccgctgaggacgcccggctcgaccaacatgctgcgcattgcctatgtcgggtcggaaaagcagggcagccggtaa

SEQ ID NO: 8390 - protein, 478 aa, Mesorhizobium loti MAFF303099
MRRSRKVKILATIGPASSSEEMLQKLFEAGADVFRINMSHTDHELMRTLVGRIRAVEEKVGRPIGILADLQGPKLRVGKFANGKEVLTPGQTFTLDDNPEPGTSSRVYLPHPEILSSVEPGHRLLIDDGKLELKAVKSDGKSIVCTVVAGTTISDKKGVSLPDTDLPVGALTEKDRKDLDAVLATGVDWIALSFVQRPEDLAEARKIARGRALIMAKIEKPQAVARLAEIIELSDALMVARGDLGVEMPLEAVPGIQKQITRAARRAGKPVVVATQMLESMITAPVPTRAEVSDVSIAVFEGADAIMLSAESAAGAYPVEAVAMMDRIATKVETDPTYAGIINAQRSEPEATGADAISLAAREIAETLKLSAIITYTASGTTGLRAARERPQVPIIALSPILNTARRLSLLWGTHCVVSPDATDLDDMVNRACRIALEEEFGKPGDRVIITAGVPLRTPGSTNMLRIAYVGSEKQGSR

SEQ ID NO: 8391 - DNA, 1533 bp, Arabidopsis thaliana
  CDS (1)..(1533)
atggagaagttacttgctggacaaacaaacaatggatccctcaagtcaaagacgaagatcgtctgtactctcggaccggcttcgagatcggttgagatggttgagaagcttctcaaagccggtatgaacgtagcccggttcaacttctcccatggttctcactcataccatcaagaaactcttgacaatctcagaaccgccatggagaacacttgtattccctgtgccgtcatgctcgacaccaagggtcctgagatccgaaccgggtttctcaaagaaggcaaaccggttgagctaattcaaggtcaagagattacaatctcaactgattacaccatggaaggagattcaaacacaatctcaatgagttacaagaaacttgctgaagatctcaagtccggtgacgtgattctctgttccgacggtacaatctctcttaccgtcttgtcttgtgacaagaatctcggtcttgttcgtgcccgttgcgagaactctgcagttcttggagaaagaaagaacgtgaacctccctggaatcgtagttgatcttccaacactcacagagaaggatcaagaggatattctccaatggggagttccgaataagatcgatatcatcgctctttcctttgttcgtaaaggatctgatctggtcgaggtcaggaagttgcttggagagaacgcaaagagtatcatgctcatgtcaaaggtggagaatcaagaaggagtgatgaattttgacaagattctggaatattctgatgcattcatggtggctagaggtgatttaggaatggagattccgattgaaaagatgtttcttgctcagaagatgatgattcagaaggctaatgctcttgggaagccaatcgtcacagccacacagatgcttgagtcaatgaccaaatctcctcgtccaactagagcagaagccaccgatgtagctaacgctgtccttgacggcactgattgcgtcatgctcagtggagaaaccgccgccggagctcaccctgaaaccgccgtgctaacaatgtcaagaatctgtaaggaagcagaggatttcatcgattacgacacaatgcacaagaagattcaagatatcgtttcgttgcctttatctcctattgagagcttggccgcttcagccgtttcgacggcgaggagtctttgtgcggctgcgattgtcgttctaaccaagggaggttacacggtggagcttgtggccaagtacaggcctagtgttccgattctgtccgtaattgtgccggagattactcgtacggatgatttcgagtggtcgtgctctgaatctgcggctcatgtggcaagacgtggtttgatctaccgtggaattgttcctgtgatggcgacgggagcatccgctaggtcttcgaacaaggactcgacggaggagacgattcaattcgccattgaattcgcgaagaagaagggaatatgtaagacaggagactcgattgtggcgttgcacaagatcgatggctcctctgttgtcaagattttgaacgtggagtag

SEQ ID NO: 8392 - protein, 510 aa, Arabidopsis thaliana
MEKLLAGQTNNGSLKSKTKIVCTLGPASRSVEMVEKLLKAGMNVARFNFSHGSHSYHQETLDNLRTAMENTCIPCAVMLDTKGPEIRTGFLKEGKPVELIQGQEITISTDYTMEGDSNTISMSYKKLAEDLKSGDVILCSDGTISLTVLSCDKNLGLVRARCENSAVLGERKNVNLPGIVVDLPTLTEKDQEDILQWGVPNKIDIIALSFVRKGSDLVEVRKLLGENAKSIMLMSKVENQEGVMNFDKILEYSDAFMVARGDLGMEIPIEKMFLAQKMMIQKANALGKPIVTATQMLESMTKSPRPTRAEATDVANAVLDGTDCVMLSGETAAGAHPETAVLTMSRICKEAEDFIDYDTMHKKIQDIVSLPLSPIESLAASAVSTARSLCAAAIVVLTKGGYTVELVAKYRPSVPILSVIVPEITRTDDFEWSCSESAAHVARRGLIYRGIVPVMATGASARSSNKDSTEETIQFAIEFAKKKGICKTGDSIVALHKIDGSSVVKILNVE

SEQ ID NO: 8393 - DNA, 1494 bp, Arabidopsis thaliana
  CDS (1)..(1494)
atggagatgttacttggtggacaagcaaccaatggagctcttcgttcaaagacgaagatagtttgtactcttggaccagcttcaagatcggtggagatgattgagaagcttctcaaggctggtatgaacgtagcccggttcaatttctcccatggttctcactcttaccatcaagaaactctcgataatctcagaaccgccatggacaacactggtatcctctgcgccgtcatgctcgacacaaagagtcctgtgatacgaaccgggtttctcaaagaaggcaaaccgatacagctaaagcaaggtcaagagatcaccatctcaattgattacaagatacaaggagattccaacactatctccatgagctacaagaaacttgcagaggatctcaaacctggtgacgtgatcctttgttcagacggaacaatctctctaaatgtcttgtcctgtgacaagtatctcggtcttgttcgttgccgatgcgagaactctgctcttcttggagaaagaaaaaacgttaatcttcctggaattgtagttgatctcccaacactcactgagaaagataaagaagatattatgcaatggggagttccgaacaaaatcgacattatcgctctctcttttgttcgtaaaggatctgacctaatccaagtaaggaaattacttggagagcactcaaagagcatcatgcttatgtcaaaggtggagaatcaagaaggagtaatgaatttcgataagatcctggagaattctgatgctttcatggtggctagaggagatcttgggatggagataccaatcgaaaagatgtttcttgctcagaaaacaatgatcaacaaggctaatgctcatgggaaaccagtggtcacagccacacagatgcttgaatccatgacagtctctcctcgcccgactagagctgaagctaccgacgtagcaaacgcggttcttgacgggacagattgcgttatgcttagcggagaaactgctgctggagctcaccctgagactgccgtgttaacaatgtcaaggatctgcaaagaagcagaggatttcatagattacgacattctccacaagaaaaccctaggaatggtttcgttaccgttatctccaatcgagagcttagctgcttcagctgtttcgactgcgcggagtgttttcgcgtccgcgatcgttgttctcactagaggcggttacacggcggagcttgtggctaaatacaggccaagcgttccgattctgtcggtgattatgccagagattgctgaatgctcggactcggtagctcatgtggcgagacgtggtttgatttaccgtgggattattccggtggtgggatgttcagctagagattcaacggaggagatgattagattagctataggatttgccaagacgaagggaatttgtaagactggagattccattgtggctttgcacaagattgatggttcatctattgtcaggatagtgagcgtcgagtaa

SEQ ID NO: 8394 - protein, 497 aa, Arabidopsis thaliana
MEMLLGGQATNGALRSKTKIVCTLGPASRSVEMIEKLLKAGMNVARFNFSHGSHSYHQETLDNLRTAMDNTGILCAVMLDTKSPVIRTGFLKEGKPIQLKQGQEITISIDYKIQGDSNTISMSYKKLAEDLKPGDVILCSDGTISLNVLSCDKYLGLVRCRCENSALLGERKNVNLPGIVVDLPTLTEKDKEDIMQWGVPNKIDIIALSFVRKGSDLIQVRKLLGEHSKSIMLMSKVENQEGVMNFDKILENSDAFMVARGDLGMEIPIEKMFLAQKTMINKANAHGKPVVTATQMLESMTVSPRPTRAEATDVANAVLDGTDCVMLSGETAAGAHPETAVLTMSRICKEAEDFIDYDILHKKTLGMVSLPLSPIESLAASAVSTARSVFASAIVVLTRGGYTAELVAKYRPSVPILSVIMPEIAECSDSVAHVARRGLIYRGIIPVVGCSARDSTEEMIRLAIGFAKTKGICKTGDSIVALHKIDGSSIVRIVSVE

SEQ ID NO: 8395 - DNA, 1533 bp, Arabidopsis thaliana
  CDS (1)..(1533)
atggagatgttacttggtggacaagcaaccaatggagctcttcgttcaaagacgaagataatttgtactcttggaccggtttcaagatcggtggagatgattgagaagcttctcaaggctggtatgaacgtagcccggttcaatttctctcatggttctcactcttaccatcaagaaactctcgataatctccgaaccgccatggacaacactggtattctctccgccgtcatgctcgacacaaagggtcctgagatacgaaccgggtttctcaaagaaggcaaaccgatacagctaaaccaaggtcaagagatcaccatctcaattgattacatgatagaaggagattcaaacgttatctccatgagctacaagaaacttgcagaagacgtcaaacctggtgatgtgattctctgttcagacggcacaatctctttaactgtcttgtcctgtgacaagtctttcggtcttgttcgttgccgttgcgagaactctgcaattctaggagaaagaaaaaacgttaatcttcctggaattgtagttgatctcccaacacttactgagaaagataaagaagatatcatccaatggggagttccgaacaaaatcgacatcatcgctctttcttttgttcgtaaaggatctgacctaactgaagttaggaggttacttggagaacactcaaagaacatcatgctcatgtcaaaggtggagaatcaagaaggggtcatgaattgtgaaaagattctggagaattctgatgctttcatggtggctagaggagatcttggaatggagattccgatcgaaaagatgttccttgctcagaaaacaatgatcaagatggctaatgctcttgggaaaccagttgtcacagccacacagatgcttgaatccatgacagtatctcctcgtccgactagagctgaagccactgacgttgcaaacgctgttcttgacgggacagactgcgttatgcttagtggagaaaccgctgctggagctcaccctgaggctgccgtgctaacaatgtcaaggatctgtaaagaagcagaggatttcatcgattacgacattctccacaagaaaaccctaggaatggtttcgttaccgttatctccgatcgagagcttagctgcttcagttgtttcgacggcacagagtgtttttgcgtcggcgatcgttgttctcaccaaaggcggttacacggcggagcttgtggctaaatacaggccgagcgttccgattttgtcagtgattgtgccagagattgctcaagggaatgatatggagatgtcgtgctcagactcggtggctcatgcggcgagacgtggtttgatttaccgtaggattattccggtggtggcgacgggatcttcggctagggattcaaacaaagatgcaacggaggagatgattaatttggctatcggattcgcgaagacgaagggaatttgcaagaatggagattcgattgtggcgttgcacaagattgatggttcctctgttgttaagatagtgaccgtggagtaa

SEQ ID NO: 8396 - protein, 510 aa, Arabidopsis thaliana
MEMLLGGQATNGALRSKTKIICTLGPVSRSVEMIEKLLKAGMNVARFNFSHGSHSYHQETLDNLRTAMDNTGILSAVMLDTKGPEIRTGFLKEGKPIQLNQGQEITISIDYMIEGDSNVISMSYKKLAEDVKPGDVILCSDGTISLTVLSCDKSFGLVRCRCENSAILGERKNVNLPGIVVDLPTLTEKDKEDIIQWGVPNKIDIIALSFVRKGSDLTEVRRLLGEHSKNIMLMSKVENQEGVMNCEKILENSDAFMVARGDLGMEIPIEKMFLAQKTMIKMANALGKPVVTATQMLESMTVSPRPTRAEATDVANAVLDGTDCVMLSGETAAGAHPEAAVLTMSRICKEAEDFIDYDILHKKTLGMVSLPLSPIESLAASVVSTAQSVFASAIVVLTKGGYTAELVAKYRPSVPILSVIVPEIAQGNDMEMSCSDSVAHAARRGLIYRRIIPVVATGSSARDSNKDATEEMINLAIGFAKTKGICKNGDSIVALHKIDGSSVVKIVTVE

SEQ ID NO: 8397 - DNA, 1479 bp, Arabidopsis thaliana
  CDS (1)..(1479)
atggagatgttacttggtggccgagcaaccaatggagctctccgttcaaagacgaagatagtttgtactcttggaccggtttcaagatcggtggagatgattgagaagcttctcaaggctgaaactctcgataatctccgaactgccatgaacaacactggtatcctctgcgccgtcatgctcgatacaaagggtcctgagatacgaaccggttttctcaaagaaggcaaaccgatacagctaaaccaaggtcaagagatcaccatctcaattgattacaagatagaaggagattcaaacattatctccatgagctacaagaaacttgcagaggacgtcaaacctggtgatgtgattctctgttcagacggcacaatctctttaactgtcttgtcctgtgacaagtctttcggtcttgttcgttgccgttgcgagaactctacaattctaggagaaagaaaaaacgttaatcttcctggaattgtagttgatctcccaacacttactgagaaagataaagaagatatcatccaatggggagttccgaacaaaatcgacatcatcgctctttcttttgttcgtaaaggatctgacctaactgaagttaggaagttacttggagaacactcaaagaacatcatgctcatgtcaaaggtggagaatcaagaaggggtcatgaattgtgaaaagattctggagaattctgatgctttcatggtggctagaggagatcttggaatggagattcagatcgaaaagatgttccttgctcagaaaacaatgatcaagatggctaatgctcttgggaaaccagttgtcacagccacacagatgcttgaatccatgacagtatctcctcgtccgactagagctgaagccactgacgttgcaaacgctgttcttgacgggacagattgcgttatgcttagtggagaaaccgctgcaggagctcaccctgaggctgccgtgctaacaatgtcaaggatctgtaaagaagcagaggatttcatcgattacgacattctccacaagaaaaccctaggaatgctttcgttaccgttatctccgatcgagagcttagctgcttcagttgtttcgacggcacagagtgtttttgcgtcggctatcgtcgttctcaccaaaggcggttacacggcggagcttgtggctaaatacaggccgagcgttccgattttgtcggtgattgtgcctgagattgctcaagggaatgatatagagatgtcgtgctcggactcggtggctcatgtggcgagacgtggtttgatttaccgtgggattattccggtggtggcgacgggatcatcggctagggattcaaacaaagatgcaacggaggagatgattaatttggctatcggattcgcgaagacgaagggaatttgcaagaatggagattcgattgtggcgttgcacaagattgatggttcctctgttgtgaagatagtgagcgttgagtaa

SEQ ID NO: 8398 - protein, 492 aa, Arabidopsis thaliana
MEMLLGGRATNGALRSKTKIVCTLGPVSRSVEMIEKLLKAETLDNLRTAMNNTGILCAVMLDTKGPEIRTGFLKEGKPIQLNQGQEITISIDYKIEGDSNIISMSYKKLAEDVKPGDVILCSDGTISLTVLSCDKSFGLVRCRCENSTILGERKNVNLPGIVVDLPTLTEKDKEDIIQWGVPNKIDIIALSFVRKGSDLTEVRKLLGEHSKNIMLMSKVENQEGVMNCEKILENSDAFMVARGDLGMEIQIEKMFLAQKTMIKMANALGKPVVTATQMLESMTVSPRPTRAEATDVANAVLDGTDCVMLSGETAAGAHPEAAVLTMSRICKEAEDFIDYDILHKKTLGMLSLPLSPIESLAASVVSTAQSVFASAIVVLTKGGYTAELVAKYRPSVPILSVIVPEIAQGNDIEMSCSDSVAHVARRGLIYRGIIPVVATGSSARDSNKDATEEMINLAIGFAKTKGICKNGDSIVALHKIDGSSVVKIVSVE

SEQ ID NO: 8399 - DNA, 1533 bp, Arabidopsis thaliana
  CDS (1)..(1533)
atgtcgaacatagacatagaagggatcttgaaggagctacctaatgatgggaggatcccaaagacgaagatagtttgcacattaggaccagcttctcgcactgtttccatgatcgaaaagcttttgaaagccggtatgaatgtggctcgcttcaacttctcacatggaagccatgaataccatcaagagacactcgacaacctccgctctgctatgcataataccggcattctcgctgctgtcatgcttgatactaaggggcctgagattcgtactggtttcttgaaagatgggaaccctatacaactgaaggaaggtcaagagattactataaccactgattatgacattcaaggagacgaatcaacgatatccatgagctataaaaagctgcctttggatgtgaagcccggaaacaccatactctgtgcagatggaagcataagtctagctgtcttgtcatgtgatcctgagtctggaactgttaggtgccggtgtgaaaactcggcgatgcttggtgaaagaaagaatgtgaatcttcctggcgttgttgttgatcttcccactttgacagataaggatattgaagatattctcggttggggtgttccgaacagcattgatatgattgctctttcgtttgtccgtaaaggttcggatcttgttaatgtccgcaaggttcttggatctcatgctaaaagcataatgctcatgtcaaaggttgagaaccaggaaggtgtgattaactttgatgagatcttgcgtgaaacagatgcgttcatggttgcccgtggtgatctcgggatggagattccgatagagaagatcttcttggctcaaaagttgatgatctacaagtgtaaccttgcgggtaaaccggtggtcacagccactcagatgctggagtcaatgatcaaatcacctcggccaacccgagctgaagccacagatgttgcaaatgctgttcttgatggtactgactgtgtgatgcttagcggtgagagtgcagcaggagcttatccggaaatagctgtgaaagtcatggctaagatctgcattgaagccgaatcctcgcttgattacaacacaatctttaaagagatgatccgagcaactccacttccaatgagcccactcgagagtcttgcatcatccgctgtacggactgctaacaaagcgagggcaaaactcatcattgtgttgacacgtggaggttcaactgctaatctcgtggctaaatacagaccggctgttccgattctgtcagtggttgtcccggttatgaccactgattcctttgactggtcttgtagtgacgagtcacctgcaaggcatagtctgatatacagaggtctaatccctatgttggctgaaggatctgcaaaggcaacagatagtgaagccaccgaagttatcattgaagctgctctgaagtcggctactcagagaggactgtgcaaccgtggtgatgcaatcgtggcgctgcaccgtattggagctgcctcagttattaagatctgtgtggttaagtga

SEQ ID NO: 8400 - protein, 510 aa, Arabidopsis thaliana
MSNIDIEGILKELPNDGRIPKTKIVCTLGPASRTVSMIEKLLKAGMNVARFNFSHGSHEYHQETLDNLRSAMHNTGILAAVMLDTKGPEIRTGFLKDGNPIQLKEGQEITITTDYDIQGDESTISMSYKKLPLDVKPGNTILCADGSISLAVLSCDPESGTVRCRCENSAMLGERKNVNLPGVVVDLPTLTDKDIEDILGWGVPNSIDMIALSFVRKGSDLVNVRKVLGSHAKSIMLMSKVENQEGVINFDEILRETDAFMVARGDLGMEIPIEKIFLAQKLMIYKCNLAGKPVVTATQMLESMIKSPRPTRAEATDVANAVLDGTDCVMLSGESAAGAYPEIAVKVMAKICIEAESSLDYNTIFKEMIRATPLPMSPLESLASSAVRTANKARAKLIIVLTRGGSTANLVAKYRPAVPILSVVVPVMTTDSFDWSCSDESPARHSLIYRGLIPMLAEGSAKATDSEATEVIIEAALKSATQRGLCNRGDAIVALHRIGAASVIKICVVK

SEQ ID NO: 8401 - DNA, 1740 bp, Arabidopsis thaliana
  CDS (1)..(1740)
atggctcaagtggttgctaccaggtcaattcaaggctcgatgttatctcccaacggtggatctgtgtctacaagatccgagaagctattgaaaccagcgagttttgcagtgaaggttcttggcaacgaagcaaagagaagtggaagagtctctgtaagaagcagaagagtggttgatactactgtgagatccgctcgtgttgagactgaagtcattcctgtttctcctgaagatgtgcctaacagagaggagcagcttgagaggttgttggaaatgcagcagtttggtgatacatcggtagggatgtggtcgaagccgacagtgaggaggaagacaaagattgtttgcaccgttggtccgtcgaccaacacacgagaaatgatatggaaattggctgaagctgggatgaatgttgctaggatgaatatgtctcatggagatcatgcttcacataagaaggttattgatttggttaaagaatacaatgcacaaactaaagacaacactattgctatcatgcttgacaccaagggtccggaagttaggagtggagatttacctcagccaattatgttagatcctggtcaagagtttacctttacaattgagagaggagtcagcacaccaagttgtgtcagtgttaactatgatgatttcgttaatgacgtggaagcgggtgacatgcttcttgttgatggtggtatgatgtcgtttatggtgaagtcaaagaccaaagactctgtcaaatgtgaagttgttgatggtggagaacttaagtcaaggagacacctgaatgtccgaggaaagagtgcaactttaccttcaatcactgagaaggactgggaggatattaaatttggagtggagaacaaagttgacttttatgcagtttcctttgtcaaagatgctcaagttgtacacgagttgaagaaataccttcaaaatagtggtgctgatatacacgtgatagtgaaaattgagagtgcagactccatacctaacttgcactccattatcacagcatcagatggggcaatggttgcaagaggtgatcttggtgcagagcttccaattgaagaagtccccattcttcaggaggagatcattaacctgtgccgtagtatgggaaaagctgttattgttgcgactaacatgcttgagagtatgatagttcatccaactccaacccgggcagaggtctcagacattgctatcgctgttagagaaggtgctgatgcggtaatgctttcaggagaaactgctcacggaaagttcccattgaaagctgctggagtgatgcacactgttgcattgcgaacagaagcaaccattactagcggtgaaatgccacctaatcttggtcaagccttcaagaaccatatgagtgagatgtttgcataccatgcaaccatgatgtcaaacacacttggaacttcaactgttgtcttcaccagaaccggtttcatggccatattgttaagtcactatcgtccttccggcacaatctatgccttcacaaatgagaaaaaaatacaacaaagattagctttgtatcaaggtgtatgccccatatatatggagttcacagatgatgcagaagaaacttttgctaatgctttggctacattactgaaacaaggaatggtgaagaagggagaggaaatagcaatcgtacagagcggtacacagccaatctggcgatctcaatcgacacataacatccaagtccgcaaggtttaa

SEQ ID NO: 8402 - protein, 579 aa, Arabidopsis thaliana
MAQVVATRSIQGSMLSPNGGSVSTRSEKLLKPASFAVKVLGNEAKRSGRVSVRSRRVVDTTVRSARVETEVIPVSPEDVPNREEQLERLLEMQQFGDTSVGMWSKPTVRRKTKIVCTVGPSTNTREMIWKLAEAGMNVARMNMSHGDHASHKKVIDLVKEYNAQTKDNTIAIMLDTKGPEVRSGDLPQPIMLDPGQEFTFTIERGVSTPSCVSVNYDDFVNDVEAGDMLLVDGGMMSFMVKSKTKDSVKCEVVDGGELKSRRHLNVRGKSATLPSITEKDWEDIKFGVENKVDFYAVSFVKDAQVVHELKKYLQNSGADIHVIVKIESADSIPNLHSIITASDGAMVARGDLGAELPIEEVPILQEEIINLCRSMGKAVIVATNMLESMIVHPTPTRAEVSDIAIAVREGADAVMLSGETAHGKFPLKAAGVMHTVALRTEATITSGEMPPNLGQAFKNHMSEMFAYHATMMSNTLGTSTVVFTRTGFMAILLSHYRPSGTIYAFTNEKKIQQRLALYQGVCPIYMEFTDDAEETFANALATLLKQGMVKKGEEIAIVQSGTQPIWRSQSTHNIQVRKV

SEQ ID NO: 8403 - DNA, 1497 bp, Arabidopsis thaliana
  CDS (1)..(1497)
atggcgatgatagagcaaaggccgaagacgaagatcgtttgtactctaggtccagcttccagatctgttccgatggtcgagaagcttcttagggctggtatgaacgttgctcgtttcaatttctctcatggatctcatgaataccatcaagagactctcgataatcttcatcaagctatgcttaacactgggattctctgtgccgtcatgctcgacaccaagggtccagaaatccgaaccgggttcttgaaagatgggaaaccaatccagctgaaacaaggacaagagatcactatttcgactgactatgacttgaagggtgacgagaacacgatttgcatgagctacaaaaagttggctgttgatgtgaacccaggaatggtcattctttgtgctgatggtacaatctccttactggttctctcttgtgacaaagagaacggtacagtccgttgccggtgtgagaactctgcgatgctcggtgagagaaagaacgttaatctcccaggtgttgttgtggatctcccaactctaactgagaaagacaaagaagacatcatgcaatggggagtcccgaatcaaatcgacatgattgctctgtcttttgtcaggaaaggttcagacttggttcaagtccggaaacttctaggaaagcacgccaaaaacattcttctcatgtctaaggtcgagaaccaagaaggtgtggcaaattttgatgacattttggtcaattcagacgctttcatgattgctagaggagatctgggcatggaaatcccgattgagaagatcttcttagctcagaaggtgatgatctacaaatgcaacatccagggaaaacctgtggtcacagcaactcagatgctcgagtccatgatcaaatctcctagacccacaagagccgaagctacggatgtagcaaacgcagtccttgatggtacagactgtgtcatgctcagtggtgaaactgcagctggagcataccctgaactagccgtccgtacaatggctaagatctgcgtggaagccgagagcacccttgactacggtgatgtcttcaagaggatcatgctgtactctccagttccaatgagtccactcgagtcacttgcatcttcagctgtcagaactgctaactcagctagagccactctcatcatggtcctaaccagaggaggaagcacagcaagacttgtggctaagtacagaccaggaatgcctattctatccgtcgttgttcctgagatcaaaaccgacttctttgactggtcttgcagcgatgaatcccccgcgagacacagccttatcttccgtggtctgatcccagtgctctacgctggatccgcaagagcctcacacgatgaatcaacagaagaagctatcgagtttgctactcagtacgggaaagagaaagagctatgcaagactggagattccgttgttgctctactccgagtcggtaatgcttccgtgatcaagatcttgaccgtcaagtga

SEQ ID NO: 8404 - protein, 498 aa, Arabidopsis thaliana
MAMIEQRPKTKIVCTLGPASRSVPMVEKLLRAGMNVARFNFSHGSHEYHQETLDNLHQAMLNTGILCAVMLDTKGPEIRTGFLKDGKPIQLKQGQEITISTDYDLKGDENTICMSYKKLAVDVNPGMVILCADGTISLLVLSCDKENGTVRCRCENSAMLGERKNVNLPGVVVDLPTLTEKDKEDIMQWGVPNQIDMIALSFVRKGSDLVQVRKLLGKHAKNILLMSKVENQEGVANFDDILVNSDAFMIARGDLGMEIPIEKIFLAQKVMIYKCNIQGKPVVTATQMLESMIKSPRPTRAEATDVANAVLDGTDCVMLSGETAAGAYPELAVRTMAKICVEAESTLDYGDVFKRIMLYSPVPMSPLESLASSAVRTANSARATLIMVLTRGGSTARLVAKYRPGMPILSVVVPEIKTDFFDWSCSDESPARHSLIFRGLIPVLYAGSARASHDESTEEAIEFATQYGKEKELCKTGDSVVALLRVGNASVIKILTVK

SEQ ID NO: 8405 - DNA, 1533 bp, Arabidopsis thaliana
  CDS (1)..(1533)
atgtcgaacatagacatagaaggaatattgaaggagctacctaatgatgggaggactcctaagactaagatcgtttgtacattaggtcctgcgtctaggtctgtgacaatgattgagaagcttcttaaagcaggcatgaatgtagctcgattcaatttctctcacggaagccatgagtaccatcaggagactcttgacaatctccgcaccgctatgcagaataccggcattctcgctgctgttatgcttgatacaaaggggcctgagattcgtaccggtttcttgaaagatgggaaccctatacaactaaaggaaggccaagagatcacaattaccactgattatgacatcaagggcgatgagaaaacgatttccatgagctacaaaaagctcccagtggatgtgaagcccggaaataccatactatgtgcagatggaagcataagtcttgctgtcgtgtcatgtgatccaaacgctgggactgttatatgtcgatgtgaaaatacagccatgctaggtgaaagaaaaaatgtgaatctcccaggtgttgttgttgatctccccacattgactgacaaggatgtagaagatattcttaaatggggtgttccaaacaacatcgatatgattgctctttcatttgttcgcaaaggttcagatcttgttaatgtccggaaagtccttggatcacattccaagagtataatgttgatgtcgaaggttgagaaccaagaaggagtcctgaatttcgatgagattttgcgtgaaactgatgcattcatggttgctcgtggtgatcttgggatggagattccgatagagaagatcttcttggctcagaagatgatgatctacaagtgtaaccttgcaggtaaaccggtggtcacagccactcaaatgctcgagtcgatgatcaaatcaccacggccaacacgagcagaagccacagatgtagcaaacgcagttctcgatggcactgactgtgtgatgcttagcggagaaagtgctgcaggagcttaccctgaaatagcagtgaaaacaatggctaaaatctgcatcgaggcggaatcatcgcttgactacaacacaatcttcaaggagatgattagagcaactccacttccaatgagcactcttgagagtcttgcatcatcagctgtacgaacggcaaacaaagccaaagccaaactcatcatcgtgttgaccagaggaggtacaacagctaaactggtggccaagtatagaccggctgttccaattctatcggtggttgttccggtcttcaccagcgatacgtttaactggagttgcagcgatgagtcaccggcgaggcatagtttgatatatagaggtctgataccggttttgggtgaaggatctgcaaaagcaactgatagtgaatccacagaggagattattgaatctgctttgaagtcagcgacagagaaaggactgtgtaaccatggtgatgctgtggtggctctgcaccgtattggagctgcttcggttatcaagatctgtgtggtgaagtga

SEQ ID NO: 8406 - protein, 510 aa, Arabidopsis thaliana
MSNIDIEGILKELPNDGRTPKTKIVCTLGPASRSVTMIEKLLKAGMNVARFNFSHGSHEYHQETLDNLRTAMQNTGILAAVMLDTKGPEIRTGFLKDGNPIQLKEGQEITITTDYDIKGDEKTISMSYKKLPVDVKPGNTILCADGSISLAVVSCDPNAGTVICRCENTAMLGERKNVNLPGVVVDLPTLTDKDVEDILKWGVPNNIDMIALSFVRKGSDLVNVRKVLGSHSKSIMLMSKVENQEGVLNFDEILRETDAFMVARGDLGMEIPIEKIFLAQKMMIYKCNLAGKPVVTATQMLESMIKSPRPTRAEATDVANAVLDGTDCVMLSGESAAGAYPEIAVKTMAKICIEAESSLDYNTIFKEMIRATPLPMSTLESLASSAVRTANKAKAKLIIVLTRGGTTAKLVAKYRPAVPILSVVVPVFTSDTFNWSCSDESPARHSLIYRGLIPVLGEGSAKATDSESTEEIIESALKSATEKGLCNHGDAVVALHRIGAASVIKICVVK

SEQ ID NO: 8407 - DNA, 1401 bp, Thermotoga maritima MSB8
  CDS (1)..(1401): transl_table=11
gtgcgaagtacaaagatcgtatgtacggtcggaccaagaacagacagctatgaaatgatagaaaagatgatagaccttggagtgaacgtcttcagaataaacacctcacatggtgactggaacgagcaggaacagaaaatactcaaaataaaagatctgagagagaaaaagaaaaaacccgtagccattctgatcgatcttgcggggccgaagatcagaaccggatacctcgaaaaagagtttgtggaattaaaagaaggccagatcttcactctcaccacaaaggaaatacttggaaacgaacacatagtctcggtgaatctcagctctcttccaaaggacgtgaagaaaggagacaccattctgctgagcgatggagagatagtgcttgaggtaattgaaacaaccgatacagaagtgaaaacagtggtgaaagtcggtggaaagatcacacacaggagaggtgtgaacgtaccgacggccgatctttcggtggaatccataacggacagagacagagaattcataaaactcggaacgttgcatgacgttgaatttttcgctctttcttttgtgagaaagccagaggacgtgctcaaggcaaaagaagagatcagaaaacacggaaaggaaatacctgtaatctccaaaatagaaacgaaaaaggctctggagcgtctcgaggagataataaaggtgagcgatggaatcatggtcgcacgcggtgacctgggagtggagatacccatagaagaagtccccatcgttcagaaagaaatcatcaaactctccaagtactactccaaaccagtcatagtcgcaactcagatactcgaatcgatgatagaaaatccgttccccacgagggcagaggtcaccgacatagccaacgccatcttcgatggagcggacgccctgctcctcacagcggaaacagcggttggaaaacatcccctggaagccataaaggtgctgagtaaagtagcaaaagaagccgaaaaaaaactggaatttttcagaacgatagaatacgataccagcgacatatctgaggctatatcacacgcctgctggcagctctctgaatctctgaacgcgaagctgatcatcacacctaccatatccgggagtaccgctgttcgtgtttcaaagtacaacgtttctcaacccattgtggccctgacaccagaagagaaaacctactacagactttctctcgtgaggaaggtgatacccgttctcgctgaaaaatgttcccaggaattagagtttatcgaaaaagggctgaagaaagtagaagaaatgggtttggcagaaaaaggggatctggtggttctcacttccggcgttccaggaaaggtgggaacgacaaacaccataagggtgttgaaggtggattga

SEQ ID NO: 8408 - protein, 466 aa, Thermotoga maritima MSB8
MRSTKIVCTVGPRTDSYEMIEKMIDLGVNVFRINTSHGDWNEQEQKILKIKDLREKKKKPVAILIDLAGPKIRTGYLEKEFVELKEGQIFTLTTKEILGNEHIVSVNLSSLPKDVKKGDTILLSDGEIVLEVIETTDTEVKTVVKVGGKITHRRGVNVPTADLSVESITDRDREFIKLGTLHDVEFFALSFVRKPEDVLKAKEEIRKHGKEIPVISKIETKKALERLEEIIKVSDGIMVARGDLGVEIPIEEVPIVQKEIIKLSKYYSKPVIVATQILESMIENPFPTRAEVTDIANAIFDGADALLLTAETAVGKHPLEAIKVLSKVAKEAEKKLEFFRTIEYDTSDISEAISHACWQLSESLNAKLIITPTISGSTAVRVSKYNVSQPIVALTPEEKTYYRLSLVRKVIPVLAEKCSQELEFIEKGLKKVEEMGLAEKGDLVVLTSGVPGKVGTTNTIRVLKVD

SEQ ID NO: 8409 - DNA, 1440 bp, Pasteurella multocida subsp. multocida str. Pm70
  CDS (1)..(1440): transl_table=11
atgtctagaagactaagaagaacgaagattgtatgtacaatgggaccgtcaacagagcgtgggaataatcttgaaaaaattatcatggctggcgcgaatgttgttcgtatgaacttttctcatggcacaccagaagatcatatcggtcgcgcggagaaagtacgtgaagtggcaaaaaaacttggaaaaaccgttgctattttaggtgatttacaaggccctaaaatccgtgtctcaactttcaaagatggtaaaattttcttaaatattggtgataaatttgtgcttgatgccgatttaccaaaaggtgaaggtacgcaagaaggtgttggtttagactacaaaacattaccacaagacgttgtgccaggcgatattttattgttagatgatggtcgtgttcaattaaaagtcttatctacagaaggtaataaagtttttactgaagtcactgttggtggtccattatcgaacaataaaggtattaacaagttaggcggaggtttatctgctgatgcattaactgaaaaagataaaaatgatattttattggcagcaaaaatcggtgtagattatttagcggtttctttccctcgttcaagtgcagatttaaactatgcgcgtgagttagctgaagctgcaggcttaaaagcaaaaatcgtggcaaaagtagaacgtgcagaaactgttgcaaccactgaagcaatggatgatattattttagcatcagatgtcatcatggtagcacgtggtgacttaggggttgaaattggtgaccctgaattagtgggtgtacagaaaaaattaatccgtcgcgcacgccaattaaaccgtgttgttattacagcaacacaaatgatggaatctatgattagcaatccaatgccgactcgtgcggaagtgatggacgtagcgaatgccgtattagatggtacagacgccgtgatgctttctgcagaaacagcggcagggcaatatccagcagaaacagtggctaccatggcaaaagtgtgtttaggtgctgaaaaaatgccaagcatcaatgtttctcgtcaccgtatggatatcacttttgattctatcgaagaatccgttgcaatgtctgcaatgtatgctgcaaaccacatgaaaggtgttgctgcaattattgcaatgacacatactggacgtaccgcgttattaatgtcacgtattagttctggtttaccgatttttgccttatctcgtaaccaagatgcattaaatctttgtgcattataccgtggtgttacacctgttcattttgatgaagtcagccgtaattcaaaaggtgcagctgcagcgattcgtttgttaaaagagaaaggtttcttagtatcgggtgatttagttcttttaactcaaggtgatgaattgttagcaagtggtacaaatacttgccgtacactagttgtagaataa

SEQ ID NO: 8410 - protein, 479 aa, Pasteurella multocida subsp. multocida str. Pm70
MSRRLRRTKIVCTMGPSTERGNNLEKIIMAGANVVRMNFSHGTPEDHIGRAEKVREVAKKLGKTVAILGDLQGPKIRVSTFKDGKIFLNIGDKFVLDADLPKGEGTQEGVGLDYKTLPQDVVPGDILLLDDGRVQLKVLSTEGNKVFTEVTVGGPLSNNKGINKLGGGLSADALTEKDKNDILLAAKIGVDYLAVSFPRSSADLNYARELAEAAGLKAKIVAKVERAETVATTEAMDDIILASDVIMVARGDLGVEIGDPELVGVQKKLIRRARQLNRVVITATQMMESMISNPMPTRAEVMDVANAVLDGTDAVMLSAETAAGQYPAETVATMAKVCLGAEKMPSINVSRHRMDITFDSIEESVAMSAMYAANHMKGVAAIIAMTHTGRTALLMSRISSGLPIFALSRNQDALNLCALYRGVTPVHFDEVSRNSKGAAAAIRLLKEKGFLVSGDLVLLTQGDELLASGTNTCRTLVVE

SEQ ID NO: 8411 - DNA, 1740 bp, Halobacterium sp. NRC-1
  CDS (1)..(1740): transl_table=11
atgagaaacgcgaagatcgtctgtacgctcggccccgcgaccaacgacgacgcgtcggtgcgggcgctcgcggacgccggcatgacggtagcacggatcaacgccagccacggcgacgcggccgcgcgccgggagctcatcgagaccacgcgggccgtcgacgcccagaccgacaagccgcttgcggtgatgctcgacacccaaggcccggaggtcaggaccgcaccgatcgacgacgacggcaccatccacatcgaaaccggcagcgacgtggcgttcgtcgagggcgacaccgcgacccccgatcggatcgggatctccaccagcatcgcggccgccgaacccggtgacacggtgttgctcgacgacggccgcatcgaggccgacgtcgaccgcgtcgccggcgacacggtgcacgccaccgtggtgtccggcgggagcctcggcagccggaagggcgtcaacgtgccgggcgtcgagctggacgtggacgtcgtcaccgagaaggaccgccgcgatctggcgttggccgccgagctggacgtcgattacgtggcggcgagcttcgtccgggacgccgacgacgtgttggccgtcaaccgcgtcctggagtcccacggtgccgacatccccatcgtggcgaagatcgagcgggcgggtgccgtggagaacctggacggcatcatcgacgccgcccagggcgtgatggtggcgcgcggcgatctcggcgtggagtgtccgatggaggacgtgccgatgatccaaaagcgcatcatcgcgcagtgccgggacgcgggggtgccggtgatcaccgcgaccgagatgctggactcgatggtgcacgcccggcgtccgacgcgcgcggaggccagcgacgtggccaacgcggtcctggacggcaccgacggcgtgatgttgtccgcggagaccgcggtgggggacaaccccacgcgggttgtcgagacgatggaccgcatcgtgcgggaggtcgaaggcagcgcggagtacagcgagcgccaggagcaggcggtgccgacggccgacgggacggcgaagacggacgcgctggcgcggtcggcgcggtatctggcccgcgacatcgacgccagcgcggtggtggtggcctccgagtcggggtacaccgcccggaaggccgcgaagttccggcccagcgtcccggtggtctgtgcgacgccgtcccacgacgtgcgccggcagctcgcgctcaactggggggtccacgccaactacgcggcggtcgcggagggcgacgcgacgacggtcgtcgagcgcgcggtgcaggcggccgtcgactccggcgtggtggcgagcggcgacaccgtggtggtgctcgtgggcatgatgacggagcttgagggcgcatcgacgacgaacacgctgaaagtgcacgtggccgcggagacgctctcgaccgggcgggcggtcgtcgacgggcggacgaccggccggacgtaccgtgccgacagcggggatctcagcgacgccccggagaacgcggtggtgctgttggcgcacgggttcgacggcgagttcgacggcgatctctcgaagatcggggcgatcgtgagcgcggacgccgggctgaccgggtatccggcggtgatcgcgcgcgaactcgacgtgccgatggtcggcgatgtcgacgtggacgcggtgccggctggcgatctggtgaccgtggacggcgagcgcggcgtcgtctacgaggccgatcagtga

SEQ ID NO: 8412 - protein, 579 aa, Halobacterium sp. NRC-1
MRNAKIVCTLGPATNDDASVRALADAGMTVARINASHGDAAARRELIETTRAVDAQTDKPLAVMLDTQGPEVRTAPIDDDGTIHIETGSDVAFVEGDTATPDRIGISTSIAAAEPGDTVLLDDGRIEADVDRVAGDTVHATVVSGGSLGSRKGVNVPGVELDVDVVTEKDRRDLALAAELDVDYVAASFVRDADDVLAVNRVLESHGADIPIVAKIERAGAVENLDGIIDAAQGVMVARGDLGVECPMEDVPMIQKRIIAQCRDAGVPVITATEMLDSMVHARRPTRAEASDVANAVLDGTDGVMLSAETAVGDNPTRVVETMDRIVREVEGSAEYSERQEQAVPTADGTAKTDALARSARYLARDIDASAVVVASESGYTARKAAKFRPSVPVVCATPSHDVRRQLALNWGVHANYAAVAEGDATTVVERAVQAAVDSGVVASGDTVVVLVGMMTELEGASTTNTLKVHVAAETLSTGRAVVDGRTTGRTYRADSGDLSDAPENAVVLLAHGFDGEFDGDLSKIGAIVSADAGLTGYPAVIARELDVPMVGDVDVDAVPAGDLVTVDGERGVVYEADQ

SEQ ID NO: 8413 - DNA, 1443 bp, Campylobacter jejuni subsp. jejuni NCTC 11168
  CDS (1)..(1443): transl_table=11
atgcttaaaaaaacaaaaattgtagccacagtaggtccagcaagtgaaaaggaagaaattctacgccaaatgattatcaatggtgtaaatgttttccgtttaaacttttctcatggaacacatgagtatcataaaaaaaacttagataccataagaagagtagctaaagaattgcatactcgtattggaattttacaagacattagtggtcctaaaattcgtacaggtgaacttaaagaaccatttgaattaaaaaagggtgatagacttgatttttatcgtgaaacaattttaggggagaagattgctcaaaatcattataaaatcagtatcaatcaaaaatccattttagatatgttaaaaattgatgaatatatttatctgtatgatggatcaattcgtgctaaagtagtaaatatagataatcaaaaaattgaaaccattatagaaaatgatggttttttaaactcaaataaaggtattaattttccgaatactaaaatcaatattgatgttattacacaaaaagataaaaatgatttactttggggtataaaaaatgaagtagattttttagcaatatctttcgtacaaaatgcgcacgatattgatgaagttcgtgaaattttagcacaaaataacgcaaaaatatctatttttgcaaaaattgaaaaatttgatgcagtagaaaatattgatgagattattaaatctagcgatggtataatggttgcaagaggagacttaggtattgaggtaccttattataaagttcctaatatccaaaaagaaattatacaaaaagcaaacaatgcctctaagcctgttattactgcgactcagatgcttttttcattagccaaaagcaaaaccgccacaagagctgaaatttcagatgttgcaaatgctgttttagatggaacagatgcagtaatgctaagtgaagaaagtgccgttggtatagatcctgcaaacgctgttgatataatgtgccaaactataatagaaacagaaaaacgctatccatataacaaatttaatgattttaatgatttagacaatacagataaaatcatgcgttcttcagctcatcttgcaacagatcttaacgctgatgctattttttctttaacaagtagcggaaaatctgctattaagattgcgagatatcgtccaaatatagaaatcatagcagtagggcattctgaaaaaaccttaaactctttaagtatagtttggggagttaatcctgcaatcttggttaacaaaagtaatgaacttacagaattattaaaagactctgtaagatcaagtgttgaaaaaggttttatggatgaagataaatgctatcttctaactgcaggctttccaacaggagtagaaggtactagcaatcttatccgcattctcaataaagagcaaattgcttattatctacaataa

SEQ ID NO: 8414 - protein, 480 aa, Campylobacter jejuni subsp. jejuni NCTC 11168
MLKKTKIVATVGPASEKEEILRQMIINGVNVFRLNFSHGTHEYHKKNLDTIRRVAKELHTRIGILQDISGPKIRTGELKEPFELKKGDRLDFYRETILGEKIAQNHYKISINQKSILDMLKIDEYIYLYDGSIRAKVVNIDNQKIETIIENDGFLNSNKGINFPNTKINIDVITQKDKNDLLWGIKNEVDFLAISFVQNAHDIDEVREILAQNNAKISIFAKIEKFDAVENIDEIIKSSDGIMVARGDLGIEVPYYKVPNIQKEIIQKANNASKPVITATQMLFSLAKSKTATRAEISDVANAVLDGTDAVMLSEESAVGIDPANAVDIMCQTIIETEKRYPYNKFNDFNDLDNTDKIMRSSAHLATDLNADAIFSLTSSGKSAIKIARYRPNIEIIAVGHSEKTLNSLSIVWGVNPAILVNKSNELTELLKDSVRSSVEKGFMDEDKCYLLTAGFPTGVEGTSNLIRILNKEQIAYYLQ

SEQ ID NO: 8415 - DNA, 1449 bp, Deinococcus radiodurans R1
  CDS (1)..(1449): transl_table=11
atgaaacactttgaccgtgccaccaaaatcgtggcgactgtcggccccgccagccgcagcaccgaagttctcgggcgcatgatcgacgttggcctgaacgtggtccgcctcaacttcagccacggcgacctcgaagaccaccgtcagacggtgcagatggtgcgtgacctcgccgtgagcaagggcgtgaccatcggtatcctgcaagacctgcaaggccccaagattcgggtgggccgctttgccgaaggttcggtgaccctgaatcccgggcagaagttcgtcatcacgatggacgaggtggagggcaatgccgagcgcgtgggcagcacctacaagggcctcgccggtgacgtgacccccggcatgacgctgctgctcgacgacggcaacatgagcctgcgggtggaccacgtgcgcggcaacgacattcagacgactgtcctgatcggcggcacgttgaaaaacaacaagggcatcaacgtgcccgaagccgacctgaccgtgcccgcactgtcggaaaaagatgtgcaggacatggaatttggcgcgagcctcggcgtggactgggtggccttgagcttcgtgcgctcgcgcgatgacctgctgctcgcccggcattacctcgcccgcttcggcagccgcgccaagctgatggccaaaatcgagaagccgcaggcggtggaccgcttcgccgacatcctcaaggaagtggacggcgtgatggtggcgcgcggcgacctcggtgtggaaatgcgccccgagcaggtgccgaccatccagaaacgcatcatccgcatgtgccgtgaggcgggcaagccggtcattacggccacccagatgctcgaaagcatgatcaacctgccgcgccccacccgcgccgaggcgtcggacgtggcgaacgctatttatgacggcaccgacgcggtgatgctttccgccgaatcggcggcgggccagtacccggtcgagtcggtcgctatgatggaccgtattgcccgcgaggccgaagcgagcgagctttaccagttgatgcagcgtcaggtcgtgatggacaccgagcaggcgcaggacgccattgcgctcgccgcctgcaacatcggggctaagctcgaagcgcccgccatcgtgacctttaccagcacgggcggggcggccacccgcatttccaagaaccgtccgccgctcgccatcgtcgcgctgacccccaacgagatcacccgcaaccagctcgcgctttcctggggcgtctaccccatgctcagcgaagaccccgaggacaccgatgacatggtacgcatcgccaacgacgagctgaaaaagagcggcctggccgacgtgggcgaccgctacgtgattacggcgggcgtgcccttcggcgtgcgcggcaccaccaatatgctgcgcgtggaaaagttgaaggccgaggacttgtcggaccgcgtttaa

SEQ ID NO: 8416 - protein, 482 aa, Deinococcus radiodurans R1
MKHFDRATKIVATVGPASRSTEVLGRMIDVGLNVVRLNFSHGDLEDHRQTVQMVRDLAVSKGVTIGILQDLQGPKIRVGRFAEGSVTLNPGQKFVITMDEVEGNAERVGSTYKGLAGDVTPGMTLLLDDGNMSLRVDHVRGNDIQTTVLIGGTLKNNKGINVPEADLTVPALSEKDVQDMEFGASLGVDWVALSFVRSRDDLLLARHYLARFGSRAKLMAKIEKPQAVDRFADILKEVDGVMVARGDLGVEMRPEQVPTIQKRIIRMCREAGKPVITATQMLESMINLPRPTRAEASDVANAIYDGTDAVMLSAESAAGQYPVESVAMMDRIAREAEASELYQLMQRQVVMDTEQAQDAIALAACNIGAKLEAPAIVTFTSTGGAATRISKNRPPLAIVALTPNEITRNQLALSWGVYPMLSEDPEDTDDMVRIANDELKKSGLADVGDRYVITAGVPFGVRGTTNMLRVEKLKAEDLSDRV

SEQ ID NO: 8417 - DNA, 1506 bp, Xylella fastidiosa 9a5c
  CDS (1)..(1506): transl_table=11
gtgttactttggctagcttctgtgaaagaggctttctttatgtctgaacgccagcgccgtaccaggattcttgccactctcgggccagcgacagatccgcccggtgtgcttgatgcgctgtttaaggcgggagttaatgtggtgaggctgaatttcagccatggcgatgcttcggatcaggccaggcgtgctgctgaagtgcgtgcggcggcggcgcatgtgggcgttgagattggcattcttgcggatctacccggtccgaagatccgtattggacgttttaccgaggggaaagtgcggcttgtggctgatgcgcgctttgatctgcttgccgatagcaatgcaccgctgggggatgcgactcaagttggggtcagttatctggggttgccgcaggatgtcgccgccggagacgtgttgttactggatgatggcctcatgcaattgcaggtggtgcaagtgcagggcgcacggattgtgacgacggtgcttaacgatggtgtgttgtcggaccgtaaggggttgaataagcaaggcggcggtttgtcgctgggtgcgctgacggatcgtgatcgcgaactgattggcatcgtttccaggatgggggtcgactttattgcagtttcgttttgtcgtcatgctgaagagatgcatgaggcgcgtcgcattgctcgggagtgcggctgtgatgctgcgctggtgtctaagatcgagcgtgctgaggctatcgtgaatcttgccgagattgttgcggcttcggatgtggtgatggttgcgcgtggtgatttaggtgtggagattggtgacgctcaattgccgggcttgcaaaaaaagatcatcaaagaagcgttgctacagaacaaggtggtgattactgccacgcagatgctgcaatcaatggttgaaagtccgatgccgactcgtgctgaggtgctggatgtggccaatgcggtgattgatgggaccgatgcggtgatgctgtcggctgaaacggcgacaggtgattatccagtcaaggcagtagaggcgatggcgcgtatctgtctgggagcggaacaccagtttgagtttgatactgattatgagatggcgcagcgtaatttgcagcgtgcagatcatgcgattgcaatggcaacgatgttcttatctgagcacatttgccttggtggtgtggttgcattgacggagtccggtacgacgccacggtttctctcgcggttccggtcgcacgtcccgatctatgcgtttacgcgtcacgaggatgtgcggcggcgcatggtgctgatgcgtggtgtatttccgatgcgttttgacagccgtggtttgacgccgcgtgaggcagccagggcgacaatccgtcttttggtggaatgtggttgtatgagtccgggggatcgtgtggtgttcacgagcggcgagcatatggaaacgcttggcgcaaccaatacgctgcgtttacttgaagtaggcgctgatgggggtgtcagtggtctgtgggaactctaa

SEQ ID NO: 8418 - protein, 501 aa, Xylella fastidiosa 9a5c
MLLWLASVKEAFFMSERQRRTRILATLGPATDPPGVLDALFKAGVNVVRLNFSHGDASDQARRAAEVRAAAAHVGVEIGILADLPGPKIRIGRFTEGKVRLVADARFDLLADSNAPLGDATQVGVSYLGLPQDVAAGDVLLLDDGLMQLQVVQVQGARIVTTVLNDGVLSDRKGLNKQGGGLSLGALTDRDRELIGIVSRMGVDFIAVSFCRHAEEMHEARRIARECGCDAALVSKIERAEAIVNLAEIVAASDVVMVARGDLGVEIGDAQLPGLQKKIIKEALLQNKVVITATQMLQSMVESPMPTRAEVLDVANAVIDGTDAVMLSAETATGDYPVKAVEAMARICLGAEHQFEFDTDYEMAQRNLQRADHAIAMATMFLSEHICLGGVVALTESGTTPRFLSRFRSHVPIYAFTRHEDVRRRMVLMRGVFPMRFDSRGLTPREAARATIRLLVECGCMSPGDRVVFTSGEHMETLGATNTLRLLEVGADGGVSGLWEL

SEQ ID NO: 8419 - DNA, 1440 bp, Agrobacterium tumefaciens str. C58
  CDS (1)..(1440): transl_table=11
atgaagcgtaaccgcaaagtcaaaattcttgcaactctcggcccggcctcttccgaagaggccatgatcgaaaagctgcatcttgctggcgctgatcttttccggatcaacatgagccatgcgagccacgacgtgatgcggacgctcattcagcgtatccgctctgtcgaaagccgcaacggccgtcccatcggcattctggccgacctgcagggtcccaagctgcgcgtcggaaaattcgccgagacgaaggtcgatctggttccgggccagaccttcacgcttgataacaacgacacccccggcgacaacacccgcgttttcctgccgcatcctgaaattctcgaggcggtcaagcccggccaccgtctgctgatcgatgacggcaagctgcatctgcgcgctgaaaagagcgacggcaagagcatcgtcaccacggtcgtttccggcacccggatttccgaccgcaagggcatcagcctgcccgacaccctgctcggcgtcggcgttctgaccgacaaggaccgcgtcgacctcgatgccgttctcgagaccaacgaagtggactgggttgctctttccttcgttcagcgccctgaagacctggcagaagtgcgcaagatttcccgcggccgcgttggcctgatgtccaagatcgaaaagccgcaggctgttgaacgcatcgaggaaatcatcgagctttccgatgcattgatggttgcgcgcggcgatcttggcgtggaaatgccgttggaagccgttccgggcatccagaagcagctgacccgtgcctgccggcgcgccggcaaacccgtcgtcgttgccacccagatgctggaatcgatgataacggcaccggttccgacccgcgcggaagtatcggacgttgcaacggccgtattcgaaggcgccgacgccatcatgctctcggctgagtccgcttccggcgattatccgatcgaagccgtatcgaccatggcgtctatcgccagcacggtggaacaggacccctattattccaacatcatctacgcgcagcgtccgcagccggaagcaaccggtgccgacgccatttcgcttgccgcccgccagatcgctgaaacgctgaagcttgcggcgatcgtcacctatacgtcctcgggcacgaccggcctgcgcgccgcgcgcgagcggccgcaggtgccgatcattgcactgtcaccgatcatccagaccgcacgccgcctgtcggtcgtctggggcctgcactgcgtcgtcaccggcgatgccagcgatctggacgacatggtgaaccgcgcttgtcgcatcgttgtttccgaaggtttcggcaagcccggtgatcgcatcatcatttccgccggcgtgccgctcggcacccccggcgcaaccaacatggtgcgcatcgcctatatcggctcggacggccagagcggcgtctga

SEQ ID NO: 8420 - protein, 479 aa, Agrobacterium tumefaciens str. C58
MKRNRKVKILATLGPASSEEAMIEKLHLAGADLFRINMSHASHDVMRTLIQRIRSVESRNGRPIGILADLQGPKLRVGKFAETKVDLVPGQTFTLDNNDTPGDNTRVFLPHPEILEAVKPGHRLLIDDGKLHLRAEKSDGKSIVTTVVSGTRISDRKGISLPDTLLGVGVLTDKDRVDLDAVLETNEVDWVALSFVQRPEDLAEVRKISRGRVGLMSKIEKPQAVERIEEIIELSDALMVARGDLGVEMPLEAVPGIQKQLTRACRRAGKPVVVATQMLESMITAPVPTRAEVSDVATAVFEGADAIMLSAESASGDYPIEAVSTMASIASTVEQDPYYSNIIYAQRPQPEATGADAISLAARQIAETLKLAAIVTYTSSGTTGLRAARERPQVPIIALSPIIQTARRLSVVWGLHCVVTGDASDLDDMVNRACRIVVSEGFGKPGDRIIISAGVPLGTPGATNMVRIAYIGSDGQSGV

SEQ ID NO: 8421 - DNA, 1317 bp, Sulfolobus tokodaii str. 7
  CDS (1)..(1317): transl_table=11
atgtttagaaagaccaaaattatcgcgactttgggacctagtagtgaaaatcacattgatgaattagtaaagtatgtagacgtaataaggttaaatttcgcgcatggagataaagaacagcatgaaaagtactttaatctagtaaaaaatagagttcctattctagtagatttgccagggccaaagcttaggatcggtgatttagggaaaaatatgatattacttaaacctggagataccatagaatttggaactcaaatccccgtagatgatattttattctttaaacttatcagaaaaggttcagaggtactaatatctgatggaagaattagagtaaaaataatagaggctggaaacaattacgctaagggattagtagaagaaggaggtattttaacatccagaaagggtataaacatcccagattccgaaataccagtaggattgactgatagggatttagagttattaaaatatgctttagaaatgggagcaacatttattggactctcatttgtaacttcaccagaggagattagaaaagctaaagaaattgttaaagaccaagcctggataatagctaaaatagagaaaaaatctgcgttaaagaagttgaaagagataataagggaagccgatggtgtaatggttgctagaggcgatttgggagtagaagtaggtttagctaatttaccacaaactcagagaagaattgttagactgactagattatatggtaagcccgtaattttggccacacaagtgcttgagtcaatggttacttctccaattccaactagagctgaagtgattgatgttgcaaattcaataattcaaggtgttgatgcgataatgcttagtgatgaaactgccatgggccaatatcctatagatgctgtaaggactttgcatgagctaatattaagtgttgagagatcttttaaacccagacctccaccaccactaaaaaatatagatgatgcaatagcatattcagctgtatctgcttcaaatctggcttcttcatctggtatagtagtttatactaggactggtgcttcagcactaaggatatctaggttaagaccagtagttccaataatagtattaactcaaaatcaaagggtctacgagagactaaaactttgttatggaatctactcttttatttcagaagaattaaatagtctagataatattgttgaaaagagcaaaaacatagctagacaagtaggtttaaagaacactataataataattgctggtggaatagaagaagggtcaactagatttttaaaagttgaggagatctaa

SEQ ID NO: 8422 - protein, 438 aa, Sulfolobus tokodaii str. 7
MFRKTKIIATLGPSSENHIDELVKYVDVIRLNFAHGDKEQHEKYFNLVKNRVPILVDLPGPKLRIGDLGKNMILLKPGDTIEFGTQIPVDDILFFKLIRKGSEVLISDGRIRVKIIEAGNNYAKGLVEEGGILTSRKGINIPDSEIPVGLTDRDLELLKYALEMGATFIGLSFVTSPEEIRKAKEIVKDQAWIIAKIEKKSALKKLKEIIREADGVMVARGDLGVEVGLANLPQTQRRIVRLTRLYGKPVILATQVLESMVTSPIPTRAEVIDVANSIIQGVDAIMLSDETAMGQYPIDAVRTLHELILSVERSFKPRPPPPLKNIDDAIAYSAVSASNLASSSGIVVYTRTGASALRISRLRPVVPIIVLTQNQRVYERLKLCYGIYSFISEELNSLDNIVEKSKNIARQVGLKNTIIIIAGGIEEGSTRFLKVEEI

SEQ ID NO: 8423 - DNA, 1431 bp, Caulobacter crescentus CB15
  CDS (1)..(1431): transl_table=11
atgatccgcgcccgtcgctcgcgcatcgtcgccaccctcggtccggcgtcgagctctttcgacatgatcgtcaccctggccaaggccggggctgacgtctttcgcctgaacttcagccacggcgcccacgagacccacgcggccgtctatgcggccattcgcgaggcggagaaggtcgtcaatcgcccgctgggcgtgctggccgaccttcaggggcctaagctgcgcgtcggcaagttcgccgatggtccggtgatgctgaaggccggccaggcgttccgcttcgacagcgatccggcgccgggcgacgagacgcgcgtgcatctcccgcacccggaaatcctgaccgccatgcggccgggcgcgaccctgctgctggacgacggcaagctgcggatgaccgtgacggatgcgggccccggctacgccaacaccaaggtcgtcaacagcggcaaactgtcggaacgcaagggcgtagcggtgccggatgtcgtcatcccgatgtcgccgctgaccgccaaggaccgtgaggacctggccttcgccctgcgcctgggcgtggactgggtggcgctgtcgttcgtgcaggcccctgaggatatggccgagctgcgccggatcgtcgaaggccgcgccgccgtgctggccaagatcgaaaagccgcaggcgctgaaggtgctgggcccgatcctggatctctgcgacggcgtcatggtggcgcgtggcgatctcggcgtcgaaatggcgcccgaggaggtgccggtcgcccagaaggaaatcctgcgcgcggcgcgtgagcggggcattcccgtgatcgtcgccacccagatgctggagtcgatgaccagctcgccgacccctacgcgggccgaggcgtcggacgtcgccaacgccgtctatgagggcgccgatgcggtgatgctgtcggcggagtcggcggcgggtgactatcccgaagagtcggtctcgatgatgaaccgcatcatcgaacgcgttgagcgtgacccgaagtggccagagctgatgtacgccgagcagagccacgacgacgtggacgccgacgtgctggtggtcgccgccgccggggcggccaagtcggggtccaccaagtgcctcgtggccttcaccaccacgggcgcgaccgcgcgccgcctctcgcgcgagcgccccttgcagccggtgctggccctgtcgcccgagatcagcgccgtgcgtcgcatgtgcctggtctggggtgtggagccgcgcgtcagcgctcagcccgacagcctggaggtcgtcacgacggacgcgtcgagcaaggcgttggagcttgggctggtggcgcccggtgagcgactgctggtcgtcgcgggcacgcccttcggcgctccgggcgcagcgaaccttctgcgcctggcgcatgcgcccgcgccggcgcgccggcgttag

SEQ ID NO: 8424 - protein, 476 aa, Caulobacter crescentus CB15
MIRARRSRIVATLGPASSSFDMIVTLAKAGADVFRLNFSHGAHETHAAVYAAIREAEKVVNRPLGVLADLQGPKLRVGKFADGPVMLKAGQAFRFDSDPAPGDETRVHLPHPEILTAMRPGATLLLDDGKLRMTVTDAGPGYANTKVVNSGKLSERKGVAVPDVVIPMSPLTAKDREDLAFALRLGVDWVALSFVQAPEDMAELRRIVEGRAAVLAKIEKPQALKVLGPILDLCDGVMVARGDLGVEMAPEEVPVAQKEILRAARERGIPVIVATQMLESMTSSPTPTRAEASDVANAVYEGADAVMLSAESAAGDYPEESVSMMNRIIERVERDPKWPELMYAEQSHDDVDADVLVVAAAGAAKSGSTKCLVAFTTTGATARRLSRERPLQPVLALSPEISAVRRMCLVWGVEPRVSAQPDSLEVVTTDASSKALELGLVAPGERLLVVAGTPFGAPGAANLLRLAHAPAPARRR

SEQ ID NO: 8425 - DNA, 1758 bp, Listeria monocytogenes EGD-e
  CDS (1)..(1758): transl_table=11
atgaaaaaaacgaaaattgtttgtacaattggtcctgcaagtgagtcagttgacacattagttcagttgattgaagcaggaatgaacgtagcacgccttaatttctctcacggagattttgaagagcacggtgcgcgtattgtaaatatccgtgaagcatcgaaaaaaactggtaaacaagtggctatcttacttgatacaaaaggtccagaaatccgtacaaacgacatggtcggtggaaaattagaattccaaacaggtgatgttgtacgtgtttctatgactcctgttgaaggaacaaaagaaaaattctctgtaacttacggagaactttatgatgacgtagaaattggttcttccattttacttgatgacggcttaatcggtcttgaagtaatcgaaaaagacgaagctaatcgcgaactagtaactaaagtacttaaccctggcgtacttaaaaataaaaaaggtgttaacgtacctaacgtttctatcaacctaccaggaatcacagaaaaagatgctgctgatatccgctttggtttagaacaaggtatcgactttatcgctgcatctttcgtacgtcgtgctacagatgttcttgaaattactaaaattttagaagagcataacgcaactcacgtacaaatcattcctaaaatcgaaaaccaagaaggcgttgacaatatcgacgaaatcttgcaagtatctcaaggcctaatggttgctcgtggtgaccttggtgttgaaattccagctgaagaagttccgattgtacaaaaagaacttatcagaaaatgtaataaacttggtaagcctgttattactgcaacacaaatgcttgattccatgcaacgtaacccacgtccaactcgcgctgaagcaagtgacgtagcgaatgcgatttttgatggaacagatgctattatgttatccggtgaaacagctgctggggattatccagtagaagcagttaaaatgatggcgaaaatcgctgttcgtacagaagaagtactagttgctcaagataaatttgcacttaaacttcacgaaaatacggatatgacagaagctatcggtcaagcagttggccatactgcgaaaaacttaaacgttcaaactatcgttgctgcgactcaaagtggtcacacagcgcgtatgatctctaaatatcgtccaaaatctcatatcgttgctgtaacattcaacgagcatgtataccgtggtttagcactttcatggggtgtttatcctcgtctagctactccagttagcaacacagatgaaatgttcgaccttgcagtgaaagaatctcttgcttctggcgttgcaaaacaaggcgacttaattatcatcactgctggtgttccagttactgaaagtggaacaacaaacgtaatgaaaatccaattaattggtgaaaaagtagttaaaggccaaggaattggcagcaaatctgttatcggtaaagcaatcgttgctaaatccaatgcagaagcacttgaaaaagcagaagaaggcggaatcttaatcgttaaaacaacagataaagaaatccttcctgcattcgagaaaagtgctgcagttgttgtggaagaaggcggcttaactagccacgcagcagttgttggaatcaaccttggcattcctgttatcgttggtgctaaagatgcaacatctcttgtaaaagatggtgaaatcatcacagttgattctcgtcaaggtgttgtatataacggcaaaacagcaacacattaa

SEQ ID NO: 8426 - protein, 585 aa, Listeria monocytogenes EGD-e
MKKTKIVCTIGPASESVDTLVQLIEAGMNVARLNFSHGDFEEHGARIVNIREASKKTGKQVAILLDTKGPEIRTNDMVGGKLEFQTGDVVRVSMTPVEGTKEKFSVTYGELYDDVEIGSSILLDDGLIGLEVIEKDEANRELVTKVLNPGVLKNKKGVNVPNVSINLPGITEKDAADIRFGLEQGIDFIAASFVRRATDVLEITKILEEHNATHVQIIPKIENQEGVDNIDEILQVSQGLMVARGDLGVEIPAEEVPIVQKELIRKCNKLGKPVITATQMLDSMQRNPRPTRAEASDVANAIFDGTDAIMLSGETAAGDYPVEAVKMMAKIAVRTEEVLVAQDKFALKLHENTDMTEAIGQAVGHTAKNLNVQTIVAATQSGHTARMISKYRPKSHIVAVTFNEHVYRGLALSWGVYPRLATPVSNTDEMFDLAVKESLASGVAKQGDLIIITAGVPVTESGTTNVMKIQLIGEKVVKGQGIGSKSVIGKAIVAKSNAEALEKAEEGGILIVKTTDKEILPAFEKSAAVVVEEGGLTSHAAVVGINLGIPVIVGAKDATSLVKDGEIITVDSRQGVVYNGKTATH

SEQ ID NO: 8427 - DNA, 1770 bp, Nostoc sp. PCC 7120
  CDS (1)..(1770): transl_table=11
atgcaattaagagattctgtacgccggacaaaaatcgtcgctacaattggccctgccactagtagccccgaaatgctgaaagccatcattgaagcgggtgcaacaacgctgcgactcaacttttcccacggttcccacgccgaccatcagcgtagtattcgcctaattcggcaaaccgcttttgaactaaatcagccagtggcaattctccaagatttgcaagggccaaaaattcgcttgggaaagtttgaaaacgggtctatagttttagctaaaggcgatcgcttcaccttaacaaatcgcccagttgttggtagtcaagaaattagctgtgtcacctacgattatttggcagatgaggtccctgtaggtgcaaaaatcctcctggatgatggccgtgtagaaatggtggtagaggatatcaaccgcgacaaaggggatttgaactgtcgggtgactgtagcaggtaagttatctaataacaaaggtgttaactttcctggcgtttatctctcaattaaagccatgaccgacaaagatcgtgaggatctgatgtttggtctagatcagggtgttgattgggtagccctttcctttgtccgcaatccgcaagacatcattgaaattaaagagctaatttccagcactggtaaacaagtgccggtagttgccaaaatagaaaagcatgaagcgatcgaacaaatggaagcagttctcgctttatgtgatggcgtaatggtggctagaggcgatttaggtgtagaactaccagcagaagatgtccccgtactacaaaagcgcttaattgccacagcaaaccgcttggggattcccatcatcactgctactcaaatgttagatagcatggtgagcaatccccgtcccacccgcgcggaagtgtccgatgtagccaatgccattcttgatggtacagatgcggtcatgctctccaatgaaacggctgtgggtagctacccagtggaagcagtggcgacaatggcaagaattgccgaacgcatcgagcaggaagaagctatggctagtaaattacgccaaatgcgagataaccgccgttctattcccaacgccatcagccaagctgtaggtcaaattgctgaacagttgggagcagcagcaattatgactctcacccaaacaggggcgactgcacgcaacgtttccaaattccgcccccaaacaccaatcttggcagtaacaccccacgttaacgtagctcgtcaactacaaatggtgtggggcgtaaaacctttgttggtcttagaattaccttccactggtcaaactttccaagccgccattaacgtcgcccaagagcatagtttactgtttgaaggtgatttagtcgtgatgacagccgggacgttacaaggggtatctggctcaacggacttgattaaagttgaagtggtaacggcagttctaggacagggaattggtctaggacagggtttggtaagcggttgtgctagggttgctcacaccgggatggatgtggggaactttaacgctggtgatattttggttgcaccccgcacaggtgcagattttgtcgaggcgattcgcaaagccggcgggattattacagaggatgaaagtttaactagtcatgcggcggtgattggtttacgcctgggtgtgccggtgattgtaggtgtgaagaaagccacgcaagttatccgtgatggagcaattttgactctggatttgcaacgaggtttagtttattccggagcagtaggaactccttaa

SEQ ID NO: 8428 - protein, 589 aa, Nostoc sp. PCC 7120
MQLRDSVRRTKIVATIGPATSSPEMLKAIIEAGATTLRLNFSHGSHADHQRSIRLIRQTAFELNQPVAILQDLQGPKIRLGKFENGSIVLAKGDRFTLTNRPVVGSQEISCVTYDYLADEVPVGAKILLDDGRVEMVVEDINRDKGDLNCRVTVAGKLSNNKGVNFPGVYLSIKAMTDKDREDLMFGLDQGVDWVALSFVRNPQDIIEIKELISSTGKQVPVVAKIEKHEAIEQMEAVLALCDGVMVARGDLGVELPAEDVPVLQKRLIATANRLGIPIITATQMLDSMVSNPRPTRAEVSDVANAILDGTDAVMLSNETAVGSYPVEAVATMARIAERIEQEEAMASKLRQMRDNRRSIPNAISQAVGQIAEQLGAAAIMTLTQTGATARNVSKFRPQTPILAVTPHVNVARQLQMVWGVKPLLVLELPSTGQTFQAAINVAQEHSLLFEGDLVVMTAGTLQGVSGSTDLIKVEVVTAVLGQGIGLGQGLVSGCARVAHTGMDVGNFNAGDILVAPRTGADFVEAIRKAGGIITEDESLTSHAAVIGLRLGVPVIVGVKKATQVIRDGAILTLDLQRGLVYSGAVGTP

SEQ ID NO: 8429 - DNA, 1437 bp, Brucella melitensis 16M
  CDS (1)..(1437): transl_table=11
atgaagcgcaaccgcaaggtcaagattctcgccacgctaggtccagcctctggcgaggaagccgtcatccgcaagctctttgaagcaggagcggatgtcttccgcatcaatatgagtcacgccgaccatgacctgatgcgaaccttggtcaagcgcattcgcaatgtggaaaaggaactgggacgccccatcggcattctggccgatcttcaggggccgaagctgcgcgtcggcaagttcaaggatggcaaggtcgatctcgttcccggccagaccttcaccctcgacaataacgaggcgctgggcgatgaaacccgcgttttcctgccgcatcctgaaattctggaagctgtcgagccgggccatcgcctgttgatcgatgacggaaagctgcatctggtggctgaagcctgcgacggcaagtcgatccgctgcaaggttgtttccggcacccgcatttccgaccgcaagggggtcagccttcccgacacgacgctcggcgttggcgcgctgacggagaaagaccgctgcgatcttgatgccgtgctgaaggaagagatcgattgggtggcgctttcctttatccagcgcccggaagatctggccgaagtgcgcaaggtttcgcgcggcaaggtcggcctcatgtccaagatcgaaaagccgcaggctgttacccgtcttgatgaaattatcgagctttccgacgccttgatggttgcccgcggcgatctcggtgttgaagtgccgcttgaaaacgttcccggcattcaaaagcagattacccgcaaggcgcgtcgcgccggcaagccggtcgttgtcgcaacccagatgctggaatcgatgattaccgcgccggtgcccacccgcgctgaagtgtccgacgtggcgactgcggtgtttgaaggtgcggatgcaatcatgctttcggcggaatctgcttccggccaatatccggtcgaagctgttgcaaccatgaaccgcatcgccgagcaggtggagcgcgagccgacctattcgaccatcattgacgcacagcgcgccatgccggagccgactggcgccgacgctatctcgctcgccgcgcgtcagattgctgaaacgttgaaactctcggccatcgtgacctatacggcttccggcacgaccggcctgcgcgctgcccgcgagcgtccgcgcacacccattatcgcgctgtcgcccgttgttgataccgcccgtaaactgtccctcgtatggggcctgcattgcgtcatcacagatgatgcccatgatcttgaagacatggtcaatcatgcctgcgaaatcgtgttccatgaggaattcggcaaagctggcgatcgcgtcatcatcacggcaggcgtacccttcggaacgccgggtgcaaccaatatgctgcgtatcgcctatataggcgctgacggaaaatccggcatttag

SEQ ID NO: 8430 - protein, 478 aa, Brucella melitensis 16M
MKRNRKVKILATLGPASGEEAVIRKLFEAGADVFRINMSHADHDLMRTLVKRIRNVEKELGRPIGILADLQGPKLRVGKFKDGKVDLVPGQTFTLDNNEALGDETRVFLPHPEILEAVEPGHRLLIDDGKLHLVAEACDGKSIRCKVVSGTRISDRKGVSLPDTTLGVGALTEKDRCDLDAVLKEEIDWVALSFIQRPEDLAEVRKVSRGKVGLMSKIEKPQAVTRLDEIIELSDALMVARGDLGVEVPLENVPGIQKQITRKARRAGKPVVVATQMLESMITAPVPTRAEVSDVATAVFEGADAIMLSAESASGQYPVEAVATMNRIAEQVEREPTYSTIIDAQRAMPEPTGADAISLAARQIAETLKLSAIVTYTASGTTGLRAARERPRTPIIALSPVVDTARKLSLVWGLHCVITDDAHDLEDMVNHACEIVFHEEFGKAGDRVIITAGVPFGTPGATNMLRIAYIGADGKSGI

SEQ ID NO: 8431 - DNA, 1404 bp, Clostridium perfringens str. 13
  CDS (1)..(1404): transl_table=11
atgagaagaacaaaattagtatgcactatcggaccagctagtgaaaacgaagaaatcttaacaaaaataatcgaagcaggtatgaacgcttcaagacacaatttctcacatggtgaccatgaagaacataaaggaagaatggttaaagtaagagaaatatcaaaaaaattaggtaaagaagtagctatattattagatactaaaggacctgaaataagaactggaaaattcgagccaagcaaagttgaattaactgctggaactgaatttactatatatgctggagcagaagacgtaataggagacactactaagtgttcagttacatatgctggattagctaaagacgttaaagctggagatactatcttaatagacgacggtttagttggattagaagttgtatctgtagaaggaaacgctgttaaatgtgtagtaagaaacactggattagttggaactcacaaaggagttaacgttcctggagtatcaataaaattaccagctatgactgataaagatagagctgacttaatattcggttgtgaaatgggcgttaacatggttgctgcttcattcataagaaaagcagaagacgttaaagctataagagaagtattagttgctaacggtggagctgatatacaaatattctcaaaaatcgaaaaccaagaaggtgttgataacatagatgctatcatcgaagcttcagacggtatcatggtagctagaggagaccttggtgttgaaataccaatggaagacgttccttcagttcaaaaaatgatcatcgaaaaatgtaacaatgctggaaaaccagttataactgctactcaaatgttagactcaatgatgagaaacccaagaccaacaagagctgaggtttcagacgtaactaacgctatcttagatggtactgatgctatcatgttaagtggtgagtcagctaacggaagctggccagtagaagctgttgaaactatggttaaaatagctactaaatcagaagaaatgttaagctacgaattagcttcatcaaaagctaaaaaacatataccagctgtaccaggagttatctcaagagctgcttgtaatgctgcacacgagttaaaatcagctgctatagtttcattaactcaatcaggagctactgctaagagaatatctcaatgcagaccagatgcaccaatcgttactgtaactccaaacgaaagagttgctaagaaagttgctttatgcttcggtgtttacccagttgttgctgaaaatgctacaatggaaaacgctgttgaaatagctaaaaatgctggattcgttaaagctaatgacactgctgtagttgttgcaggtgtaccagctaacgaaggaaacactaacatagtaaaagttgaagttgtaaaataa

SEQ ID NO: 8432 - protein, 467 aa, Clostridium perfringens str. 13
MRRTKLVCTIGPASENEEILTKIIEAGMNASRHNFSHGDHEEHKGRMVKVREISKKLGKEVAILLDTKGPEIRTGKFEPSKVELTAGTEFTIYAGAEDVIGDTTKCSVTYAGLAKDVKAGDTILIDDGLVGLEVVSVEGNAVKCVVRNTGLVGTHKGVNVPGVSIKLPAMTDKDRADLIFGCEMGVNMVAASFIRKAEDVKAIREVLVANGGADIQIFSKIENQEGVDNIDAIIEASDGIMVARGDLGVEIPMEDVPSVQKMIIEKCNNAGKPVITATQMLDSMMRNPRPTRAEVSDVTNAILDGTDAIMLSGESANGSWPVEAVETMVKIATKSEEMLSYELASSKAKKHIPAVPGVISRAACNAAHELKSAAIVSLTQSGATAKRISQCRPDAPIVTVTPNERVAKKVALCFGVYPVVAENATMENAVEIAKNAGFVKANDTAVVVAGVPANEGNTNIVKVEVVK

SEQ ID NO: 8433 - DNA, 1716 bp, Arabidopsis thaliana
  CDS (1)..(1716)
atggctgcttatggtcaaatctcctcgggaatgactgtagatcctcaggttctctcttcctccagaaacattggagtttccctatcacctctccggagaacactaatcggcgccggagttaggtctactagtatctctctccgtcaatgttctctctccgttagatcgattaaaatctccgaagatagccgcaaacctaaagcttatgcagagaacggtgcttttgatgtgggagttttggattcttcatcatatagattggctgattcaagaacaagtagtaatgattcaaggaggaagactaagattgtgtgtacgattggaccgtcttcgagttctagggaaatgatttggaaactcgcggaagctggaatgaatgtggctcgtttgaatatgtctcatggtgatcatgcttctcatcagataactattgatttagttaaggagtataattctttgtttgttgacaaagctattgctattatgttggatacaaagggtcctgaggttcgaagcggggatgtaccgcagccgatatttcttgaagagggtcaagagtttaactttactatcaagagaggtgtttcgcttaaagacactgttagtgtaaattatgatgattttgtgaacgatgttgaagttggggatatacttttggtggatggtggaatgatgtcgttagctgttaaatcaaagacgagtgatttggtgaagtgtgtggttattgatggtggagagcttcaatctagacgtcacttgaatgttcgaggaaagagtgcgactcttccatccattacagacaaagattgggaagacataaaatttggagtggacaaccaagtcgatttctacgccgtctcctttgttaaggatgctaaagttgtccatgagttgaagaactatctcaaaacctgcagtgcagacatatcggtgattgtgaaaattgaaagtgcagactctataaagaatcttccttctatcatatctgcttgtgatggggcaatggttgctcgtggagatcttggagctgaacttcccattgaagaggtcccgttgttacaggaagaaataatcagaaggtgtagaagcattcataaaccagtgattgttgccacaaacatgctagagagtatgattaatcatccaacgcctacaagagctgaagtctctgacattgcaattgcagtacgtgaaggcgcagatgctatcatgctttctggtgaaaccgcacatggaaagtttccgctgaaagctgttaacgtaatgcatactgtggcgttgagaaccgaggcaagtctacctgtcagaacctcggcatcccgtaccactgcttacaagggtcacatgggccaaatgtttgcttttcatgcttctataatggcaaatacactgagctcaccgctaattgtatttacgagaaccggatccatggcagtgcttctaagccactaccgcccatctgcaacaattttcgccttcacaaaccagagaagaataatgcaaaggcttgctctttatcaaggtgtcatgcctatatatatggagttctcggatgatgcagaagatacatatgcccggtctctcaaactcttacaggacgagaatatgctcaaggaaggacaacatgtaactcttgtccaaagtggctcgcaacccatttggcgtgaagaatcaacacatctcatacaagtccgtaagataaagataggtggatga

SEQ ID NO: 8434 - protein, 571 aa, Arabidopsis thaliana
MAAYGQISSGMTVDPQVLSSSRNIGVSLSPLRRTLIGAGVRSTSISLRQCSLSVRSIKISEDSRKPKAYAENGAFDVGVLDSSSYRLADSRTSSNDSRRKTKIVCTIGPSSSSREMIWKLAEAGMNVARLNMSHGDHASHQITIDLVKEYNSLFVDKAIAIMLDTKGPEVRSGDVPQPIFLEEGQEFNFTIKRGVSLKDTVSVNYDDFVNDVEVGDILLVDGGMMSLAVKSKTSDLVKCVVIDGGELQSRRHLNVRGKSATLPSITDKDWEDIKFGVDNQVDFYAVSFVKDAKVVHELKNYLKTCSADISVIVKIESADSIKNLPSIISACDGAMVARGDLGAELPIEEVPLLQEEIIRRCRSIHKPVIVATNMLESMINHPTPTRAEVSDIAIAVREGADAIMLSGETAHGKFPLKAVNVMHTVALRTEASLPVRTSASRTTAYKGHMGQMFAFHASIMANTLSSPLIVFTRTGSMAVLLSHYRPSATIFAFTNQRRIMQRLALYQGVMPIYMEFSDDAEDTYARSLKLLQDENMLKEGQHVTLVQSGSQPIWREESTHLIQVRKIKIGG

SEQ ID NO: 8435 - DNA, 1584 bp, Arabidopsis thaliana
  CDS (1)..(1584)
atgcattcaagtcatctccttctcgaggaaccgatcaggatgacttcaatcctcgaaccttctaaatcaagtttcttcccggctttgactaagattgttgggactctaggtccgaaatctcgatccgtcgaggtgattgctggttgtctcaaagctggaatgtccgtggctcgattcgatttctcttggtgcgatgctgattatcaccaggagacgctggagaatctgaagatagctgtgaagagcactaagaagctttgtgctgttatgctagacactgtaggacctgagttgcaagttattaacaagactgagaaagctatttctcttaaagctgatggccttgtaactttgactccgagtcaagatcaagaagcctcctctgaagtccttcccattaattttgatgggttagcgaaggcggttaagaaaggagacactatctttgttggacaatacctcttcactggtagtgaaacaacttcagtttggcttgaggttgaagaagttaaaggagatgatgtcatttgtatttcaaggaatgctgctactctgggtggtccgttattcacattgcacgtctctcaagttcacattgatatgccaaccctaactgagaaggataaggaggttataagtacatggggagttcagaataagatcgactttctctcattatcttattgtcgacatgcagaagatgttcgccaggcccgtgagttgcttaacagttgtggtgacctctctcaaacacaaatatttgcgaagattgagaatgaagagggactaacccactttgacgaaattctacaagaagcagatggcattattctttctcgtgggaatttgggtatcgatctacctccggaaaaggtgtttttgttccaaaaggctgctctttacaagtgtaacatggctggaaagcctgccgttcttactcgtgttgtagacagtatgacagacaatctgcggccaactcgtgcagaggcaactgatgttgctaatgctgttttagatggaagtgatgcaattcttcttggtgctgagactcttcgtggattgtaccctgttgaaaccatatcaactgttggtagaatctgttgtgaggcagagaaagttttcaaccaagatttgttctttaagaagactgtcaagtatgttggagaaccaatgactcacttggaatctattgcttcttctgctgtacgggcagcaatcaaggttaaggcatccgtaattatatgcttcacctcgtctggcagagcagcaaggttgattgccaaataccgtccaactatgcccgttctctctgttgtcattccccgacttacgacaaatcagctgaagtggagctttagcggagcctttgaggcaaggcagtcacttattgtcagaggtcttttccccatgcttgctgatcctcgtcaccctgcggaatcaacaagtgcaacaaatgagtcggttcttaaagtggctctagaccatgggaagcaagccggagtgatcaagtcacatgacagagttgtggtctgtcagaaagtgggagatgcgtccgtggtcaaaatcatcgagctagaggattag

SEQ ID NO: 8436 - protein, 527 aa, Arabidopsis thaliana
MHSSHLLLEEPIRMTSILEPSKSSFFPALTKIVGTLGPKSRSVEVIAGCLKAGMSVARFDFSWCDADYHQETLENLKIAVKSTKKLCAVMLDTVGPELQVINKTEKAISLKADGLVTLTPSQDQEASSEVLPINFDGLAKAVKKGDTIFVGQYLFTGSETTSVWLEVEEVKGDDVICISRNAATLGGPLFTLHVSQVHIDMPTLTEKDKEVISTWGVQNKIDFLSLSYCRHAEDVRQARELLNSCGDLSQTQIFAKIENEEGLTHFDEILQEADGIILSRGNLGIDLPPEKVFLFQKAALYKCNMAGKPAVLTRVVDSMTDNLRPTRAEATDVANAVLDGSDAILLGAETLRGLYPVETISTVGRICCEAEKVFNQDLFFKKTVKYVGEPMTHLESIASSAVRAAIKVKASVIICFTSSGRAARLIAKYRPTMPVLSVVIPRLTTNQLKWSFSGAFEARQSLIVRGLFPMLADPRHPAESTSATNESVLKVALDHGKQAGVIKSHDRVVVCQKVGDASVVKIIELED

SEQ ID NO: 8437 - DNA, 1791 bp, Arabidopsis thaliana
  CDS (1)..(1791)
atgtctcagtctattcaattctccactccttcacacactcctcaccttctccatctccctcactcacaattcaaccgtcctctctcctctatctccttccgtcgcttccctctaacaaccatcaaatacacttccatcagagcctcctcgtcatcatctccttcaccggatctcgattcatcgtcctcatcatcatcctcgcaagtacttctctcacctaacggtactggtgctgtgaagtctgatgagagatccgttgtcgctacggcggttacgactgatacgtctgggattgaggttgatactgtgacggaagctgagcttaaggagaatggatttagaagtacgaggaggacgaagctgatctgtacgatcggaccggcgacttgtggatttgagcagcttgaggcgcttgctgtgggaggtatgaatgtggcaaggcttaatatgtgtcacggtacgcgtgattggcaccgcggtgtgattcgtagtgttcggaggcttaatgaggagaaaggctttgcggttgctattatgatggatactgaaggtagtgagattcatatgggagatcttggtggtgaagcttcagctaaagcagaggatggtgaggtttggactttcactgttagagcttttgattcttctcgtcctgaacgtaccattagtgttagctacgatggtttcgctgaagatgtaagagttggggatgaacttttggttgatggtgggatggtgagatttgaagtgattgagaagattggtcctgatgttaagtgtctatgtaccgatcctggattgttgcttcctcgagctaacttgacgttttggagagatggaagtcttgtacgagagcgtaatgccatgcttccaacaatttcttccaaggactggttggatattgattttggaattgctgaaggtgtggatttcattgctgtatcgtttgtcaagtcggctgaagtcattaatcaccttaaaagttatcttgctgctcgttcccgtggaggggaaattggagtgattgcaaagatcgagagtatcgattcactgaccaatttggaagaaattattctagcatcagatggggccatggttgcaagaggagatctgggagctcagatacctcttgagcaagttccagcagctcaacagagaatcgtccaagtatgcagagctcttaacaaacccgtcattgtcgcttcacagctattggagtccatgattgagtacccaactccaaccagagcagaagttgccgacgtgtctgaagcagtaagacaaagatcagatgcattgatgctctctggagaatcagctatgggacaattcccagacaaggcgctcacggttctaaggactgtcagtttaagaatcgagagatggtggagggaagagaaacgccatgagtctgtaccgcttcaagccataggctcttcattttcagacaaaatctcagaagagatctgtaactcagctgctaaaatggctaacaatcttggagtggacgcggttttcgtttacacaacgagcggacacatggcatcactggtctcccgatgtcgcccggactgcccgatctttgctttcacaaccacaacctcagtgagaagacgcttaaacctacaatggggacttatcccattccgtctcagcttctcagacgacatggaaagcaacttgaacaaaacattctcgttactgaaatcaagaggtatgatcaaatctggtgacctcgtgatcgcagtctcggacatgctgcaatcaatccaggtaatgaacgtcccgtaa

SEQ ID NO: 8438 - protein, 596 aa, Arabidopsis thaliana
MSQSIQFSTPSHTPHLLHLPHSQFNRPLSSISFRRFPLTTIKYTSIRASSSSSPSPDLDSSSSSSSSQVLLSPNGTGAVKSDERSVVATAVTTDTSGIEVDTVTEAELKENGFRSTRRTKLICTIGPATCGFEQLEALAVGGMNVARLNMCHGTRDWHRGVIRSVRRLNEEKGFAVAIMMDTEGSEIHMGDLGGEASAKAEDGEVWTFTVRAFDSSRPERTISVSYDGFAEDVRVGDELLVDGGMVRFEVIEKIGPDVKCLCTDPGLLLPRANLTFWRDGSLVRERNAMLPTISSKDWLDIDFGIAEGVDFIAVSFVKSAEVINHLKSYLAARSRGGEIGVIAKIESIDSLTNLEEIILASDGAMVARGDLGAQIPLEQVPAAQQRIVQVCRALNKPVIVASQLLESMIEYPTPTRAEVADVSEAVRQRSDALMLSGESAMGQFPDKALTVLRTVSLRIERWWREEKRHESVPLQAIGSSFSDKISEEICNSAAKMANNLGVDAVFVYTTSGHMASLVSRCRPDCPIFAFTTTTSVRRRLNLQWGLIPFRLSFSDDMESNLNKTFSLLKSRGMIKSGDLVIAVSDMLQSIQVMNVP

SEQ ID NO: 8439 - DNA, 1584 bp, Arabidopsis thaliana
  CDS (1)..(1584)
atgcattccagtcatcttcttctcgaggagccgatcaggatggcttcaatcctcgagccttccaaatctagtttcttcccggcattgactaagatcgtcggaactctaggtcctaaatcccgatccgtcgaggctctctccggctgtctcaaagccggcatgtctgtggctcgatttgatttctcgtggggagatgctgattatcaccaggagacacttgataatttgaaagttgctgtgaggagcactaagaagctttgtgctgttatgcttgatactgttggacctgagctacaagttattaacaaatctgagaaagctattactttgaaagctgatggccttgtaactttgacaccgaatcaagatcaagaagcttcttctgaagttcttcccattaatttcaatggacttgccaaggcagtgaagaaaggagacaccatcttcgttgggcaatacctattcactggtagtgaaacaacttcagtttggctcgaggttgatgaagttaaaggagatgatgtcatttgcctttcaaggaatgctgctactctggctggttctttgttcactttacactcctctcaagttcacattgatctcccaacgcttacagagaaggataaggaggttataagcacatggggagttcaaaataaaatcgattttctctcattgtcttattgtcgtcatgctgaggatgttcgccagacccgtgaaatgcttaaaaagttgggcgacctctctcaaacacaaatatttgctaagattgagaacgtagagggactaacccacttcgatgagattctacaagaagctgatggcattattctttctcgtgggaatttgggtatagatttacccccggaaaaggtgtttttgtttcaaaaggctgctctttacaagtgcaacatggctggaaagccagctgttcttacccgtgttgttgacagtatgactgacaacttgcgaccaactcgtgctgaggccacggatgttgctaatgctgttttagatggaagtgatgcaattcttcttggtgctgagacccttcgtggattgtaccctgttgagacaatatcaactgttggtaggatctgtgctgaggcagaaaaggttttcaatcaagatttgtactttaagaagactgtcaagtatgttggagaaccaatgactcacttggaatcgattgcttcttcagctgtacgggcagccattaaggttaaggcatccgtaattatatgcttcacctcttctggaagagcagccagattgattgccaaatacaggccaacgatgccggttatttctgttgtcattccccgggttaagacaaatcaactgaaatggagctttagtggagcttttgaggcgaggcagtcacttattgtcagaggcctcttccctatgcttgctgaccctcgtcaccctgcggaatctacaagtgcgacaaacgagtcagtcctgaaggttgctctagaccatgggaagcatgctggagtaatcaagtcgcatgacagagtagtggtgtgtcagaaagttggtgatgcatctgtggttaagatcattgagcttgaggattaa

SEQ ID NO: 8440 - protein, 527 aa, Arabidopsis thaliana
MHSSHLLLEEPIRMASILEPSKSSFFPALTKIVGTLGPKSRSVEALSGCLKAGMSVARFDFSWGDADYHQETLDNLKVAVRSTKKLCAVMLDTVGPELQVINKSEKAITLKADGLVTLTPNQDQEASSEVLPINFNGLAKAVKKGDTIFVGQYLFTGSETTSVWLEVDEVKGDDVICLSRNAATLAGSLFTLHSSQVHIDLPTLTEKDKEVISTWGVQNKIDFLSLSYCRHAEDVRQTREMLKKLGDLSQTQIFAKIENVEGLTHFDEILQEADGIILSRGNLGIDLPPEKVFLFQKAALYKCNMAGKPAVLTRVVDSMTDNLRPTRAEATDVANAVLDGSDAILLGAETLRGLYPVETISTVGRICAEAEKVFNQDLYFKKTVKYVGEPMTHLESIASSAVRAAIKVKASVIICFTSSGRAARLIAKYRPTMPVISVVIPRVKTNQLKWSFSGAFEARQSLIVRGLFPMLADPRHPAESTSATNESVLKVALDHGKHAGVIKSHDRVVVCQKVGDASVVKIIELED

SEQ ID NO: 8441 - DNA, 1434 bp, Pyrococcus furiosus DSM 3638
  CDS (1)..(1434): transl_table=11
gtgagaagggtgaagctcccatctcacaagacaaaaattgtagctacaatagggccagcgactaattcgagaaaaatgataaaacaactcattaaggcggggatgaatgttgcaagaataaacttctcccatggaagttttgaagagcatgcaagagtcatagaaataataagagaggaggcacaaaaattagacaggagagttgcaatacttgcagatctacctggattgaaaataagagtcggtgagataaaagggggttacgtagagctaaagagaggagaaaaggtaatattaacaacaaaggatgttgagggtgatgaaactacgataccagtggattataaaggctttccaaatttggtatcgaagggagacatcatataccttaatgacggatacatagtcttaaaggtggagaacgttagggagaacgaagttgaagcagttgttctttcaggaggaaagctcttctcgagaaagggcgtcaatatacccaaggcctacctcccagtcgaagccataactccaaaagactttgaaattatgaaatttgcaattgagcatggggtggatgcaataggattgagcttcgttgggagcgtttatgatgttctaaaggccaagagtttccttgagaaaaataatgccgaggatgtatttgtaattgcaaagatcgaaagacctgacgccgtgaggaattttgacgagattcttaatgccgctgatggaattatgattgctagaggagatttaggggtagagatgccgatagagcagctaccaattcttcagaagaaattgatcaggaaagccaatatggaagggaaaccagtgattacggcaacacaaatgcttgtgtcaatgacaacggaaaaagtgccaacaagggccgaagttacggacgttgcaaacgcaattcttgatggaacggatgcagttatgctatcagaagaaacggccataggaaaattccccattgagaccgtagagatgatgggaaagatagctaaggtcactgaagaatatagggaaagttttgggttaagcagaataagggagtttatggagatcaaaaagggaacaataaaagaggctatcactagaagtataattgacgcaatatgcacaatagacattaagtttatactaacacccaccagaacgggaagaactgctaggctaatctcaagatttaagcccaagcagtggattttagccttctcaacaaatgaaagggtgtgcaacaatctcatgttcagctatggagtttatcccttctgcctagaagagggattcgatgagaacgatatagttaggttgataaaaggactgggccttgtggaaagcgatgatatggttttaatgacggaaggaaagccaattgaaaaaacagttggaactaactcaattaagatattccaaatagcttga

SEQ ID NO: 8442 - protein, 477 aa, Pyrococcus furiosus DSM 3638
MRRVKLPSHKTKIVATIGPATNSRKMIKQLIKAGMNVARINFSHGSFEEHARVIEIIREEAQKLDRRVAILADLPGLKIRVGEIKGGYVELKRGEKVILTTKDVEGDETTIPVDYKGFPNLVSKGDIIYLNDGYIVLKVENVRENEVEAVVLSGGKLFSRKGVNIPKAYLPVEAITPKDFEIMKFAIEHGVDAIGLSFVGSVYDVLKAKSFLEKNNAEDVFVIAKIERPDAVRNFDEILNAADGIMIARGDLGVEMPIEQLPILQKKLIRKANMEGKPVITATQMLVSMTTEKVPTRAEVTDVANAILDGTDAVMLSEETAIGKFPIETVEMMGKIAKVTEEYRESFGLSRIREFMEIKKGTIKEAITRSIIDAICTIDIKFILTPTRTGRTARLISRFKPKQWILAFSTNERVCNNLMFSYGVYPFCLEEGFDENDIVRLIKGLGLVESDDMVLMTEGKPIEKTVGTNSIKIFQIA

SEQ ID NO: 8443 - DNA, 1428 bp, Fusobacterium nucleatum subsp. nucleatum ATCC 25586
  CDS (1)..(1428): transl_table=11
gtgaggagtttgaaaaaaacaaaaatagtttgtactattggtcctgtgactgaatcagtagaaactttaaaagaattactaaataggggaatgaatgtaatgagattgaatttctctcatggtgattatgaagaacatggaatgagaatgaagaattttagacaagcaatgtctgaaactggaattagaggaggaatacttcttgatactaagggtccagaaataagaacaatgactttaaaagatggaaaagatgtaagtattaaggctggacaaaaatttactttcacaacagatcaatcggttgttggagataatgaaagagtagcagtaacttatgaaaattttgcaaaagatttaaaagttggaaatatggttcttgttgatgatggattattagaactagatgttgtggaaataaaaggaaatgaagttatatgtatagccagaaataatggagatctaggacaaaagaaaggaataaatttacctaatgtttctgttaatttaccagcattatctgagaaagatatagaagatctaaaatttggttgtcaaaataatgttgattttgtggcagcatcatttataagaaaagctgatgatgtaagacaagtaagaaaagttcttagagaaaatgatggagaaagaatacaaataatttctaagatagaaagccaggaagggcttgataattttgatgaaattttagcagaatctgatggtataatggtagcaagaggagacttaggtgtagaaatccctgttgaagaagttccttgtgcgcaaaaaatgatgataagaaaatgtaatagagtaggaaaaactgttattacagcaactcaaatgctagattcaatgattaaaaatccaagacctacaagagcagaagcaaatgatgttgccaatgctatattagatggtacagatgcagtaatgctttcaggtgaaactgcaaagggaaaatatccattagcagctgttgaagttatgaataaaatagctaaaaaagttgatgctacaataccaccattttacatagaaggtgttataaataaaaatgatataacttctgctgttgcagaaggaagtgctgacataagcgaaaggttaaatgcaaaacttatagttgttggtacagaatctggaagagctgcaagagacatgagaagatatttccctagagcacatattttagcaataactaataatgaaaaaactgcaaatcaattagttttatcaagagggataatttcatatgtagatgcttcaccaaaaactttagaagaattctttgttgtagcagaatctgttgcaaaaaaattaaatttagttaaaaataatgatataattatagcaacttgtggagaaagtgtatttatacaaggaacaactaactcaataaaagtaatacaagtaaaagcatag

SEQ ID NO: 8444 - protein, 475 aa, Fusobacterium nucleatum subsp. nucleatum ATCC 25586
MRSLKKTKIVCTIGPVTESVETLKELLNRGMNVMRLNFSHGDYEEHGMRMKNFRQAMSETGIRGGILLDTKGPEIRTMTLKDGKDVSIKAGQKFTFTTDQSVVGDNERVAVTYENFAKDLKVGNMVLVDDGLLELDVVEIKGNEVICIARNNGDLGQKKGINLPNVSVNLPALSEKDIEDLKFGCQNNVDFVAASFIRKADDVRQVRKVLRENDGERIQIISKIESQEGLDNFDEILAESDGIMVARGDLGVEIPVEEVPCAQKMMIRKCNRVGKTVITATQMLDSMIKNPRPTRAEANDVANAILDGTDAVMLSGETAKGKYPLAAVEVMNKIAKKVDATIPPFYIEGVINKNDITSAVAEGSADISERLNAKLIVVGTESGRAARDMRRYFPRAHILAITNNEKTANQLVLSRGIISYVDASPKTLEEFFVVAESVAKKLNLVKNNDIIIATCGESVFIQGTTNSIKVIQVKA

SEQ ID NO: 8445 - DNA, 1752 bp, Thermoanaerobacter tengcongensis MB4
  CDS (1)..(1752): transl_table=11
atgaggagaacaaaaatagtctgtacaattggacctgctagtgaggactacaatatactgagaaagttaatagaaaaaggaatgaatgtagcaaggcttaatttttcccatggagattttgaagagcacggagcgaggattgacaacataaaaaagataagggaagaattaggtcttcctgtagctattttgctggacacaaaaggacccgagattagaacgggaaagtttaaaaacggcggagtagagttaaaggaaggccagacttttacattaactacaagggatgtaataggagatgaaacggtagtcagtgtttcctacaaaggtttgcctcaagatgtttcaagaggtacccaaattttgattgatgacggattgatctcactaagggttgtggatgtcaaaggggaagacataatctgtgtagttgaaaattcgggatttcttggagaccacaaaggagtaaatgttcctggagtgaaattgaatctcccggctttgacacaaaaagacatagaagatatagagtttggcataaagaaaggtattgacatgatagctgcttcttttgtcaggaaagcggcagatgtgcttgctataaggaggcttcttgaggacaataaagcagaccacattcagataattgctaaaatagaaaaccgcgaaggagtagaaaatatagacgaaataataagggtatctgacgggataatggtggccagaggagatttgggcgttgagatacctctggaggaaataccgatagtgcagaagatgataataaagaagtgcaatgaagctggaaagccagttattactgcaacccaaatgctggattccatgatgagaaatccgcgtcctactcgtgctgaagttacggatgttgctaatgctattttggatggaacggatgccataatgctgtcaggtgagacggcccagggcaaatatcctgtcgaagcttttgagacaatggccaggattgcggaaaagacagaggtttacgtccagtacagagatatagtaggtgtaggtacagagagaaatgtttccattactaatgcgataagccatgctacctgcacgactgcgagagatataggcgcttcagctatcataacctgtacaaaatcaggttatacggctaggatggtttcaaggtataggccttcctctcctatcatagctactactcctagcgagcaggtggcaagaaagctttccatcgtgtggggagtatatcctttagtgacaaaagaagtgtcaaccacagacgaaatgatagatgttgcaatagaaagtgcgttaaaagctgggcttataaggaatggagatattgtggtgatttctgcgggaatacctgttgccatgactggcaccacaaacatgctcaaagttcacatagttggagatgtgattttaagaggtattggtataggttcaaaatctactactggcactgtgtgcataattcatgacattggcaaggacagagacaagtttagagaaggagatataattgttacaaccaagacagagagagattttatgcctcttattgaaaaagcttctgccataataacagaagaaggcgggctcacctcccacgctgctattgttgggcttaacttggggatccctgtgattgtagggtgtgaaggagctacttcaaaacttcaggatgggatgacagtcactgttgacaccacgagaggactggtgtataaaggaattgtaaacataaaatga

SEQ ID NO: 8446 - protein, 583 aa, Thermoanaerobacter tengcongensis MB4
MRRTKIVCTIGPASEDYNILRKLIEKGMNVARLNFSHGDFEEHGARIDNIKKIREELGLPVAILLDTKGPEIRTGKFKNGGVELKEGQTFTLTTRDVIGDETVVSVSYKGLPQDVSRGTQILIDDGLISLRVVDVKGEDIICVVENSGFLGDHKGVNVPGVKLNLPALTQKDIEDIEFGIKKGIDMIAASFVRKAADVLAIRRLLEDNKADHIQIIAKIENREGVENIDEIIRVSDGIMVARGDLGVEIPLEEIPIVQKMIIKKCNEAGKPVITATQMLDSMMRNPRPTRAEVTDVANAILDGTDAIMLSGETAQGKYPVEAFETMARIAEKTEVYVQYRDIVGVGTERNVSITNAISHATCTTARDIGASAIITCTKSGYTARMVSRYRPSSPIIATTPSEQVARKLSIVWGVYPLVTKEVSTTDEMIDVAIESALKAGLIRNGDIVVISAGIPVAMTGTTNMLKVHIVGDVILRGIGIGSKSTTGTVCIIHDIGKDRDKFREGDIIVTTKTERDFMPLIEKASAIITEEGGLTSHAAIVGLNLGIPVIVGCEGATSKLQDGMTVTVDTTRGLVYKGIVNIK

SEQ ID NO: 8447 - DNA, 1437 bp, Streptomyces coelicolor A3(2)
  CDS (1)..(1437): transl_table=11
atgcgccgagcaaagatcgtctgcactcttgggcccgccaccgactcgtacgaccagatcaaggacctggtcgacgccggaatggacatcgcccgcttcaatttcagccacggcacccacgccgaacacgaagagcgctaccaccgtgtccgcaaggcgtccgacgagaccggccgcagcgtcggtgccctcgccgaccttcagggcccgaagatccgcctcggccacttcggtgaagggcccgtactccttgaacgcggcgacagcttcaccatcaccgtcgaggagggcgtcgagggcgaccgctacatctgcggcaccacctacgcgggcctggccgaggacgtcacccccggtgagcgcgtcctcgtcgacgacggcaaggtctgcctggaggtgaccggggtcgacgggacccgggtgcggacgcgggtgatcgagggcggcatggtctccgaccacaagggcctcaacctgcccggcgtcgcggtgtccgtgcccgccctgtcgaagaaggacgaggacgacctgcgctgggcgctgcgggccggcttcgacgtggtcgccctctccttcgtccgcagcggacgcgacatcctcgacgtgcaccgcatcatggacgaggagggccgccgcctccccgtcatcgccaaggtcgagaagccgcaggccgtggagaacatcgaggacatcgtcgcggccttcgacggcatcatggtcgcccggggcgacctcggcgtcgagatgcccctggaacaggtgccgaccgtccagaagcgcgcggtgaagctggccaagcgcaacgccaagccggtcatcgtcgccacccagatgctcgactcgatgatcgacaacgcccgccccacccgcgcggaggcctccgacgtcgccaacgccgtcatcgacggcaccgacgccgtgatgctctccggcgagaccagcgtcggcaagcaccccaccgacaccgtgcgcacgatggcccggatcgtcgaagcggccgaggaggacatcctcgccaagggactccccccgctgaccgaacggaacaagccccgcacccagggcggtgcggtcgcccgcgccgccgccgagatgggcgacttcctcggcgccaagttcctggtcgccttcacccagtccggcgacacggtccgccgcctctcccgctaccgctcgcccattccgctgctcgccttcaccccggaaccggcgacccgctcccagctgagcctgacctggggtgtggagaccttcctcggtccgcacgccgactccacggacgcgatggtcgaccaggtggacgagcttctcacccgctacggacgctgcgaaaagggcgacgtcgtggtcatcacggccggctcaccgccgggggtgtccggcacgacgaacctggtgcgtgtgcaccacatcggggaggacgacattcccaagtga

SEQ ID NO: 8448 - protein, 478 aa, Streptomyces coelicolor A3(2)
MRRAKIVCTLGPATDSYDQIKDLVDAGMDIARFNFSHGTHAEHEERYHRVRKASDETGRSVGALADLQGPKIRLGHFGEGPVLLERGDSFTITVEEGVEGDRYICGTTYAGLAEDVTPGERVLVDDGKVCLEVTGVDGTRVRTRVIEGGMVSDHKGLNLPGVAVSVPALSKKDEDDLRWALRAGFDVVALSFVRSGRDILDVHRIMDEEGRRLPVIAKVEKPQAVENIEDIVAAFDGIMVARGDLGVEMPLEQVPTVQKRAVKLAKRNAKPVIVATQMLDSMIDNARPTRAEASDVANAVIDGTDAVMLSGETSVGKHPTDTVRTMARIVEAAEEDILAKGLPPLTERNKPRTQGGAVARAAAEMGDFLGAKFLVAFTQSGDTVRRLSRYRSPIPLLAFTPEPATRSQLSLTWGVETFLGPHADSTDAMVDQVDELLTRYGRCEKGDVVVITAGSPPGVSGTTNLVRVHHIGEDDIPK

SEQ ID NO: 8449 - DNA, 1431 bp, Streptomyces coelicolor A3(2)
  CDS (1)..(1431): transl_table=11
atgcgccgttcgaaaatcgtctgtactctcggccccgcggtcgactcccacgagcagctcgtcacgctgatcgaagccggcatgaacgtggcccgcttcaacttcagccatggcacccacgccgagcaccagggtcgttacgaccgggtccgggccgccgccaaggagaccggccgggccatcggcgtcctcgccgacctccagggcccgaagatccgcctggagaccttcgcggagggccccgtcgagctggtgcgcggtgacgagttcaccatcaccgccgaggacgtcccgggcgacaggacgatctgcggcacgacctacaagggcctgcccggtgacgtcaccaagggcgaccaggtgctcatcaacgacggcaacgtcgagctgaaggtcaccgaggtcgagggcccccgggtgaagacgatcgtcatcgagggcggcgtcatctccgaccacaagggcatcaacctgccgggcgcggcggtcaacgtccccgcgctgagcgagaaggacgtcgaggacctccggttcgcgctgcgcatgggctgcgacctggtcgccctctccttcgtccgggacgccaaggacgtcgccgacgtgcaccgcgtcatggacgaggagggccgccgggtcccggtgatcgccaaggtcgagaagccccaggcggtcgacaacatggaggacgtcgtgatggcgttcgacggcgtgatggtcgcccgtggcgacctggccgtcgagtacccgctcgagaaggtccccatggtgcagaagcgcctgatcgagctgtgccggcgcaacgccaagccggtgatcgtggcgacccagatgatggagtcgatgatcacgaactcccggccgacccgcgccgaggcctccgacgtggccaacgcgatcctggacggcgccgacgcggtcatgctgtccgccgagtcgagcgtgggcgcctacccgatcgagaccgtcaagacgatgtcgaagatcgtcaccgccgccgagcaggagctgctctccaagggcctccagccgctggtgccgggcaagaagccgcgcacgcagggcggttcggtggcccgtgcggccgccgagatcgccgacttcctgggcggcaagggcctggtcgccttcacccagtccggcgacaccgcccgccggctctcccgctatcgcgcggcccagccgatcctcgccttcaccaccgacgagtccacccgcaaccagctggcgctcagctggggagtggagccgcacgtggtgccgttcgtgaacaccacggacgagatggtggacctggtggaccaggagacggcccgcctcggccggttcagcgacggcgacaccgtcgtgatcaccgccggttcgccccccggcgtgtccggcaccaccaacatggtgcgggtcctccacctgggcgagacacggcgcggctga

SEQ ID NO: 8450 - protein, 476 aa, Streptomyces coelicolor A3(2)
MRRSKIVCTLGPAVDSHEQLVTLIEAGMNVARFNFSHGTHAEHQGRYDRVRAAAKETGRAIGVLADLQGPKIRLETFAEGPVELVRGDEFTITAEDVPGDRTICGTTYKGLPGDVTKGDQVLINDGNVELKVTEVEGPRVKTIVIEGGVISDHKGINLPGAAVNVPALSEKDVEDLRFALRMGCDLVALSFVRDAKDVADVHRVMDEEGRRVPVIAKVEKPQAVDNMEDVVMAFDGVMVARGDLAVEYPLEKVPMVQKRLIELCRRNAKPVIVATQMMESMITNSRPTRAEASDVANAILDGADAVMLSAESSVGAYPIETVKTMSKIVTAAEQELLSKGLQPLVPGKKPRTQGGSVARAAAEIADFLGGKGLVAFTQSGDTARRLSRYRAAQPILAFTTDESTRNQLALSWGVEPHVVPFVNTTDEMVDLVDQETARLGRFSDGDTVVITAGSPPGVSGTTNMVRVLHLGETRRG

SEQ ID NO: 8451 - DNA, 1506 bp, Xanthomonas axonopodis pv. citri str. 306
  CDS (1)..(1506): transl_table=11
gtgtgtgttaagtttcgcggcttttacagggaggccatcatgaaagaacgtcaacgccgcaccaagatcctcgccaccctcggaccggcaacggatgcgcccggtgtgctggatacgctgttcaaggcgggcgtcaacgtggtgcgcctcaacttcagccatggcgacccctccggccaggccaagcgtgccgccgaagtgcgtgccgctgcggcccgcgtcggtgccgaagtcggcatcctggccgacttgccgggcccgaagatccgtatcgaacgttttgccgaaggcaagatcaagctgaccatgggcgatcgcttcgacctggtggccgatgccaacgcgccggctggcgaccagacacaggttggcgtcagctatctgggtctgccgcaggacgtgaccgccggcgacgtcctgctgctcgacgatggcctgatgcagttgcaggtcaccgatgtgcagggcgcgcgcatcgtcaccaaggtgttgaacgatggcgtgctgtccgaccgcaagggcctcaacaagcagggcggtggtctgtcgctgggcgcgttgaccgaacgcgacaaggaactgatcggcatcgttgccaagatcggcgtggacttcatcgcggtgtcgttctgtcgtaacgcgcaggacatgcacgacgcacgtcagatcgcccagcagcatggctgcgatgcgcaactggtgtccaagatcgagcgcaccgaggcgatcgaaaacctggtcgagatcgtcgaagcctccgatgtggtgatggtggcgcgtggcgacctgggcgttgaaatcggcgacgccgaattgccgggcctgcagaagaagatcattcgcgaatcgctggcgcagaacaaggtggtgatcaccgccacgcagatgctgcagtcgatggtcgaaagcccgatccccacccgcgccgaagtgctggacgtggccaacgcggtcatcgacggcaccgacgcggtgatgctctcggccgagaccgccgccggcgcctacccggtgcgtgcggtggaagcgatggcgcgcatctgtctgggggccgaacaccagttcgagttcgataccgacttcgaagcggcgcaacgcaatctgcagcgcgccgaccaggcgattgcgatggcgaccatgttcctgtccgagcacatcggcctgggcggcgtggtggcgttgaccgaatccggcggcacgccgcgcttcctgtcgcgcttccgctccaatatgccgatctacgccttcacccgtcacgatggcgcacgccgccagatggcgatgatgcgtggcgtgttcccgatcagcttcgacagccgcggcctgaccccgcgcgaggccgcacgtgcggcgatccgcctgctggtggagaacgagcgcatggggcctggcgaccgcgtggtctttaccagtggcgagcacatggaaacccacggcgccaccaacacgctgcgcctgctggaagtgggcgaagacggccgcgccaccggtctgggcgagctgtaa

SEQ ID NO: 8452 - protein, 501 aa, Xanthomonas axonopodis pv. citri str. 306
MCVKFRGFYREAIMKERQRRTKILATLGPATDAPGVLDTLFKAGVNVVRLNFSHGDPSGQAKRAAEVRAAAARVGAEVGILADLPGPKIRIERFAEGKIKLTMGDRFDLVADANAPAGDQTQVGVSYLGLPQDVTAGDVLLLDDGLMQLQVTDVQGARIVTKVLNDGVLSDRKGLNKQGGGLSLGALTERDKELIGIVAKIGVDFIAVSFCRNAQDMHDARQIAQQHGCDAQLVSKIERTEAIENLVEIVEASDVVMVARGDLGVEIGDAELPGLQKKIIRESLAQNKVVITATQMLQSMVESPIPTRAEVLDVANAVIDGTDAVMLSAETAAGAYPVRAVEAMARICLGAEHQFEFDTDFEAAQRNLQRADQAIAMATMFLSEHIGLGGVVALTESGGTPRFLSRFRSNMPIYAFTRHDGARRQMAMMRGVFPISFDSRGLTPREAARAAIRLLVENERMGPGDRVVFTSGEHMETHGATNTLRLLEVGEDGRATGLGEL

SEQ ID NO: 8453 - DNA, 1443 bp, Yersinia pestis KIM
  CDS (1)..(1443): transl_table=11
atgtccagacggctcagaaggaccaagattgttactacactggggccggctactgaccgcgacaataatctggaaaagattattgctgcaggtgcgaacgtagtccgcctgaatttttcccatggtagcgctgaagatcatgaattacgggccaataaagtccgtgaaatcgctgccagactggggcgtcatgtagctattcttggtgatttgcaaggtcctaaaatccgggtatcgacgtttaaagaaggtaaagttttccttaatataaacgataaattcctgctggatgccaatatggcaaaaggcgaaggtgataaaaacaaagtgggtatcgattacaaaggcctgccagctgatgtggttcccggtgatattttattgcttgatgatggccgcgtgcagttaaaagtggttgaagttcagggcatgaaagtcttcaccgaagtgaccgtcggtggcccgctctctaacaataaaggcatcaacaagttaggtggcgggttatcagccgaagccctaaccgaaaaagataaagccgatattgttaccgctgcaaaaattggtgtggacttcctggcggtctctttcccacgtactggtgaagatttgcattatgcacgccgcctggcccgtgatgctggctgcaatgcacagatcgtcgcaaaggttgagcgcgctgaagcggtcgccactgatgaggcgatggatgatatcattctggcctctgacgtcgtcatggtcgctcgtggtgatttgggtgttgaaattggcgacccagaacttgttggtatccaaaagaaactgatccgccgtgcccgccagctaaaccgtgccgtgatcacggcgactcagatgatggagtcaatgatcaccaacccgatgccaacccgagcagaggtgatggatgttgccaacgcagtgctggatggtaccgatgcggtcatgttgtcagcagaaacagcagcaggccagtacccggcagaaaccgtagcggcaatggcgcgtgtctgtctaggcgcggaaaaaatcccaagcatcaatgtgtcaaaacaccgtctagatgtgcaattcgataacgtcgaagaagctatcgcgatgtcgaccatgtatgcggcaaaccacctcaaaggtatcaccgcgattatcgccatgactgaatcaggccgcacggctttgatgatgtcgcgtatcagttccggtttacctattttcgccatgtcgcgccatgatcatactttaaacctaaccgccatctatcgtggcgtgacgccggtctattgtgatccccatactgacggtgttcttgccgccacagaagcagtaaaacgcttgcaagataaagggttcttggtgtcaggtgatttggttatcgttactcagggcgatgtgatgggcaccattggtacgaccaataccagtcgtatcatccgcgtcgaataa

SEQ ID NO: 8454 - protein, 480 aa, Yersinia pestis KIM
MSRRLRRTKIVTTLGPATDRDNNLEKIIAAGANVVRLNFSHGSAEDHELRANKVREIAARLGRHVAILGDLQGPKIRVSTFKEGKVFLNINDKFLLDANMAKGEGDKNKVGIDYKGLPADVVPGDILLLDDGRVQLKVVEVQGMKVFTEVTVGGPLSNNKGINKLGGGLSAEALTEKDKADIVTAAKIGVDFLAVSFPRTGEDLHYARRLARDAGCNAQIVAKVERAEAVATDEAMDDIILASDVVMVARGDLGVEIGDPELVGIQKKLIRRARQLNRAVITATQMMESMITNPMPTRAEVMDVANAVLDGTDAVMLSAETAAGQYPAETVAAMARVCLGAEKIPSINVSKHRLDVQFDNVEEAIAMSTMYAANHLKGITAIIAMTESGRTALMMSRISSGLPIFAMSRHDHTLNLTAIYRGVTPVYCDPHTDGVLAATEAVKRLQDKGFLVSGDLVIVTQGDVMGTIGTTNTSRIIRVE

SEQ ID NO: 8455 - DNA, 1785 bp, Thermosynechococcus elongatus BP-1
  CDS (1)..(1785): transl_table=11
atgtcgaaccagccgttgcaacgccgcaccaaaattgtcgccaccattggtccagcagtcagtcaccccgacaaattgcgcgccattattcaagcgggagcaaccaccctgcgtctaaacttttcccatggcacccatgacgatcaccagcgcagcattcgcctcattcgccaaatttcctatgaactcgggcaaccggtggggattttgcaggacttgcaaggccccaagattcgccttgggcggtttgagcatggctccatttccctcaagcggggcgatcgctttaccctcacgagtcgccctatcctgggcaatcagcacattagctcaattacctatccccccttggcccaagaggtgcccgccggtgccacgattttgctcgacgatggccgcgtggaaatgctcgtggaagaagtggataaagaggcgggggagctccattgccaagtgattgttgggggtaccctctccaatgccaagggtgtgaactttccgggggtttacctttcgattaaagccctaacagagaaagatcgcgaagatctgatgtttggcctcaatcaaggggtggattgggtggccctcagcttcgttcgcaatccccaagatgtactggagatcaaagaactgattgccaacgctgggaagcaggtgccagtcattgccaaaatcgaaaagcacgaggcgatcgagcagatggatgccattctctccctctgtgatggcgtcatggtggcacggggtgatttgggggttgaattgcccgccgaagatgtaccgattctgcaaaaacggctgatcgctgctgccaaccgcttgggcattccggtcattacggccacacaaatgctcgacagcatggtgaaaagccctcgtcctacccgggccgagatttccgatgtcgccaatgccattctcgatggcactgatgccgtgatgctctccaatgaaacggcgatgggggaataccccgtcgaggcggtcaagatgatggccaccattgccgcccgcattgacaatcaacctcaactgcggcaacctcccggggctgagtctacggcggtgcgttctattcccagtgccattagtcaagcggtgggacaggtggcggcgcagctgcatgccaaagcgatcattacccaaactaaaacaggcgcaacggcgcggaatgtttccaagtttcgtccccaaattcctattttggcggcaacaccccatatcgaagtggcccgtcgcctccagttggtctggggcgtcgaaccgctgctgacattggatcatccctcgatgcgcgaatccttccaggcggcgattaatgctgcccaggagcggggcttccttgaggagggggatctggtggtcatgacggcgggcaccctacaaggggtttctggctccacggatatgatcaaggtggaactggttacctcagtgatgggacggggttgtggcattggccatggatctgttagtggtcctgcgcgggtggtacgccaagggatgccggtgcgtacgtttaatcgtggggaaattttggtggctgagcgcaccagtgctgagttggtggaagtgattcgcaaagcggcaggcattattaccgaggaggacagcctcacaagccatgccgccgtcttggggttgcggctgggtattcctgtgattgtgggcgtcaaaaatgccactcgcctgatccgtgagggcaccattctgacgatggatgtggaacggggcgtggtttattccggtgcccgcaatggcggcgagcgatcgccagagtag

SEQ ID NO: 8456 - protein, 594 aa, Thermosynechococcus elongatus BP-1
MSNQPLQRRTKIVATIGPAVSHPDKLRAIIQAGATTLRLNFSHGTHDDHQRSIRLIRQISYELGQPVGILQDLQGPKIRLGRFEHGSISLKRGDRFTLTSRPILGNQHISSITYPPLAQEVPAGATILLDDGRVEMLVEEVDKEAGELHCQVIVGGTLSNAKGVNFPGVYLSIKALTEKDREDLMFGLNQGVDWVALSFVRNPQDVLEIKELIANAGKQVPVIAKIEKHEAIEQMDAILSLCDGVMVARGDLGVELPAEDVPILQKRLIAAANRLGIPVITATQMLDSMVKSPRPTRAEISDVANAILDGTDAVMLSNETAMGEYPVEAVKMMATIAARIDNQPQLRQPPGAESTAVRSIPSAISQAVGQVAAQLHAKAIITQTKTGATARNVSKFRPQIPILAATPHIEVARRLQLVWGVEPLLTLDHPSMRESFQAAINAAQERGFLEEGDLVVMTAGTLQGVSGSTDMIKVELVTSVMGRGCGIGHGSVSGPARVVRQGMPVRTFNRGEILVAERTSAELVEVIRKAAGIITEEDSLTSHAAVLGLRLGIPVIVGVKNATRLIREGTILTMDVERGVVYSGARNGGERSPE

SEQ ID NO: 8457 - DNA, 1761 bp, Oceanobacillus iheyensis HTE831
  CDS (1)..(1761): transl_table=11
atgagaaacacaaaaatcgtatgtacaattggtcctgcatcagaatcaattgaaaagttagagcaacttattgaagcaggaatgaacgtagctcgtctcaacttttctcatggagattatgcagagcatggcgcacggattgaaaatatccgaaaagcagctaaaaataaaaataaaacagtagcaattcttttagatactaaaggaccagagattcgtactggtagctttaaagaaggtagagcagatcttatgcagggcaaccctgtaacaatcgctatggatgaagtagaggggactgctgagaaattctctgttacataccaagggctaatcaatgatgtacatgaaggttcaaagattcttttggatgatggacttattgaattagaagtaaaatctattgataaaagtaaaggtgaaattgaaactattgcacttaactctggggaaataaagaataaaaaaggtgttaacgttcctaatgtttctgtaaatctacccggtataacagaaaaagacaccaatgatattatctttggaattgaacagggtgttgattttattgctgcatcttttgtgcgtcgagcttcggatattttagaaattaaagaagtgctagatcagcatcaggcacagtatataaaaatcatccctaaaattgagaaccaagaaggtgtcgataatatcgatagtattcttgaggtaagtgatggattaatggtagctcgtggtgatttaggagtggagatcccagctgaagatgtaccattggtacagaaaaaattaattaagcaatgtaataatgctggaaagccagtaattactgctacacaaatgttagattcgatgcagcgtaatccacgacctacacgtgcagaagcatcagacgttgctaatgcgatttttgatggcacagatgcaattatgctttctggagaaactgctgcgggaacctacccagtagaatctgtacaaacaatgagtaatattgcactaaaagctgaatctgcattagatcataaacaaatgttagaagaacgttcacaatatgtcgatatgactataacagaagcaattagtcaatccgttacgcacacagcatccaatttaaatgttgatacaattatcacaccgacagaaagcggacatacagctagaatgatttctaaataccgtccgaaagcttccattctagcagttacttttaacgaagtagtaaatcgtcaactatccttagtttggggagtgcatgctgttctgggtaaaccagcgacgtctactgacgaaatgctagaaattgcagttgataaaggattaaatacaggaatctgcagtagaggaagccgtgtcattattacggctggtgtacctgttggagagagtggaacaactaacctgttaaaagttcatgtgattggtgatgtgattgctaaaggacaaggaattggaagaagaagtgcatatggacatgccgtatttgctaaaacgaataaagaagctttagaaaaagtacaagacggtgatattttagtaacctatgcaacagaaaaagaaatgatgcctgcaattgaaaaagcatcagctattattacagaagaaggtggattaacttctcatgcagctgttgtcggattaagtcttggaattccagtaattgttggggttgacaatgtatttgaaattcttcaagatggacaagatattactgtagatggtaaccgtggagatatctacgctggccatgcaggtgtattgtaa

SEQ ID NO: 8458 - protein, 586 aa, Oceanobacillus iheyensis HTE831
MRNTKIVCTIGPASESIEKLEQLIEAGMNVARLNFSHGDYAEHGARIENIRKAAKNKNKTVAILLDTKGPEIRTGSFKEGRADLMQGNPVTIAMDEVEGTAEKFSVTYQGLINDVHEGSKILLDDGLIELEVKSIDKSKGEIETIALNSGEIKNKKGVNVPNVSVNLPGITEKDTNDIIFGIEQGVDFIAASFVRRASDILEIKEVLDQHQAQYIKIIPKIENQEGVDNIDSILEVSDGLMVARGDLGVEIPAEDVPLVQKKLIKQCNNAGKPVITATQMLDSMQRNPRPTRAEASDVANAIFDGTDAIMLSGETAAGTYPVESVQTMSNIALKAESALDHKQMLEERSQYVDMTITEAISQSVTHTASNLNVDTIITPTESGHTARMISKYRPKASILAVTFNEVVNRQLSLVWGVHAVLGKPATSTDEMLEIAVDKGLNTGICSRGSRVIITAGVPVGESGTTNLLKVHVIGDVIAKGQGIGRRSAYGHAVFAKTNKEALEKVQDGDILVTYATEKEMMPAIEKASAIITEEGGLTSHAAVVGLSLGIPVIVGVDNVFEILQDGQDITVDGNRGDIYAGHAGVL

SEQ ID NO: 8459 - DNA, 1530 bp, Bifidobacterium longum NCC2705
  CDS (1)..(1530): transl_table=11
atgagtcggctcgcgctagtagactgggtttcggcaaatggggcaatcgcgcctcgaaccaaattgaacaagaataggcaggcattcatgcgtaaagccaagatcgtagacaccatcggtccttccaccgaggattacgacaacctcctgaagctcgttgaagctggtatggacgttgctcgtctgaaccgctcccacggcacccccgaggatcacctcaaggtctacaacaacgtgcgcaaggccagcgaagccactggtcgcaacgttgccgcgctcgttgatttgcagggcccgaagattcgctgcggttggttcaagaagaacgccgatggcgaagacaaggttcagctgcagctcggccaggaattcgtcatcaccactgatgacgtcgagggcgacgagcacatcacctccaccaccttcaagggcctgccgggcgattgccacccgggcgacccgatcctgatcgatgacggcaaggtccgtcttgaggtcaccaaggtcgagggcaacaacgtgtacaccaaggtcgtcgtggccggtcctgtgtcctcccacaagggcatcaacctgccgggcgtcgccgtctccctgccggctctgaccgagaaggatgaggccgacctgcgttgggccatccgcaccggtgccgacatcatcgccatgtccttcgtgcgtttcgccaccgacatcgaccgcgcccacgagatcatggacgaggaaggccgtcgcatcccgatcatcgccaagatcgagaagccgcaggctctggagaacctcgaagagatcgtcaagaccttcgacggcgtcatggccgcccgtggcgacatggccgttgagtgcccgctggaagaggtcccgctggccactaagcgcatcatcgagctggctcgccagtacgccaagccggtcatcgtggctaccgaagtcctcggctccatggtgaactccccggttccgactcgtgcagaggcttccgactgcgccaacgccatcctcgacggctccgacgccaccatgacctccaacgagaccgccgttggtaagtacccggatgtgaccgtggccaccatggcccgtatctccggctacgccaccgaccacggcttcgaccgtatcccggagctcaagaaccttgacatgtcctccaccggcgctgtctcctccgccgctgtggacctggccgacaagctcaacgccaaggccatcgttgcttacacccagaccggtgccaccgtgcaccgcgtctcccgtgagcgtccggccgccccgatctacggcctgaccagcaacgagcacacctaccactggctggctctgtcctggggcaccgaagccttcctgctcaaggaggactaccacgacaagtcccgcaaggatctcatggtctacacggacaaggtcctcaaggatgctggcaaggttgctgacggcgacaagatcgtcatcctgagctctgctcagggcgatcaccagccgggccgcactgactccatctacgtgcacaccgttggcgcttgcgactga

SEQ ID NO: 8460 - protein, 509 aa, Bifidobacterium longum NCC2705
MSRLALVDWVSANGAIAPRTKLNKNRQAFMRKAKIVDTIGPSTEDYDNLLKLVEAGMDVARLNRSHGTPEDHLKVYNNVRKASEATGRNVAALVDLQGPKIRCGWFKKNADGEDKVQLQLGQEFVITTDDVEGDEHITSTTFKGLPGDCHPGDPILIDDGKVRLEVTKVEGNNVYTKVVVAGPVSSHKGINLPGVAVSLPALTEKDEADLRWAIRTGADIIAMSFVRFATDIDRAHEIMDEEGRRIPIIAKIEKPQALENLEEIVKTFDGVMAARGDMAVECPLEEVPLATKRIIELARQYAKPVIVATEVLGSMVNSPVPTRAEASDCANAILDGSDATMTSNETAVGKYPDVTVATMARISGYATDHGFDRIPELKNLDMSSTGAVSSAAVDLADKLNAKAIVAYTQTGATVHRVSRERPAAPIYGLTSNEHTYHWLALSWGTEAFLLKEDYHDKSRKDLMVYTDKVLKDAGKVADGDKIVILSSAQGDHQPGRTDSIYVHTVGACD

SEQ ID NO: 8461 - DNA, 1443 bp, Shigella flexneri 2a str. 301
  CDS (1)..(1443): transl_table=11
atgtccaaaaggcttcgcagaacaaaaatcgttaccacgttaggcccagcaacagatcgcgataataatcttgaaaaagttatcgcggcgggtgccaacgttgtacgtatgaacttttctcacggctcgcctgaagatcacaaaatgcgcgcggataaagttcgtgagattgccgcaaaactggggcgtcatgtggctattctgggtgacctccaggggcccaaaatccgtgtatccacctttaaagaaggcaaagttttcctcaatattggggataaattcctgctcgacgccaacctgggtaaaggtgaaggcgacaaagaaaaagtcggtatcgactacaaaggcctgcctactgacgtcgtgcctggtgacatcctgctgctggacgatggtcgcgtccagttaaaagtactggaagttcagggcatgaaagtgttcaccgaagtcaccgtcggtggtcccctctccaacaataaaggtatcaacaaacttggcggcggtttgtcggctgaagcgctgaccgaaaaagacaaagcagacattaagactgcggcgttgattggcgtagattacctggctgtctccttcccacgctgtggcgaagatctgaactatgcccgtcgcctggcacgcgatgcaggatgtgatgcgaaaattgttgccaaggttgaacgtgcggaagccgtttgcagccaggatgcaatggatgacatcatcctcgcctctgacgtggtaatggttgcacgtggcgacctcggtgtggaaattggcgacccggaactggtcggcattcagaaagcgttgatccgtcgtgcgcgtcagctaaaccgagcggtaatcacggcgacccagatgatggagtcaatgattactaacccgatgccgacgcgtgcagaagtcatggacgtagcaaacgccgttctggatggtactgacgctgtgatgctgtctgcagaaactgccgctgggcagtatccgtcagaaactgttgcagccatggcgcgcgtttgcctgggtgcggaaaaaatcccgagcatcaacgtttctaaacaccgtctggacgttcagttcgacaatgtggaagaagctattgccatgtcggcaatgtacgcagctaaccacctgaagggcgttacggcgatcattaccatgaccgaatcgggtcgtaccgcgctgatgacctcccgtatcagctctggtctaccaattttcgccatgtcgcgccatgaacgtacgctgaacctgactgctctctatcgtggcgttacgccggtgccctttgatagcgctaatgacggcgtagcagctgccagcgaagcggttaatctgctgcgcgataaaggttacttgatgtctggtgacctggtgattgtcacccaaggcgacgtgatgagtaccgtgggttctactaataccacgcgtattttaacggtagagtaa

SEQ ID NO: 8462 - protein, 480 aa, Shigella flexneri 2a str. 301
MSKRLRRTKIVTTLGPATDRDNNLEKVIAAGANVVRMNFSHGSPEDHKMRADKVREIAAKLGRHVAILGDLQGPKIRVSTFKEGKVFLNIGDKFLLDANLGKGEGDKEKVGIDYKGLPTDVVPGDILLLDDGRVQLKVLEVQGMKVFTEVTVGGPLSNNKGINKLGGGLSAEALTEKDKADIKTAALIGVDYLAVSFPRCGEDLNYARRLARDAGCDAKIVAKVERAEAVCSQDAMDDIILASDVVMVARGDLGVEIGDPELVGIQKALIRRARQLNRAVITATQMMESMITNPMPTRAEVMDVANAVLDGTDAVMLSAETAAGQYPSETVAAMARVCLGAEKIPSINVSKHRLDVQFDNVEEAIAMSAMYAANHLKGVTAIITMTESGRTALMTSRISSGLPIFAMSRHERTLNLTALYRGVTPVPFDSANDGVAAASEAVNLLRDKGYLMSGDLVIVTQGDVMSTVGSTNTTRILTVE

SEQ ID NO: 8463 - DNA, 1437 bp, Leptospira interrogans serovar Lai str. 56601
  CDS (1)..(1437): transl_table=11
ttgccttgcatgaaaattctaaacaggaaaaaaaccaaaatcgtctgcactataggtccggcttcttcttccgaagaaaccatactttctattctcaaagcgggaatggatatagctcggatgaatttttcacacggcacacatgattctcataaaagagtctacgacacgttacgcaagtgcgaacaaattttcggatttcctttagggatcatggcagacctacaaggccctaaaattcgaaccggaaaattaaaactcaactccattctacttcataaaaatcaggagattgaaatcgtcccagattctgatattttgggagatgaacacaaaatcggttgtacatatccaaatctaattagagatatacaagaagaagacaagattctaattgatgacggtaagttaattttaaaagttatttctaaaaaatcgaactccgccattttaaaagtaatcgtaggtggaatcttatggagcaacaaaggaatcaatcttccaggaactcctatctctgctcctgcactttccgaaaaagacatagaagatcttaagttcgcactctctctaggtgtagattacgcggctcttagttttgttcgtactggggcagacttagaattagcaaggtcttatttagaaggtacatatacagggctgatcgcaaagatagaaagaccggaagcaattggaaacatagaagaaatcatagaacgagcagatggcatcatgattgcaagaggagatttaggagtagaaattgatacggaaaaggttcccattctacaaaaagaacttatctataaactcaatcaagcgggtaaaccggtcattactgcaacccaaatgctggaatctatgattgaaaacccaagaccaacacgtgcagaagcgagcgacgtagcaaatgcggttatggacggaacggatgcagttatgctttctgcagaatcggctaacggccattatccggtcgaatccgttgaaatcatgtctaaaatcattcaagaaactgaaaccattgatcatatctatgagattcactggaacattaaaaaaactttcttagaatcagaaagaactgcactgggaaatgccgcaagggagattgcccacggaatccacgcaaaggcaatcgtcaattttacgagaagcggttattccgcattgattacctccgaaatgagacccaaggttccgatctactcttttactccgtttgcaaccaccgccagaaagatgaaactctatcgaggtgtggtgccatttgtaatgcctttctttacaagattggaagatatgattgcttatatgaatcaaaaactcaaagaagatgaatttctttttccaggagataaggtggtaattctttccggagccccaggaaccacagtcagaagtgtagactttttacaggtttataaaatacattga

SEQ ID NO: 8464 - protein, 478 aa, Leptospira interrogans serovar Lai str. 56601
MPCMKILNRKKTKIVCTIGPASSSEETILSILKAGMDIARMNFSHGTHDSHKRVYDTLRKCEQIFGFPLGIMADLQGPKIRTGKLKLNSILLHKNQEIEIVPDSDILGDEHKIGCTYPNLIRDIQEEDKILIDDGKLILKVISKKSNSAILKVIVGGILWSNKGINLPGTPISAPALSEKDIEDLKFALSLGVDYAALSFVRTGADLELARSYLEGTYTGLIAKIERPEAIGNIEEIIERADGIMIARGDLGVEIDTEKVPILQKELIYKLNQAGKPVITATQMLESMIENPRPTRAEASDVANAVMDGTDAVMLSAESANGHYPVESVEIMSKIIQETETIDHIYEIHWNIKKTFLESERTALGNAAREIAHGIHAKAIVNFTRSGYSALITSEMRPKVPIYSFTPFATTARKMKLYRGVVPFVMPFFTRLEDMIAYMNQKLKEDEFLFPGDKVVILSGAPGTTVRSVDFLQVYKIH

SEQ ID NO: 8465 - DNA, 1497 bp, Mycoplasma penetrans HF-2
  CDS (1)..(1497): transl_table=4
atgaaaatgattaaaaaaactaaaattactgcaactttaggaccatcaattactggaaaaattttcacattagcagattttaacaaacctgaaaacaagggagttattgaaactgctaagaaaaatttagcagctttatttgatgcaggtgtgaatgtagtaagatttaacttttctcatggtgattatgaagaacaaacaattagattaaacctagttagagaagttgctaaagaaaaaggtgttaacatttctacaatgttagacacaaaaggaccagaaatccgtgtttacaaaacaagtgaaaaagaagttgaaattaaatcagatagtaaagtaagaatttatacaactaaaaaagaaattggtacaagtgaaaaattctctgttttagattctactggtacatacaacatggcaaaagatgttcaaccaggaaatacaatttttgtagatgatggaaaattgaaattagaagtaatttcatcaaatgttgaagaaggaattattgaaacaattgcacgtaacacttgaattcttagagaaaacaaaagaattaatttaccagactctaattattcaattccttttatgtctgataaagatagaaatgatattatttttgcaattaaaaataaatttgattacattgcagcatcatttgtaaatacaggtgataatgtaagagaaattaaaaaaatcttaaaagaacatggtggagaacacatccaaatcatttctaaaattgaaactatgactggaattaaatcattagatgacattatcgatgaatcagattcaataatggttgctagaggtgatctaggattagaagtaccttactatgatgtaccaacatatgaaaaatacattattaaagattgtagacataaaggtaaaactgtaattgttgcaactcaaatgttagattcattagaaactaaaatccaaccaacaagagcagaagttactgacgtgttttttgcagttgaaagaggaacagactgtactatgctttctggagaaactgcaaatgggatgtatccaattaatgcagtagaagtaatggctaaaattgatgtttcatctgaaaatttctttgactatggaagagcaattgatgtttatttcaaagaaactccatttatgaaagaaaaagttggaactttagctactactatagcaactcttgttgctccaaaaagagtaattgataaccatggttttgactactcttcaattgtggtatttggaaatgatacaagattaatccaagcattatctaatataagatgtgcagctccaattttctttgttactgataaaaaagaatatgctacaagatttgggcttaactatggggtatttgtaaaagttgttgataatgttgaacatgcaattgcaaataaaactgaaattatagatgcaattaatagccaacttcctgaagttaaaaaaacagttgttgttataaatgattcaatttataaacattaa

SEQ ID NO: 8466 - protein, 498 aa, Mycoplasma penetrans HF-2
MKMIKKTKITATLGPSITGKIFTLADFNKPENKGVIETAKKNLAALFDAGVNVVRFNFSHGDYEEQTIRLNLVREVAKEKGVNISTMLDTKGPEIRVYKTSEKEVEIKSDSKVRIYTTKKEIGTSEKFSVLDSTGTYNMAKDVQPGNTIFVDDGKLKLEVISSNVEEGIIETIARNTWILRENKRINLPDSNYSIPFMSDKDRNDIIFAIKNKFDYIAASFVNTGDNVREIKKILKEHGGEHIQIISKIETMTGIKSLDDIIDESDSIMVARGDLGLEVPYYDVPTYEKYIIKDCRHKGKTVIVATQMLDSLETKIQPTRAEVTDVFFAVERGTDCTMLSGETANGMYPINAVEVMAKIDVSSENFFDYGRAIDVYFKETPFMKEKVGTLATTIATLVAPKRVIDNHGFDYSSIVVFGNDTRLIQALSNIRCAAPIFFVTDKKEYATRFGLNYGVFVKVVDNVEHAIANKTEIIDAINSQLPEVKKTVVVINDSIYKH

SEQ ID NO: 8467 - DNA, 1437 bp, Bradyrhizobium japonicum USDA 110
  CDS (1)..(1437): transl_table=11
atgaggcgtcttcgccgtatcaagattctcgcgacccttggacctgcctcttcggacctcgcgatgatccgccgcctgttcgaggccggcgccgacctgttccgcatcaacatgagccacaccccgcatgacaagatgcgggagctggtggcgacgatccgcaatgtcgagagcagctacggccggccgatcggcatcctggtcgaccttcagggaccgaagctcaggctcggcgccttcgccgaaggctcggtccagctccagaacggccagaccttcacgctcgattccgacaaggcgccgggcgatgccacgcgcgtcaatctcccgcatccggagatcctcgccgcgctgcggcccggccatgcgctgctgctggacgacggcaaggtccggctgatcgcggaggagacctcgaaagagcacgcggtgacgcgcgtcgtggtcggcggacggatgtccgaccgcaagggcgtcagcctgcccgacaccgacctgccggtctcggcgatgacgccgaaggaccgcgccgacctcgaggcggcgctggtcaccggcgtcgactggatcgcgctgtccttcgtgcagcgcgccgacgacgtgatcgaggccaagaagatgatccgcggccgcgccgctgtcatggccaagatcgagaagccgcaggcgatcgaccgcctcgccgacatcatcgaggcctccgacgcgctgatggtggcgcgcggcgatctcggtgtcgagctgccgctggagcgcgtgccgagcctccagaagcagatgacgcgcatggcgcgccgcgccggcaagccggtggtgatcgcgacccagatgctggaatcgatgatccagtcgccggtgccgacacgcgccgaggtctcggacgtcgccaccgccgtctatgaaggcgccgacgccatcatgctgtcggcggaatcggcggccggaaaattcccggtcgaggcggtctcgaccatgaaccgcatcggcgaagaggtcgagcgcgacccgatttatcggtccgtgctgaccgcgcagcgccccgcgccggaatccaccgcaggcgacgccatcgcggacgccgcccgccagatcgccgagacgctcgacctgccggccctgatctgctggaccagctcgggctcgaccgcggtgcgcgtcgcgcgcgagcggccgaagccgccgatcgtggcgatcacgccgaacatcgcggccggacgccggctggcggtggtctggggcgtgcattgcgtggtggcggaagatgcgcgcgaccaggacgacatggtgagccgcgccggccagatcgcgttccgcgacggcttcgtccgcgccggccagcgcgtgatcatcgtcgccggcgtgccgctcggcattcccggcaccaccaacatggtgcgcatcgcctccgtcggccccgagggcggcgcggatatctag

SEQ ID NO: 8468 - protein, 478 aa, Bradyrhizobium japonicum USDA 110
MRRLRRIKILATLGPASSDLAMIRRLFEAGADLFRINMSHTPHDKMRELVATIRNVESSYGRPIGILVDLQGPKLRLGAFAEGSVQLQNGQTFTLDSDKAPGDATRVNLPHPEILAALRPGHALLLDDGKVRLIAEETSKEHAVTRVVVGGRMSDRKGVSLPDTDLPVSAMTPKDRADLEAALVTGVDWIALSFVQRADDVIEAKKMIRGRAAVMAKIEKPQAIDRLADIIEASDALMVARGDLGVELPLERVPSLQKQMTRMARRAGKPVVIATQMLESMIQSPVPTRAEVSDVATAVYEGADAIMLSAESAAGKFPVEAVSTMNRIGEEVERDPIYRSVLTAQRPAPESTAGDAIADAARQIAETLDLPALICWTSSGSTAVRVARERPKPPIVAITPNIAAGRRLAVVWGVHCVVAEDARDQDDMVSRAGQIAFRDGFVRAGQRVIIVAGVPLGIPGTTNMVRIASVGPEGGADI

SEQ ID NO: 8469 - DNA, 1416 bp, Tropheryma whipplei TW08/27
  CDS (1)..(1416): transl_table=11
atgcgtagggccaagattgttgttactctcggtccggcagtatcagatcttgattctgtgagagatcttatatccgctggtgccgacgtctttcgcatgaatctcagccacggatcgttggattttcacagggaggtatttctgaatgttaggacggctgctgctgagctagacaggcatattgctatatttgctgatcttcagggtccaaaaatacgtttagggcgttttgcttctgggccgtataccctacaagagggtgatatctttacaatcacaaccgagcaggtgttgggaacgaaagagctttccagcacaactttgccgacattaccagataatgtctcagagggggatttgcttttaattgatgatggcaaagttgccctgagggcgattgggaatgacggggttcggatcactacacgtgttgaagttccgggaaaggtctcgaataataagggtattaaccttccgggtgttggagttaaagttccggccttatctgaaaaggatattgactcactccgctgggccctttctcttccagttgatatgattgccttgagttttgtgcgctgcgcatcagatgtggatgctgtgcacaaggttatggatgaagagggtattcgccttcctgttattgcaaagatagaaaagcctcaagcagtatctgccatagaggagattgcactgcggtttgatgcgattatggtagcaaggggtgatcttggggttgaactgccgcttgaagatgtgccggtagcccagaaggaaattgttaaggttgcacgcaggtttgctcggccggttattatcgcaacccagatgcttgagtcaatgatctcttcctcgcggcccaccagggctgaggcgagtgatgttgcaaacgctgttcttgatggagccgatgcactgatgctaagcggtgagacaagtgttggtgagtggcccgttgaagctgtgcgggtcatgtcgagggttattgaaaaaacagaggaaaaggcaatttcacaaatagtcggttttggtacaactccaaaaacacagggtggtgccctcgcctgggccgcagcaaaggttgctgagtttatcgatgcgcgttatctgtgtgtctttagtgaaagtggagattcaataagacgggtgtcgcgactgcgtcatgatatacccattattggatttagtccggttgagtccgttgtccgacaggtctctctctcttggggtgttcgatgttttttgatagagaggctccatcagactgatcagatgatgcgtaaggctgaacatgttctcctcacaaacaatttggccgagattggagagaagattgtgattatttcaggatcaccagttggggtgccggggagtacaaaccatatgagaatccacgagcttggaagcacgtcctag

SEQ ID NO: 8470 - protein, 471 aa, Tropheryma whipplei TW08/27
MRRAKIVVTLGPAVSDLDSVRDLISAGADVFRMNLSHGSLDFHREVFLNVRTAAAELDRHIAIFADLQGPKIRLGRFASGPYTLQEGDIFTITTEQVLGTKELSSTTLPTLPDNVSEGDLLLIDDGKVALRAIGNDGVRITTRVEVPGKVSNNKGINLPGVGVKVPALSEKDIDSLRWALSLPVDMIALSFVRCASDVDAVHKVMDEEGIRLPVIAKIEKPQAVSAIEEIALRFDAIMVARGDLGVELPLEDVPVAQKEIVKVARRFARPVIIATQMLESMISSSRPTRAEASDVANAVLDGADALMLSGETSVGEWPVEAVRVMSRVIEKTEEKAISQIVGFGTTPKTQGGALAWAAAKVAEFIDARYLCVFSESGDSIRRVSRLRHDIPIIGFSPVESVVRQVSLSWGVRCFLIERLHQTDQMMRKAEHVLLTNNLAEIGEKIVIISGSPVGVPGSTNHMRIHELGSTS

SEQ ID NO: 8471 - DNA, 1443 bp, Vibrio parahaemolyticus RIMD 2210633
  CDS (1)..(1443): transl_table=11
atgacttccaaattaagaagaacgaaaattgtcaccactcttggcccttcaactgataaagacaatgtactggaggaaatcattaaagctggagcgaacgtcgttcgtatgaacttttctcacggtacaagtgaagaccacattcaacgcgctaaaaaagtacgcgcgattgccgcaagattagggcgtcaggttgccattcttggcgatttacagggacctaaaattcgtgtttcgacctttaaagacggtaaaatcacactcaaagtcggcgataaattcacactagatagcgacttaccaaaaggcgaagggaaccaagaatccgttggtttggattacaaagaactgcctcaagatgtttcaccgaacgacattctactgcttgatgatggcagagttcaattgcaagtcaccagcgtagaaggaaataaagtccatacccgtgtgaccgttggtggcccattatccaataacaagggcatcaacaaaaaaggcggtggcttatcagccgatgcactcacggaaaaagacaaagctgacataatcacagccgcagaaattaaggtcgactatttggccatttctttcccacgcaatggcgaggacatgcactatgccagacgcttggcccgggatgccggcttagaagcaaaactcgtcgcaaaagtagaacgtgcagaaaccgtcgccacgagcgagtcgattgacgatatcatcctagcttctgacgtcgtgatggtcgctcgcggcgatttaggcgttgagattggcgatcctgagctgatcggtgttcagaaaaaactcattcgtcgagctcgcagtttgaaccgcgtcgtcattactgcaactcaaatgatggaatccatgatcaatagcccaatgccaacgcgtgcagaagtcatggacgtagcaaacgccgttttggatggcaccgatgccgtgatgctgtctggagagaccgctgccggtcaatatccggtagagaccgtgaaatcaatggcggatgtctgtattggcgcagaaaagatgtctgaagcaagtctatcgacctaccgtctcgaccgcacctttgaaacagcagaagagaccattgcaatggcaaccatgtactcagcgaatcacatggaaggcattaaagcgatgattgcattaacagagtcaggaagaacagctttgatgatgtcacgcctaagctctggtttgccgatttttgctttatcgcgtaacgaatcgacgctcaaccgcgcagcgttatatcgtggcgtgacgccagtgtactttgatgcgaaatgcgatgcgggcttaccaaccgctcaagccgcaatttctagcctcaaagatcaaggttacttacatgaaggtgacttagtgatcatcactcaaggtgacgtgatggacgtcgttggttcaaccaactgcatgcgtattctgccagtctaa

SEQ ID NO: 8472 - protein, 480 aa, Vibrio parahaemolyticus RIMD 2210633
MTSKLRRTKIVTTLGPSTDKDNVLEEIIKAGANVVRMNFSHGTSEDHIQRAKKVRAIAARLGRQVAILGDLQGPKIRVSTFKDGKITLKVGDKFTLDSDLPKGEGNQESVGLDYKELPQDVSPNDILLLDDGRVQLQVTSVEGNKVHTRVTVGGPLSNNKGINKKGGGLSADALTEKDKADIITAAEIKVDYLAISFPRNGEDMHYARRLARDAGLEAKLVAKVERAETVATSESIDDIILASDVVMVARGDLGVEIGDPELIGVQKKLIRRARSLNRVVITATQMMESMINSPMPTRAEVMDVANAVLDGTDAVMLSGETAAGQYPVETVKSMADVCIGAEKMSEASLSTYRLDRTFETAEETIAMATMYSANHMEGIKAMIALTESGRTALMMSRLSSGLPIFALSRNESTLNRAALYRGVTPVYFDAKCDAGLPTAQAAISSLKDQGYLHEGDLVIITQGDVMDVVGSTNCMRILPV

SEQ ID NO: 8473 - DNA, 1758 bp, Enterococcus faecalis V583
  CDS (1)..(1758): transl_table=11
atgaaaaaaacgaaaatcgtatgtacgattggaccagctagtgaatccgttgatatgctagtaaacttaattaatgcaggtatgaatgtttgccgtttgaacttttcacatggtgactacgaagagcatggtgctcgtattaaaaacattcgtgaagctgtaaaaattacagggaaacgcgtagcgatcttactagatacaaaaggtcctgaaatccgcacaaatgacatggaaaatggcgcaatcacaatgaaaattggtgactcagtacgtatttctatgacagaagttttaggaacaaatgaaaaattctcaatcacttatccagaattaatcaatgatgtaaacgtaggttcacacattcttttagatgatggtttaatcgatttagaagtaactgatatcgaccgtgatgcaaacgaaatcgtaacagttgttaaaaacgaaggcgtcttgaaaaacaaaaaaggcgttaacgtaccaggcgtttctgtaaacttaccagggatcactgaaaaagatgctaacgatatccgtttcggaattggtcaaggaattgactttatcgcagctagcttcgttcgtcgtgcttctgacgttttagaaatcactaaaattttagaagaagaaaacgcaacacacatccaaatcattcctaaaatcgaaaaccaagaaggtatcgataatatcgatgaaatcttaaaagtttctgatggtttaatggttgctcgtggtgacatgggtgttgaaattccaacagaagatgttccagttgtccaaaaagctttaattaaaaaatgtaatgctttaggtaaaccagttatcactgcaacacaaatgttagattcaatgcaacgtaacccacgtccaacacgtgcggaagcaaatgacgtagcaaacgcaatctacgatggaacagatgcagtaatgttatcaggcgaaactgcagcaggggattacccattagaagctgttcaaacaatggctcgtattgcagttcgtacagaagaaacattagttaaccaagattcattcgcattgaaattatatagcaaaacagatatgactgaagcaatcggacaatctgttggccatacagcacgtaacttgggtatccaaacaatcgttgcggcaacagaatcaggccatacagcacgtatgatctctaaataccgtccaaaagcacatatcgttgcaattacgttctcagaacaaaaagcacgtagcttgtcattatcatggggtgtttacgcaacagttgctgacaaaccatcaagcacagatgaaatgtttaatttagcttcaaaagtatcacaagaagaaggttatgcttcagaaggtgatttaatcattatcactgctggtgttccagttggcgaaaaagggacaacaaacttaatgaaaattcaaatgatcggttctaaattagttcaaggtcaaggtgtcggcgaagaagcaattattgcaaaagccgttgtggcagcaactgctgaagaagcagttgctaaagcgactgaaggagctattttagttacaaaaacaacagataaagaatacatgccagcaattgaaaaagcatcagcattagttgttgaagaaggtggtttaacttctcatgcagctgttgtagcgattgcgcaaaatattccagttatcgtaggtgctgcagatgcaacatcattaattaataatgacgaagtgattactgttgatcctcgtcgtggtattgtttaccgcggagcaacaacagctatctaa

SEQ ID NO: 8474 - protein, 585 aa, Enterococcus faecalis V583
MKKTKIVCTIGPASESVDMLVNLINAGMNVCRLNFSHGDYEEHGARIKNIREAVKITGKRVAILLDTKGPEIRTNDMENGAITMKIGDSVRISMTEVLGTNEKFSITYPELINDVNVGSHILLDDGLIDLEVTDIDRDANEIVTVVKNEGVLKNKKGVNVPGVSVNLPGITEKDANDIRFGIGQGIDFIAASFVRRASDVLEITKILEEENATHIQIIPKIENQEGIDNIDEILKVSDGLMVARGDMGVEIPTEDVPVVQKALIKKCNALGKPVITATQMLDSMQRNPRPTRAEANDVANAIYDGTDAVMLSGETAAGDYPLEAVQTMARIAVRTEETLVNQDSFALKLYSKTDMTEAIGQSVGHTARNLGIQTIVAATESGHTARMISKYRPKAHIVAITFSEQKARSLSLSWGVYATVADKPSSTDEMFNLASKVSQEEGYASEGDLIIITAGVPVGEKGTTNLMKIQMIGSKLVQGQGVGEEAIIAKAVVAATAEEAVAKATEGAILVTKTTDKEYMPAIEKASALVVEEGGLTSHAAVVAIAQNIPVIVGAADATSLINNDEVITVDPRRGIVYRGATTAI

SEQ ID NO: 8475 - DNA, 1434 bp, Coxiella burnetii RSA 493
  CDS (1)..(1434): transl_table=11
atgttacgcagcaccaaaattattgccactttagggccggcaaccgatgatctttctatacttgaggaaattattcacgagggggttgacattattcgcttgaatttctcgcacggcactcacgagaaacacaaacaacggattgaaatggttcgcaaggcggcgaaaaaacaagaacgggtaatcggaattttagcggatttgcaagggcctaaaattcgcatatccagttttaaaactggcaaaattaatttaaaaaaaggcgagttatttattttggacgccgggctcccgcccgaagaaggtacagagaaaagcgttgggattgattataaaaatttgccgaaggacgtaaaagccgaagatattttattgttggatgatgggcgccttaccttaaaggtgcaaaacgtcaagggagaacaaattatttgtcgcgttgttgaaggcggcgcgttgtcagatcacaaaggcattaatcgattaggcggcgggctttcagcggaagcgatgacggaaaaagatatcaacgatttgaaatttgcagttgattttgatgtggattatgtggctatttcatttccccgcgatgcgcaggatattttaaaagccaagcatctggtgcaaggttacaaaggaaaggcgggtatcattgctaaaattgaacgtactgaagcggttaaaaatatcgacgccattattgaagcgagcgacggcgtcatggtggcgcgaggcgatttagcggtcgaaattggcgatgcacaagtgcctttggtgcaaaaagatattattcatcgcgctcgttccatggataaacccgtcattatcgcgactcaaatgatggagtccatgattcacgcgaccgtgcccacacgggctgaagtgtctgatgtggcaaatgccgtactcgataataccgatgccgttatgttgtcagcggaaaccgctgttggcgattatcccgttttagccgtagccgcgatggcgcgaacgtgcgttgtttcggaatctcagccgcgttcgcatatttctcgtcatcgcgttgaatgccgtttcaaacggattgatgaagccattgcgatggcaactatgtatgcagctaatcatctcgatatcaaagccatcatcaccttaaccgaatcgggaatcacccccttgtggatgtcgcgtatccgtacggctatccctatttatggtctcagtcgattcgataaatcgctcgggcgaatgacactttatcgcggtgtttaccctattaaatttgatccaactcaatacacgcgcgacgaaattaatgtaaaagccgttgaaacgttgcaaagtcaggacttattgaaaaacggcgatttagtggtcttaaccaaaggcgattacatgggcgtgggtggcgggtctaacgcaatgaaaattatggtggtggggaaagtcgtttaa

SEQ ID NO: 8476 - protein, 477 aa, Coxiella burnetii RSA 493
MLRSTKIIATLGPATDDLSILEEIIHEGVDIIRLNFSHGTHEKHKQRIEMVRKAAKKQERVIGILADLQGPKIRISSFKTGKINLKKGELFILDAGLPPEEGTEKSVGIDYKNLPKDVKAEDILLLDDGRLTLKVQNVKGEQIICRVVEGGALSDHKGINRLGGGLSAEAMTEKDINDLKFAVDFDVDYVAISFPRDAQDILKAKHLVQGYKGKAGIIAKIERTEAVKNIDAIIEASDGVMVARGDLAVEIGDAQVPLVQKDIIHRARSMDKPVIIATQMMESMIHATVPTRAEVSDVANAVLDNTDAVMLSAETAVGDYPVLAVAAMARTCVVSESQPRSHISRHRVECRFKRIDEAIAMATMYAANHLDIKAIITLTESGITPLWMSRIRTAIPIYGLSRFDKSLGRMTLYRGVYPIKFDPTQYTRDEINVKAVETLQSQDLLKNGDLVVLTKGDYMGVGGGSNAMKIMVVGKVV

SEQ ID NO: 8477 - DNA, 1431 bp, Streptomyces avermitilis MA-4680
  CDS (1)..(1431): transl_table=11
atgcgccgttcgaaaatcgtctgtactctcggccccgcggtcgactcccacgagcagctcgtcacgctgatcgaggccggcatgaacgtggcccgcttcaacttcagccacggcacgcacgccgagcaccagggccggtacgaccgggtccgggccgcggccgccgagaccggcaaggccatcggtgtcctcgcggacctccagggcccgaagatccggctggagaccttcgccgagggtcccgtcgagctggtgcgcggtgacgagttcatcatcaccaccgaggacgtgccgggcgacaagcacatctgcggcacgacgtacaagggcctgcccggggacgtctccaagggcgaccagatcctcatcaacgacggcaacgtcgagctgcgggtcgtcgaggtcgacgggccgcgggtcaagacggtcgtcatcgagggcggcgtgatctccgaccacaagggcatcaacctgcccggcgcggccgtgaacgtgcccgcgctgtccgacaaggacatcgaggacctgcgcttcgccctgaagatgggctgcgacctggtcgcgctgtccttcgtgcgcgacgcgagcgacgtgaaggacgtccacaaggtgatggacgaggagggccgccgggtccccgtcatcgccaaggtggagaagccgcaggcggtggagaacatggaggccgtcgtcgcggccttcgacggcgtgatggtggcgcgcggcgacctggccgtcgagtacccgctcgagaaggtcccgatggtgcagaagcgcctcgtggagctgtgccgccgcaacgccaagccggtgatcgtcgcgacccagatgatggagtcgatgatcaccaactcccgcccgacgcgcgccgaggcgtccgacgtggccaacgcgatcctcgacggcgcggacgcggtgatgctgtccgccgagtcgtcggtcggcgcctacccgatcgagacggtcaagacgatgtcgaagatcgtcacggcggcggaggaagagctgctgtcgaagggcctgcagccgctggtccccggcaagaagccccgtacgcagggtggttcggtcgcccgcgcggcctgcgagatcgccgacttcctgggcggcaagggcctggtggccttcaccaagtcgggcgacaccgcccgtcggctctcccgctatcgcgcggcccagccgatcctggccttcaccacggacgagggcacgcgcaaccagctcgcactgagctggggcgtcgagtcccacgtcgtgccgttcgtgaacagcaccgacgagatggtcgacctggtcgactccgagctgcagaacctgaagcggttcaacgacggcgacgtcgtcgtgatgaccgccggctcgccccccggcgtcccgggcacgacgaacatggtgcgagtgcaccacctgggcgagggcaagcgcgcctga

SEQ ID NO: 8478 - protein, 476 aa, Streptomyces avermitilis MA-4680
MRRSKIVCTLGPAVDSHEQLVTLIEAGMNVARFNFSHGTHAEHQGRYDRVRAAAAETGKAIGVLADLQGPKIRLETFAEGPVELVRGDEFIITTEDVPGDKHICGTTYKGLPGDVSKGDQILINDGNVELRVVEVDGPRVKTVVIEGGVISDHKGINLPGAAVNVPALSDKDIEDLRFALKMGCDLVALSFVRDASDVKDVHKVMDEEGRRVPVIAKVEKPQAVENMEAVVAAFDGVMVARGDLAVEYPLEKVPMVQKRLVELCRRNAKPVIVATQMMESMITNSRPTRAEASDVANAILDGADAVMLSAESSVGAYPIETVKTMSKIVTAAEEELLSKGLQPLVPGKKPRTQGGSVARAACEIADFLGGKGLVAFTKSGDTARRLSRYRAAQPILAFTTDEGTRNQLALSWGVESHVVPFVNSTDEMVDLVDSELQNLKRFNDGDVVVMTAGSPPGVPGTTNMVRVHHLGEGKRA

SEQ ID NO: 8479 - DNA, 1491 bp, Nitrosomonas europaea ATCC 19718
  CDS (1)..(1491): transl_table=11
atgatgcgaagaacaaaaattgtagcaacgttaggaccggcttccagtaatgctgaagttctggggcgaatgctcgaagctggtgtcgatgttatccgtatcaatttctcacacggaacaaaagatgagcacatcgcttccgtagaactggttcgttcgctcgcccgctcgcttggccgtacagtcggtgtactggctgatttacaggggccaaaaattcgtatcggtaagtttgaacagggaaaaattcgactcaaaaccggggatgaattcatactcgatgcagaatgccagctgggaaaccaggaacgggtcggactggattatcgggaacttcctaatgatgtcgaagcaggcgccacgctcttattggatgatggacgtatcgttctgacggtggccaaagtcagagaaagtgaaatcttttgtgaagtgttgcagggcgggattctttccaacaataaaggtattaaccggaaaggcggagggttgagcgcacctgcactcactgcgaaagatttactggatatcaagacttccgcagtcattcgagcagattatctcgcagtatccttccctcgctccggtgacgatatcagacgcgcgcgcgcactgatgcaggaagctcaggggcatagtttgctcatggcaaaaatcgagcgctcagaagccattctggcactggatgatattctggaagcgtctgatgccatcatggtggcccgtggagatctggcagtcgaagtaggagatgccgctgttcccgccttgcaaaaacgcatgatacgatctgcacgtgaagcaaataagctggtaattaccgctacgcaaatgatggaatccatgatttccaaccctattccgacacgcgcagaagtatcagatgttgccaatgccgtactggatggtaccgatgcagtcatgctgtccgctgagtcggccgcagggcaatacccggttgaagccgtcgaagccatggccagagtttgtctcgaagcagaaaaggaatatacacccagtttgagagcacgccgttcccccgatacacagtcaatcagtattgaagatgccattgcgcgcgctaccatgtacgcagccggttcactcaatatccaggcaattgcagcattgacacaaagtggtgtaacagcgttgttcatgtcacgcagaagttcgaaagcacccatctttgcactcagcccgcaagaagataccctgggtaaagtcacccttttccgaggcgtttatcccatagaattcggacaaggactgtgtgatcccgaaatcatcctaggcatggctgaagacgagttactcaagcgtggtgcggtacgcgacgaagatctgataatcatgacgatcggtgaaccggttggcaaagctggcgggacgaacaccatgaagatcatcaaagtaggcagttccaagaaagctgcacaagcagtaagagaagtggcgcaacaacccttttctgatccgcagaatctgtaa

SEQ ID NO: 8480 - protein, 496 aa, Nitrosomonas europaea ATCC 19718
MMRRTKIVATLGPASSNAEVLGRMLEAGVDVIRINFSHGTKDEHIASVELVRSLARSLGRTVGVLADLQGPKIRIGKFEQGKIRLKTGDEFILDAECQLGNQERVGLDYRELPNDVEAGATLLLDDGRIVLTVAKVRESEIFCEVLQGGILSNNKGINRKGGGLSAPALTAKDLLDIKTSAVIRADYLAVSFPRSGDDIRRARALMQEAQGHSLLMAKIERSEAILALDDILEASDAIMVARGDLAVEVGDAAVPALQKRMIRSAREANKLVITATQMMESMISNPIPTRAEVSDVANAVLDGTDAVMLSAESAAGQYPVEAVEAMARVCLEAEKEYTPSLRARRSPDTQSISIEDAIARATMYAAGSLNIQAIAALTQSGVTALFMSRRSSKAPIFALSPQEDTLGKVTLFRGVYPIEFGQGLCDPEIILGMAEDELLKRGAVRDEDLIIMTIGEPVGKAGGTNTMKIIKVGSSKKAAQAVREVAQQPFSDPQNL

SEQ ID NO: 8481 - DNA, 1440 bp, Wigglesworthia glossinidia endosymbiont of Glossina brevipalpis
  CDS (1)..(1440): transl_table=11
atgcatagaataataagaagaacaaaaatagttgctacattaggaccatcaacagatttaaataataatttagaaaaaatgatattagctggagctaatatggttcgtatgaatttttctcatggaaatttttacgatcatgcaagaagaacaaaacaagtgagaaacatttctcataaactaggtaaaaatattgctattttaggagatttacaaggaccaaaaataagaatatctacttttatgacaggcaaagtatttttatcaccaggagatcaattcatactagatgcatcattaagcaaggatcttggaacagttgaaagtgttggaattgattataaatatcttccaaaagatgtatttccaggagatgttttattattagatgacggaaggatacagctaaaagtcaaaaaaattgtaaataaaaaaatttttacaactgtatatataggaggatatttatataataataaaggtattaataaattaggaggaggtttatcggctaattctttgacagaaaaagacaaaaaagatattatttgcgcagctaaaataggaatagattatttagctgtttcttttcctagaacaggaaaagacttaaaatatgcaagaaatttattaaataatgtagaaagtcatgcaaaaattatttcaaaaatagaaagagcagaagcggtagcaaataatgatattatagatgaaataataacagaatcagatgctattatggtagctagaggagatttgggaatagaaattggagatccagaattagtaggagtgcaaaaaaaattaatacaaagagctagagatttaaatcgtgcggtaattactgcaactcaaatgatggaatccatggtttataaccctatgccaaccagagcagaagttatggatgttgctaatgcagtattggatggcacagatgcagttatgttatcagcagaaacagctattggaaaatatccagtagaaactgtagaatctatgtctaatgtatgcataggagctgaaaaaatttctaatattaattctttgaagaatagattaaacattaaatttaaaaccgtagaagaatcaatggcggtatctgcaatgtatattgcaaatcatttaaatatgataaaagctataatttctcttacagaatctggtaaaactccattaattatgtctcgtataagttctggattaccaatttttgctctttcaaaacatgaacatactttaaatttaacagctttatatagaggggttactcctgtttattttaaaaataatgaaaaaggaatttcagctgctgattctgctattaatttgcttaaagaaaaaaaatttttattctctggagattttgtagtaattactcaaggagatgtcatggggactattggaaaaacaaataccagccgtatattaattgtataa

SEQ ID NO: 8482 - protein, 479 aa, Wigglesworthia glossinidia endosymbiont of Glossina brevipalpis
MHRIIRRTKIVATLGPSTDLNNNLEKMILAGANMVRMNFSHGNFYDHARRTKQVRNISHKLGKNIAILGDLQGPKIRISTFMTGKVFLSPGDQFILDASLSKDLGTVESVGIDYKYLPKDVFPGDVLLLDDGRIQLKVKKIVNKKIFTTVYIGGYLYNNKGINKLGGGLSANSLTEKDKKDIICAAKIGIDYLAVSFPRTGKDLKYARNLLNNVESHAKIISKIERAEAVANNDIIDEIITESDAIMVARGDLGIEIGDPELVGVQKKLIQRARDLNRAVITATQMMESMVYNPMPTRAEVMDVANAVLDGTDAVMLSAETAIGKYPVETVESMSNVCIGAEKISNINSLKNRLNIKFKTVEESMAVSAMYIANHLNMIKAIISLTESGKTPLIMSRISSGLPIFALSKHEHTLNLTALYRGVTPVYFKNNEKGISAADSAINLLKEKKFLFSGDFVVITQGDVMGTIGKTNTSRILIV

SEQ ID NO: 8483 - DNA, 1467 bp, Candidatus Blochmannia floridanus
  CDS (1)..(1467): transl_table=11
atgccgcaattattaagaagaactaaaattatcgctactctaggacctgctactgatcaaaaaaatactcttgaaaaaatcattatttcaggagttaatatagtaagattaaatttttcacatggaaattcttcagaacattttttcagagcaaataaagttcgaaaacttgctaatcaactacataaatatatagctattttaggcgacctacaaggccccaaaatcagaatttcaacctttcaaactaataacatatatttacagtctggagatgattttttaatagattctacgttaaaaaatagtcataataatcaaaaatatgtaggagtaaactataaagaattaccacaagatgtttctccaggagattatttattattggatgacggaaaaattcaattaaaagttataaaaattcaaaatacccaaattttcactaaagtagtaattggaggattattatctaataataaaggaatcaacaaattaggcggaggattatctgcaaaagtattaacaaataaagataaattagatattatcactgcagccaaaatcggagtagattatctagcgatatcctttcctcgcaacagtatggatttaaactttgcccgaaaactaattacagatgctggaagcaatgcaaaaattatatctaaaatagaaagagctgaagtagttaaatccgatgacacaatagatgatattattaaagcatctgatgcagttatgatagctagaggagatttaggaatagaaattggagaaccacaattagtaggaatacaaaaaaaaattatacaaagagcacatctcctaaatagagctgttattacagcaacacaaatgatggaatccatgataattaattcggttcctactcgagcagaaatcatggatgtcgccaatgcagtattggatggaacagatgcggttatgttatccgcagaaactgcaaccggacagtatccatctgaaaccgtttcttctatggctgatgtctgtttaggagcagaaaaaactctaaataatactaataatcaattaatatttatcaatcaactacaaaaaaaaattaacaataccaaagaagctattgcagcatcaacaatgcatatagctaattgtttaagtaaaatacgtgcaattatttctataactgattgggaacatattgtattattattatctcgatttaactctcaattacctatttttgctttatccaaacacattcatattcttaacattgttactttatataaaggagtaatacctatttattttaatcgaactggtaataatataatagatgcaagacaggcgagtaacttattgcgagatcaaggttttctaacacctggagaactagtaataataatacaagataatattgtgaatcaatctaatattaataacgtaactcatattcttacaatagaagaacaatgtaaataa

SEQ ID NO: 8484 - protein, 488 aa, Candidatus Blochmannia floridanus
MPQLLRRTKIIATLGPATDQKNTLEKIIISGVNIVRLNFSHGNSSEHFFRANKVRKLANQLHKYIAILGDLQGPKIRISTFQTNNIYLQSGDDFLIDSTLKNSHNNQKYVGVNYKELPQDVSPGDYLLLDDGKIQLKVIKIQNTQIFTKVVIGGLLSNNKGINKLGGGLSAKVLTNKDKLDIITAAKIGVDYLAISFPRNSMDLNFARKLITDAGSNAKIISKIERAEVVKSDDTIDDIIKASDAVMIARGDLGIEIGEPQLVGIQKKIIQRAHLLNRAVITATQMMESMIINSVPTRAEIMDVANAVLDGTDAVMLSAETATGQYPSETVSSMADVCLGAEKTLNNTNNQLIFINQLQKKINNTKEAIAASTMHIANCLSKIRAIISITDWEHIVLLLSRFNSQLPIFALSKHIHILNIVTLYKGVIPIYFNRTGNNIIDARQASNLLRDQGFLTPGELVIIIQDNIVNQSNINNVTHILTIEEQCK

SEQ ID NO: 8485 - DNA, 1443 bp, Bordetella bronchiseptica RB50
  CDS (1)..(1443): transl_table=11
atgcccgtactgcgccgcaccaaaatcgttgccaccctggggcccgccacgtccacgcccgagcggctcgacgggctgatacgcgccggcatggacgtggcccgcctgaatttctcgcacggcagcgcgcaggaccatcgcgagcgcgtgcggctggtgcgcgagctggcggccgagcaagggcgcttcgtggccctcatgggcgacttgcagggcccgaagatccggatcgcccgcttcaccgaccagcaggtcaccctgcaggccggccagcctttcacgctgtcgcgttcacattccaaggaggccggcgacgcaaccatcgtgggtatcgattatcccgagctggtgcaggactgccgccctggcgacgagctgctgctcgacgatggccgcgtggtgctggtggtcgacagcgtgggggccgaggaggtccacaccaccgtgacggtgggcgggccgctgtcgaacaacaagggcatcaaccggcgcggcggcggcctttcggcgcccagcctcaccgacaaggaccgcaccgacatcaagctggccgccgagatggagctggactacgtggccgtatcgtttccgcgctatggggccgacatcgatgaagcccgcgcgctgctgcgcgcggccggcagccaggcctggatcatcgccaagatcgagcgcgccgaggcggtggccgacgacgacgcgctggatgcgctgatccgcgccagcgacggcgtgatggtggcgcgcggcgacctgggcgtggaagtgggcgacgccgaactggtcggcatccagaagcgcatcatccagcacgcgcgtacgctgaacaaggtggtcatcacggccacccagatgatggagtccatggtggccagccccatgcccacgcgcgccgaggtgtcggacgtggccaacgcggtgctcgactacacggacgccgtcatgctgtcggccgaaagcgcctcgggccagtatccgatcgaggcggtggcggcgatggcacgggtctgtctgggggcggagaagcaccccaccaccacgcattcgcaccatcgcctgggcgagacgttcacgcgctgcgacgagaccatcgcgctggcggccatgtacgcggccaaccatttcccgggcgtgaaggccatcatcgcgctgaccgaaagcgggcacacgccgctgatcatgtcgcgcatccgttcgggcgtgccgatctactgctacagcccgcatggccccacgcagcggcgcgcggcgctgtttcgcggcgtctacacggtgcccttcgcgccggccgaatacgacccggccgacttgagcaacgcggccatcgatgagctgaagaagcgtggccgtgtcgcggcgggcgactgggtcatcctgaccaagggcgatttctaccgcgacagcggcggcaccaacggcctgaagatcctgaaggtggaatag

SEQ ID NO: 8486 - protein, 480 aa, Bordetella bronchiseptica RB50
MPVLRRTKIVATLGPATSTPERLDGLIRAGMDVARLNFSHGSAQDHRERVRLVRELAAEQGRFVALMGDLQGPKIRIARFTDQQVTLQAGQPFTLSRSHSKEAGDATIVGIDYPELVQDCRPGDELLLDDGRVVLVVDSVGAEEVHTTVTVGGPLSNNKGINRRGGGLSAPSLTDKDRTDIKLAAEMELDYVAVSFPRYGADIDEARALLRAAGSQAWIIAKIERAEAVADDDALDALIRASDGVMVARGDLGVEVGDAELVGIQKRIIQHARTLNKVVITATQMMESMVASPMPTRAEVSDVANAVLDYTDAVMLSAESASGQYPIEAVAAMARVCLGAEKHPTTTHSHHRLGETFTRCDETIALAAMYAANHFPGVKAIIALTESGHTPLIMSRIRSGVPIYCYSPHGPTQRRAALFRGVYTVPFAPAEYDPADLSNAAIDELKKRGRVAAGDWVILTKGDFYRDSGGTNGLKILKVE

SEQ ID NO: 8487 - DNA, 1818 bp, Gloeobacter violaceus PCC 7421
  CDS (1)..(1818): transl_table=11
atgcgcgtgggtgccgatgtgttcgttctagatgccaatgcccaacagacaactgccgcgccgagcgagcgggcgcgttttcgccgcaccaagattgtcgccaccatcggtcccgccgtcgacgacccgcaggccctgcgcaagctcatccaggccggggcgacgaccctcagactcaatttttcccacggcaaccacgaggagcaccgccgccgcatcggcctcatccgccagatttcctttgaactcaatcagccggtggccatcctgcaggatctgcaaggtcccaagatccggttgggcaagttcgccgacggaccaatcgtcctcaagcacggcgacccgtttattctgaccagccacgacgtgcccgccaaccagcacatcagtccgatcacctactcgcgacttatccaggaagtgcccaccggcgccacgatcttgctggatgacgggcgggtggaactggtagtcgaacgggtggacctcgaagcccaatacctgcactgccggacggtgggggggggcaagctctccaacagcaaaggcgtcaactttccgggtgtcaccctctcggtgccggcgatgaccgaaaaggaccgcgaggatttgctcttcggtctcaatcagggcgtcgattgggtggccctcagtttcgtgcgcaccccgagcgatttgctcgaactgaaggaactgattgcccaatcgggcaagcgggtgccggtgatcgccaagatcgaaaaattcgaggccttcgagaacctcgatgcggtgattgccgcctgcgacgggctgatggtggcccgtggcgatctgggcgtcgagatgcccgccgaggaagtgcccttgctccaaaagcggctgatcgcttcggccaatcgggccggcaagcctgtgatcaccgccacccagatgctcgattcgatggtgagcaacagccgcccgacccgcgccgaagtttccgatgtggccaacgccatcctggacggcaccgacgcggtgatgctctccaacgagaccgccgtgggcgagcacccgatcttggcggtcgagacgatggcgcgcatcgccgatcgcatcgagcgctcgatgccccagcgcacctgggtagacacgggccgctcgatcccgaacgccatctcccaggcagtgggaagcgtcgcccagcaattgggtgcccaggcgattctcaccctcaccaagtccggcgccaccgcccgcaacgtcagcaagtaccggccgagggtgccgattatcgcgattaccccgagcgtgtcggtggcgcgcgaactgcagatggtctggggggtctacccgctgatggtcctggatctgccttcgacccgccagacctttcaagcggcgatcagcgccgcccaggacgaaaacctcgtcctggaaggcgacctggtggtgatgaccgccggcaccatccaggggctctccggttcgacggacctgatcaaagtcgaggtggtgacggcgattctcggccggggattgggcctgggtcagaacgccgtgagtggacgcgcccgcatcgtccgccacagcgacgaagcggcggccttgagtcccggggacatcctgattgccccgcgcaccgacgccaattttatcgaagcgatcaagctcgcgggcggcatcgtcaccgaggagagcggcctcacctcccacgcagcgattatcgggctgcgcctcggactgccggtactgctcggggtgaaagactgcaccacccgcatcccggacggggtggtgctcaccctcgatccgcaaaaaggggtcatcttctccggggcggcctccgccgtctag

SEQ ID NO: 8488 - protein, 605 aa, Gloeobacter violaceus PCC 7421
MRVGADVFVLDANAQQTTAAPSERARFRRTKIVATIGPAVDDPQALRKLIQAGATTLRLNFSHGNHEEHRRRIGLIRQISFELNQPVAILQDLQGPKIRLGKFADGPIVLKHGDPFILTSHDVPANQHISPITYSRLIQEVPTGATILLDDGRVELVVERVDLEAQYLHCRTVGGGKLSNSKGVNFPGVTLSVPAMTEKDREDLLFGLNQGVDWVALSFVRTPSDLLELKELIAQSGKRVPVIAKIEKFEAFENLDAVIAACDGLMVARGDLGVEMPAEEVPLLQKRLIASANRAGKPVITATQMLDSMVSNSRPTRAEVSDVANAILDGTDAVMLSNETAVGEHPILAVETMARIADRIERSMPQRTWVDTGRSIPNAISQAVGSVAQQLGAQAILTLTKSGATARNVSKYRPRVPIIAITPSVSVARELQMVWGVYPLMVLDLPSTRQTFQAAISAAQDENLVLEGDLVVMTAGTIQGLSGSTDLIKVEVVTAILGRGLGLGQNAVSGRARIVRHSDEAAALSPGDILIAPRTDANFIEAIKLAGGIVTEESGLTSHAAIIGLRLGLPVLLGVKDCTTRIPDGVVLTLDPQKGVIFSGAASAV

SEQ ID NO: 8489 - DNA, 1443 bp, Photorhabdus luminescens subsp. laumondii TTO1
  CDS (1)..(1443): transl_table=11
atgtccagacggctcagaagaactaagattgttactacacttggtccggctaccgaccgcgataataatcttgaaaagattattgctgcgggtgcaaacgtagtccgccttaacttttcccacggtaccgccgaagatcatctccagcgagccagcaaagtccgcgagattgcagcccgcctggggtgccatgtcgctattcttggcgatcttcaaggacctaaaatccgcgtatcaacgtttaaagagggcaaaattttcctgaatatcggagataaatttctccttgatgccaatcttggtaaaggcgaaggcgataaggagaaagtcggtatcgattacaaaggactacccacggatgttgtaccgggcgatattttgttgctggatgacggacgtgttcaactcaaagtattagacgttcagggaatgaaagtcttcacggaagtcactgtaggcggcccgctatctaacaataaaggcattaacaaactgggtggtggattatccgcagaagccctaactgaaaaagataaagaagatattattacggcggccagaatcggcgttgattaccttgccgtctctttccctcgcaccggtgaagatcttaactatgcccgccgtctggcacgagacgcaggctgtgaaacgcagatcgtggcaaaagttgaacgcgcagaagccgttagcagtgataaaaccatcgatgaaatcattctggcttctgatgtggtcatggttgcccgtggtgaccttggcgtagaaatcggcgatccagagttagttggcgttcagaaaaaattaattcgccgtgcccgccagctaaatcgtgtagttattaccgcgacccagatgatggaatctatgatcaccaatccaatgcccacccgtgcagaagtgatggatgtggcaaatgccgttctcgacggtactgacgccgtaatgctctccgctgaaaccgcagcgggccaataccctgccgaaaccgttgccgcaatggcacgagtctgtctcggagcagaaaaaatgcctggcctcaacgtatcaaaacatcggctagacacaatttttgacagtattgaagaagccattgcgatgtctaccatgtacgcggcaaaccacttaaatggagttaaagccattattgccatgaccgaatcaggccgcaccactcgcatcatgtctcgcattagttctggtctcccgatattctctatgtcccgtcatgagaaaaccttaaaccaaacggcactttaccgtggcgttacaccggtttattgcagtagtcatactgacggcattacggcggccaatgaagcagttaatcgcctgcgtgataaaggttatctagtttccggtgatcttgttctggttactcagggtgatcagatggggacgattggcagtactaacacctgccgtattcttgaagtggaataa

SEQ ID NO: 8490 - protein, 480 aa, Photorhabdus luminescens subsp. laumondii TTO1
MSRRLRRTKIVTTLGPATDRDNNLEKIIAAGANVVRLNFSHGTAEDHLQRASKVREIAARLGCHVAILGDLQGPKIRVSTFKEGKIFLNIGDKFLLDANLGKGEGDKEKVGIDYKGLPTDVVPGDILLLDDGRVQLKVLDVQGMKVFTEVTVGGPLSNNKGINKLGGGLSAEALTEKDKEDIITAARIGVDYLAVSFPRTGEDLNYARRLARDAGCETQIVAKVERAEAVSSDKTIDEIILASDVVMVARGDLGVEIGDPELVGVQKKLIRRARQLNRVVITATQMMESMITNPMPTRAEVMDVANAVLDGTDAVMLSAETAAGQYPAETVAAMARVCLGAEKMPGLNVSKHRLDTIFDSIEEAIAMSTMYAANHLNGVKAIIAMTESGRTTRIMSRISSGLPIFSMSRHEKTLNQTALYRGVTPVYCSSHTDGITAANEAVNRLRDKGYLVSGDLVLVTQGDQMGTIGSTNTCRILEVE

SEQ ID NO: 8491 - DNA, 1434 bp, Rhodopseudomonas palustris CGA009
  CDS (1)..(1434): transl_table=11
atgagacgcctgcgcaggatcaagatcctcgccacgctcggccccgcctcctccgacagcgcaatgatccgcaagctgttcgaggccggcgccgacgtgttccggatcaacatgagccacaccccgcacgacaagatgcgggagctggtgaagaccatccgtaacgtcgaaagcagctacggtcgcccgatcggcatcctggtcgatctgcagggaccgaagctgcggctgggctcgttcgccaatggaccgatccagctcaacaacggctcgaacttcgtcctcgactcgatcaaggagccgggcgacgagacgcgggtgtatctgccgcatccggagatcctcgcggcgctcaaggtcggagacgcgctgctgctcgacgacggcaaggtgcgcttgatctgcgaagagacccaaggcgatcgcgcggtgacccgcgtggtgatcggcggcaagatgagcgaccgcaagggcgtcagcctgcccgataccgatctgccgatgtcggcgatgaccaacaaggaccgcgccgacctggaagctgcgtgcgagaccggcatcgactgggtggcgctgagcttcgtgcagcgcgccgaagacgtcgtcgaagccaagcggatgatccgcggccgtgccgccgtgatggccaagatcgagaagccgcaagcgatcgaccggctcgaggacattctcgacgtctccgacgcgttgatggtggcgcgcggcgacctcggcgtcgagatgccgctggagcgggtgccgagcctgcagaagcagatgacccgcatggcgcggcgcgccggcaagccggtggtggtcgcgacccagatgctggaatcgatgatctccagcccggtgccgacccgtgccgaagtctccgacgtcgcaaccgccgtgtacgaaggcgccgacgcgatcatgctgtcggccgaatccgccgccggcaaatatccggtcgaagcggtgtcgacgatgaaccgcatcggcgaggaagttgagcgcgacgtcacctatcgcaccgtggtgacggcgcagcgccccgatccggaagcgaccgccggcgatgccatcgcgggcgcggcaaggcagatcgcagagacgctcgatctgtcggcgatcatctgctggacctcgtcgggctcgaccgcactgcgggtcgcgcgtgaacggccgaaggtgccggtggtggcgatcactccgagccttcacaccggacgcaagctgtcggcggtgtggggcgtccactgcgtggtagcggaagacgccaaggatcaggacgacatggtcgagcgcgccggccgcatcgcattccgcgacggcttcgccaaatccggccagcgcgtcatcatcgtcgccggcgtcccactcggcacccccggcgccaccaacatggtccgcatcgcctatgtcggaccgagcgatgcggacgtgtga

SEQ ID NO: 8492 - protein, 477 aa, Rhodopseudomonas palustris CGA009
MRRLRRIKILATLGPASSDSAMIRKLFEAGADVFRINMSHTPHDKMRELVKTIRNVESSYGRPIGILVDLQGPKLRLGSFANGPIQLNNGSNFVLDSIKEPGDETRVYLPHPEILAALKVGDALLLDDGKVRLICEETQGDRAVTRVVIGGKMSDRKGVSLPDTDLPMSAMTNKDRADLEAACETGIDWVALSFVQRAEDVVEAKRMIRGRAAVMAKIEKPQAIDRLEDILDVSDALMVARGDLGVEMPLERVPSLQKQMTRMARRAGKPVVVATQMLESMISSPVPTRAEVSDVATAVYEGADAIMLSAESAAGKYPVEAVSTMNRIGEEVERDVTYRTVVTAQRPDPEATAGDAIAGAARQIAETLDLSAIICWTSSGSTALRVARERPKVPVVAITPSLHTGRKLSAVWGVHCVVAEDAKDQDDMVERAGRIAFRDGFAKSGQRVIIVAGVPLGTPGATNMVRIAYVGPSDADV

SEQ ID NO: 8493 - DNA, 1488 bp, Bdellovibrio bacteriovorus HD100
  CDS (1)..(1488): transl_table=11
atgttagcagatcgtcgagcgaagattgtggccactattgggccagcgacacgtgatgagaaaaatctggaaaaagcaataaaggcgggcatgaacgtggctcgccttaacttttcgcacggaagtcatgaagaccacctgaaggtggttcattccctgcgcaagctctctaaagagcttcaggctccggtggcgattcttcaagatcttcaggggccgaagatccgcgttggtaagtttgaaaatggctccatcgaaattaaacctggcgaaaaactggtggtaacgacggcaaaagttctggggaaaccaggattggttccgtccgacttccaagagctgcctttggcctgcgtgccgggcacgcgcatccttctggatgacggcctgatggaagtgaaggttttgcaggttcgcggtgaggaaatcgacgtggaagttgtctatggcggtattctgaaagaccgcaaaggcatgaatcttccgggtgtaaatctgcctgtggactgcatgactccaaaagatctggaggatttgcagttcggtattgccaataaagttgattatattgctttgagttttgttcgtcatgcccgtgatatccgcaagctgcgtgaattgatcgaggccgggaactccaatgcgaagatcgtagccaaaatcgagatggtggaagcgatcgaaaatctggaagaaatctgccgcctgagtgacgctgtcatggtggcgcgcggggatttggcagtggaagtcggtcaaagccgtctgccgggctatcagaagcgtattatttctgtatgcaatcaactgggtaagccggtgatcacggcgactcagatgctggacagcatggttgaaaaccctcgtccgacccgagctgagatcacggatgtggccaatgccgttttggatggaactgatgctttgatgctgtcggcggaatctgccagcggcaaatatccgttcaagtgtatccgcactatgcacgagatcatcactgaggtggaacgcaacgaagaagagtattataaaatctctcttgaaaacgagtttctgagcacgccggcgtctatcgccgccagtgcttcactgagtgcgctgaagctgaatgcaaccgcgatcatctgtctgacgacttccggtaaaacggcaaatatcatttcggccttccgtccgaaggcgcgcattatttccgtgactcagcatctggatgttttgaatggcatggaattgggctggggtattcagacccacgcgatcaagccatataagacgatggaagatatcctgcgtgaagtggatctgttgttggtgtcccatggcttgggtaaaaccggggaccgtgtgattctgacattgggtcagccgattgcttgtggtgcaaaaaccaattcgatctatgtgcacacagtgggcggggaaaacgtggcgaagcttcctaatgacaagttgcctctgcgttgtcaggaagagccggttgttgaataa

SEQ ID NO: 8494 - protein, 495 aa, Bdellovibrio bacteriovorus HD100
MLADRRAKIVATIGPATRDEKNLEKAIKAGMNVARLNFSHGSHEDHLKVVHSLRKLSKELQAPVAILQDLQGPKIRVGKFENGSIEIKPGEKLVVTTAKVLGKPGLVPSDFQELPLACVPGTRILLDDGLMEVKVLQVRGEEIDVEVVYGGILKDRKGMNLPGVNLPVDCMTPKDLEDLQFGIANKVDYIALSFVRHARDIRKLRELIEAGNSNAKIVAKIEMVEAIENLEEICRLSDAVMVARGDLAVEVGQSRLPGYQKRIISVCNQLGKPVITATQMLDSMVENPRPTRAEITDVANAVLDGTDALMLSAESASGKYPFKCIRTMHEIITEVERNEEEYYKISLENEFLSTPASIAASASLSALKLNATAIICLTTSGKTANIISAFRPKARIISVTQHLDVLNGMELGWGIQTHAIKPYKTMEDILREVDLLLVSHGLGKTGDRVILTLGQPIACGAKTNSIYVHTVGGENVAKLPNDKLPLRCQEEPVVE

SEQ ID NO: 8495 - DNA, 1416 bp, Treponema denticola ATCC 35405
  CDS (1)..(1416): transl_table=11
atgaaaaaaacaaaaatagtatgcacaatagggcccgcttccgactcggaaagggtcttggcagaaatgtttaaagccggtttaaatgtctgccgccttaatttttcgcatggaagccatgaagaacacaaggttaaaatagatcgaataaaaaaaataagagaagagttaaaaatgcctattgcacttttactggatactaagggacccgaaatccgtttgggcctttttgaaaagcctgtagaaattgtacaaggtcaggaatttataattacaaccagagatgtaatcggaacaaatcaaatatgcagcatctcatataagaatattgccgccgaaattaaacctaaaagcagaatccttataaatgacggattattggagttacaggttatcgatattttaaacgatacggacatagaatgtgtcgcagtaaattccggaaccctaagcagccgaaaaggtgtaaacattccgggcttgagggtaaaccttccttacatgagtgaaaaggatatctccgatatcgaattcggaattgaaaatgatgtggattttattgccgcctcctttacacaaagagccgacgatattatccaaataagaaaacttttggaaaaacacaaaagtacaatcgccgttatagcaaaaatagaaaatcaagaaggcttggacaacatagatgaaattttagcggaagccgacggaataatggtagcccggggagatatgggtgtagaaatagagcccgaaaaaatccctcatcttcaaaagcagctgataaaaaaagcaaaccttgcaggaaagccggttatcaccgcaactcagatgctcgaatctatgacccacaacctgcgtcccaccagagccgaagttaccgacgttgcaaacgctattctcgacggaacatcagctgtaatgctttctggagaaaccgcagcaggcgaataccctgtcgaaaccgtggccatgatgacctcaattgcgaactctatagaagaaacattagattatgaaaaactatttgctgaaaatgcttctcttcatgagaccacaatcacaaatgcaattgcaagagccacctgctccactgccctagccctcgatgcaaatgcaatcataacggcatccgcttcgggaataacgcccagagctctttcaaaatttaaaccaagggtaccgattattgcaataacggaatcgcctcaggttatgagaaagatggccctcgactgggacgtatatccggttttagccgatcctataaaatcgaccgataacatgttcgatgtgtgttcgcaaattgcaaaggatacaggccatgtaaaaaaaggagacatagcaatccttacggccgggattcctataggcaaagcaggatctacaaaccttctaaaggtagaaataatagaataa

SEQ ID NO: 8496 - protein, 471 aa, Treponema denticola ATCC 35405
MKKTKIVCTIGPASDSERVLAEMFKAGLNVCRLNFSHGSHEEHKVKIDRIKKIREELKMPIALLLDTKGPEIRLGLFEKPVEIVQGQEFIITTRDVIGTNQICSISYKNIAAEIKPKSRILINDGLLELQVIDILNDTDIECVAVNSGTLSSRKGVNIPGLRVNLPYMSEKDISDIEFGIENDVDFIAASFTQRADDIIQIRKLLEKHKSTIAVIAKIENQEGLDNIDEILAEADGIMVARGDMGVEIEPEKIPHLQKQLIKKANLAGKPVITATQMLESMTHNLRPTRAEVTDVANAILDGTSAVMLSGETAAGEYPVETVAMMTSIANSIEETLDYEKLFAENASLHETTITNAIARATCSTALALDANAIITASASGITPRALSKFKPRVPIIAITESPQVMRKMALDWDVYPVLADPIKSTDNMFDVCSQIAKDTGHVKKGDIAILTAGIPIGKAGSTNLLKVEIIE

SEQ ID NO: 8497 - DNA, 1587 bp, Magnaporthe grisea 70-15
  CDS (1)..(1587)
atggctaccgcccttgaccacctctacattggcggccgcatcaactggctggcccagttgaacacggctgcccagcctgacaagaactaccgccgttcttccatcatctgcaccattggccccaagaccaactcggtcgaggccatgaacgacctgcgcaaggccggcatgaacgtcgtccgcatgaacttctcccacggaagctacgagtaccaccagtccgttatcgacaatgcgcgtgaggctgagaagcagatgcccggccgtcagctcgccattgctctcgacaccaaaggccccgagatccgtaccggcaacaccaagaacgatgaggacctgcccatctcggccggcaaggagcttaactttaccactgatgagcagtacgccaccagctgtgacacggacaatgtctacgtcgactacaagaacatcaccaaggtcattgagaagggacgcattatttatgtcgacgatggtgtcttggcttttgaggttctcgatgtgattgacgagaagaccgtccgcgtccgtgcccgcaacaacggcttcatctgctccaagaagggtgtcaacctgcccaacaccgacgttgacctgcccgccctttccgagaaggacaaggccgacttgaggtttggtgtcaagaacaacgtcgacatggtctttgcttcgttcatccgccgcggccaggacatcaaggatatccgtgaggttctcggccaggatggcgcccacatccagatcattgccaagattgagaaccgtcaaggcctgaacaacttccctgagatcctcaaggagactgatggcgtcatggttgcccgtggtgacctgggtattgagatccctgccgccgaggttttcgcggctcagaagaagatgattgctctgtgcaacatggccggcaagcccgtcatctgcgctactcagatgctcgagtccatgatcaagaacccccgccccacccgtgccgagatcagcgatgttggcaacgccgtcaccgacggttcggactgtgtcatgctttccggtgagacggccaagggtagctacccctgtgaggccgtcagggagatgagcgatgcttgtctcaaggctgagaacacgatcccgtacgtcagccactttgaggagatgtgcggtgctgtccaccgcccagtcagcattgtcgagtcgtgcgccatggccgctgttcgtgcctcgcttgacatcaacgctggcggcatcatcgtcctctctacctcgggcgtctcggcacgtctcctgtccaagtaccgcccggtctgccccatcttcatggtcacccgcaacgcctcggcatcaaggtacagccacttgtaccgtggtgtctacccattcctgttccctgaggccaagcccgacttctccaaggtcaactggcaggaggatgtcgaccgccgcatcaagtggggtgtcaagcacgccctcgatctgggtgtgcttgagaagaacgactcgattgtcgtcgtccagggctggaagggcggcatgggcaacaccaacaccatccgtgtgctcaaggccgataccgagagccttggaattggccaggctgacatttaa

SEQ ID NO: 8498 - protein, 528 aa, Magnaporthe grisea 70-15
MATALDHLYIGGRINWLAQLNTAAQPDKNYRRSSIICTIGPKTNSVEAMNDLRKAGMNVVRMNFSHGSYEYHQSVIDNAREAEKQMPGRQLAIALDTKGPEIRTGNTKNDEDLPISAGKELNFTTDEQYATSCDTDNVYVDYKNITKVIEKGRIIYVDDGVLAFEVLDVIDEKTVRVRARNNGFICSKKGVNLPNTDVDLPALSEKDKADLRFGVKNNVDMVFASFIRRGQDIKDIREVLGQDGAHIQIIAKIENRQGLNNFPEILKETDGVMVARGDLGIEIPAAEVFAAQKKMIALCNMAGKPVICATQMLESMIKNPRPTRAEISDVGNAVTDGSDCVMLSGETAKGSYPCEAVREMSDACLKAENTIPYVSHFEEMCGAVHRPVSIVESCAMAAVRASLDINAGGIIVLSTSGVSARLLSKYRPVCPIFMVTRNASASRYSHLYRGVYPFLFPEAKPDFSKVNWQEDVDRRIKWGVKHALDLGVLEKNDSIVVVQGWKGGMGNTNTIRVLKADTESLGIGQADI

SEQ ID NO: 8499 - DNA, 1623 bp, Gibberella zeae PH-1
  CDS (1)..(1623)
atgcctcagaagtcagaaaaccaaaacaaaagcgtcatggctactaccgctcaggaccacctcgaattcggtggcaagatctcatggcttgcttccctcgacaccgctttccgacctgagcgcaactaccgccgctcttccatcatctgcaccattggccccaagaccaactctgtcgaggccatcaacaagctccgagattccggtcttaatgttgttcgcatgaacttttctcacggatcatacgagtaccacaagtccgtcattgaccatgctcgtgagtccgaggccacccacgctggccgcaacgtcgccattgccctcgacaccaagggtcccgagatccgaactggtaacactcccggcgatgaggacattcccatcagcgtcggacacgagatgaacatcaccaccgacgatgcttatgctaccgcttctgacgacaagaacatgtacgtcgactacaagaacattaccaatgtcattgagcccggccgtatcatctacgtcgacgatggtgtccttgctttcgatgttctcaagatcgttgacgagaagactatccttgtcaaggcccgcaacaacggtgctatctgctccaagaagggtgtcaacctgcccaacactgatgtcgatctgcctgccctttccgagaaggacaaggccgatctgaagttcggtgttgagaacaacgtcgacatggtctttgcttcatttatccgccgcgctcaggatatctacgacatccgtgacgtcctcggcgagcagggcaagcgcatccagatcatcgccaagatcgagaaccgacaaggtctcaacaacttccgcgagattctcgaggccacagacggtgtcatggtggcccgtggtgatctcggtattgagatccccgctgctgaggttttcgctgcccagaagaagctcattgccatgtgcaaccttgccggcaagcctgtcatctgcgccactcagatgctcgagtccatgatcaagaacccccgccccacccgtgccgaaatcagcgatgtcggtaacgccattactgacggtgctgactgtgtcatgctttccggtgagacggccaagggtagctacccctccgaggccgtcaaggagatgcacgaggcctgtctcaaggctgagaacaccatcccctatgtctctcacttcgaggagatgtgcactctcgtcaagcgccccgtcagcactgtcgagtcctgcgccatggccgctgtccgtgcctctctcgatcttggtgccggtggtatcattgttctctccacctctggcgagtctgcccgcatgctttccaagtaccgccccgtctgccctatcttcatggtcacccgaagccccacaacatctcgattcgctcacttgtaccgtggcgtctaccccttcctattccccgagcagaagcccgactttgctcaggtcaactggcaggaggatgttgaccgccgaatcaagtgggctgtcaacaacgctcttgagcttaacgtcctgacccccggcgacactgtcgtcgttgtccagggctggaagggcggcatgggtaacactaacaccctccgaattgtcaaggccgaccccgagcacctcggcattggccagcttcagtaa

SEQ ID NO: 8500 - protein, 540 aa, Gibberella zeae PH-1
MPQKSENQNKSVMATTAQDHLEFGGKISWLASLDTAFRPERNYRRSSIICTIGPKTNSVEAINKLRDSGLNVVRMNFSHGSYEYHKSVIDHARESEATHAGRNVAIALDTKGPEIRTGNTPGDEDIPISVGHEMNITTDDAYATASDDKNMYVDYKNITNVIEPGRIIYVDDGVLAFDVLKIVDEKTILVKARNNGAICSKKGVNLPNTDVDLPALSEKDKADLKFGVENNVDMVFASFIRRAQDIYDIRDVLGEQGKRIQIIAKIENRQGLNNFREILEATDGVMVARGDLGIEIPAAEVFAAQKKLIAMCNLAGKPVICATQMLESMIKNPRPTRAEISDVGNAITDGADCVMLSGETAKGSYPSEAVKEMHEACLKAENTIPYVSHFEEMCTLVKRPVSTVESCAMAAVRASLDLGAGGIIVLSTSGESARMLSKYRPVCPIFMVTRSPTTSRFAHLYRGVYPFLFPEQKPDFAQVNWQEDVDRRIKWAVNNALELNVLTPGDTVVVVQGWKGGMGNTNTLRIVKADPEHLGIGQLQ

SEQ ID NO: 8501 - DNA, 1515 bp, Candida albicans SC5314
  CDS (1)..(1515): transl_table=12
atgtctcactcatctttatcttggttatccaacttcaatgttgaaactgttccatctaaatatttgagaagatcctcaattatcggtaccattggtccaaaaaccaacaacgtggacgttttggttaaattgagaaaagctggtttgaacgttgtcagaatgaatttctcccatggttcttatgaataccatcaatctgtcattgacaatgctagaaaatctgaagaagtctacaaaggtagaccattggccattgccttggataccaaaggtccagaaatcagaactggtactaccattggtgacaaagattacccaattccaccaaaccacgaaatgatcttcaccactgatgatgcttacaaaactaaatgtgacgacaaggtcatgtacattgactataagaacatcaccaaagtcattgctccaggtaaaatcatatatgttgatgatggtgtcttgtcatttgaagtcatctccgttgatgatgaacaaactttgaaagtcagatctcttaacgctggtaagatctcttcccacaaaggtgtcaacttgccaggtaccgatgttgatttgccagctttatcagaaaaagatatcgctgatatcaaatttggtgtcaaaaacaaggtccacatgatctttgcttcctttatcagaactgctaacgatgttttggaaattagaaaagttttgggtgaagaaggtaaggacattcaaattatctccaagatcgaaaatcaacaaggtgtcaacaactttgacgaaattttggaagttaccgatggtgttatggttgctagaggtgatttgggtattgaaattccagctccacaagtgtttgttgtccaaaaacaattgattgctaaatgtaacttggctgccaaaccagtcatttgtgccacccaaatgttggaatccatgacctacaacccaagaccaaccagagctgaagtttctgatgttggtaacgctatcttggatggtgctgactgtgttatgttgtctggtgaaaccgctaaaggtaactacccagttgaagccgtctctatgatgcacaacacttgtcttaccgctgaaaaggccattgcctacccacaattgttcaacgaattgagatcattggctaaaaaaccaactgctaccactgaaacttgtgctgttgccgctgtttctgctgcttacgaacaagatgctaaagctattgttgtcttgtccaccagtggtctttctgctagattggtttctaaatacaaaccagatgttccaattttgatggttaccagaaacgaaagagctgctaaattctcccacttgtacagaggtgtctacccattcatttacgataaaccaagtattgaaaactggcaagaagatgttgaaaacagattgagatgggctgtttctgaagctgttgaattgggaatcatttctaaaggtgactcaattgttactgtccaaggttggactagaggttctggtcactctaacactgttagaatcgtccaagcttaa

SEQ ID NO: 8502 - protein, 504 aa, Candida albicans SC5314
MSHSSLSWLSNFNVETVPSKYLRRSSIIGTIGPKTNNVDVLVKLRKAGLNVVRMNFSHGSYEYHQSVIDNARKSEEVYKGRPLAIALDTKGPEIRTGTTIGDKDYPIPPNHEMIFTTDDAYKTKCDDKVMYIDYKNITKVIAPGKIIYVDDGVLSFEVISVDDEQTLKVRSLNAGKISSHKGVNLPGTDVDLPALSEKDIADIKFGVKNKVHMIFASFIRTANDVLEIRKVLGEEGKDIQIISKIENQQGVNNFDEILEVTDGVMVARGDLGIEIPAPQVFVVQKQLIAKCNLAAKPVICATQMLESMTYNPRPTRAEVSDVGNAILDGADCVMLSGETAKGNYPVEAVSMMHNTCLTAEKAIAYPQLFNELRSLAKKPTATTETCAVAAVSAAYEQDAKAIVVLSTSGLSARLVSKYKPDVPILMVTRNERAAKFSHLYRGVYPFIYDKPSIENWQEDVENRLRWAVSEAVELGIISKGDSIVTVQGWTRGSGHSNTVRIVQA

SEQ ID NO: 8503 - DNA, 1587 bp, Ustilago maydis 521
  CDS (1)..(1587)
atgatctacgctcctattgccaagacacagctcgagtggtacgcctcgctcaacccgcttgagcacggcgttgacaacaagttcttccgtaagacctcgatcatcgctaccattggccccaagaccaacaatgtcgagatgctcggcgctctgcgtcaggctggtatgaacatcgtccgtctcaatgcttcgcacggttcgcacgagtacttcaagtcggttgtcgacaacgcacgtgccgttgttgccaagacccctggccgtccacttgccatcgctctggacaccaagggtcccgagatgcgaactggtgtcatggtcaacggtgaggacgtcaagatctccatgggccacgagttctatgtcaccaccgacgatgcgtatgctgaaaagtgcagcctggactacctctacattgactacaagaacctcgcccagaaggtcgaggtgggccgaaccatcttcatcgatgacggcatcctttcgctccaggtgctcgccatcgagagcgacaagctcgtcaaggtgcgcgccgtcaacaacggtgtcctttcttccaagaagggtgtcaaccttcccatgaccgaggttgacctgcccgcgatctcggacaaggaccgcaaggacatcgagtttgccgtcgagcaggacctcgacatgatctttgcctcgttcatccgacgcggcagcgatgttcgcaccattcgagaaattctcggcgagaagggtgcgcacatcaagatcatctccaaggtggagaaccatcagggtgttcagaactttgacgagatcctcaaggagtcggacggtatcatggtggcacgtggtgacctcggtatcgagatccctgctccccaggtgtttatggcgcaaaaaatgatgatctccaagtgcaacattgctggcaagcccgtcatctgcgcaacccagatgctcgagtcgatgattgtcaacaaccgacccacgcgtgccgaagtttccgacgtggccaacgctgttctcgacggtgctgactgtgtcatgctttccggagagactgccaagggtgcctaccctatcgaggctgtcaagatgatggccgagaccgcctaccttgccgagcagagcgtttcgtacgtgccgctcttcaacgagatgcgcactctcacttcaatccccacggacaccaacgagaccatcgccatggctgcggttgctgcttcgctcgagcagcacgccggtgcgatcttgctcatgtcgaccagcggtaccacggcacgactggtcagcaagtaccgtccaagctgccctatcctgactatcacgcgtaactcgcacaccgcgcgcgatgtgcacttgtaccgtggctgctacccgttcctctacccccacgctcgccccgaggacaacagcaagtggcaggaggacgtcgacaaccgcatcaagtacggtcttgctgaggcgctcgcgctcggcatcattgagaagggcgatgtcgtcatcaccctgcagggctggagggcacagagcggaagcaccaacaccatccgtatcctcagcgttcccgagagcgcgcgtgatttcaagctcgagggcactcaggtttag

SEQ ID NO: 8504 - protein, 528 aa, Ustilago maydis 521
MIYAPIAKTQLEWYASLNPLEHGVDNKFFRKTSIIATIGPKTNNVEMLGALRQAGMNIVRLNASHGSHEYFKSVVDNARAVVAKTPGRPLAIALDTKGPEMRTGVMVNGEDVKISMGHEFYVTTDDAYAEKCSLDYLYIDYKNLAQKVEVGRTIFIDDGILSLQVLAIESDKLVKVRAVNNGVLSSKKGVNLPMTEVDLPAISDKDRKDIEFAVEQDLDMIFASFIRRGSDVRTIREILGEKGAHIKIISKVENHQGVQNFDEILKESDGIMVARGDLGIEIPAPQVFMAQKMMISKCNIAGKPVICATQMLESMIVNNRPTRAEVSDVANAVLDGADCVMLSGETAKGAYPIEAVKMMAETAYLAEQSVSYVPLFNEMRTLTSIPTDTNETIAMAAVAASLEQHAGAILLMSTSGTTARLVSKYRPSCPILTITRNSHTARDVHLYRGCYPFLYPHARPEDNSKWQEDVDNRIKYGLAEALALGIIEKGDVVITLQGWRAQSGSTNTIRILSVPESARDFKLEGTQV

SEQ ID NO: 8505 - DNA, 1761 bp, Clostridium difficile 630
  CDS (1)..(1761): transl_table=11
atgttaaataatgtaaagaagacaaaaattgtttgtacactaggtccagcatcacaaagtgaggaagttttaactcaacttatgcaaaatggtctaaatgtgtgtagatttaacttttctcacggttcgcatgaagaacataaagaaagaattgatatggcaaagaaagttagagaaaaattaaataagccagttgctatattattagatactaaaggtccagaaattagaacaggtaactttgaagacccagaggtatttttagaagaagggcaaaagttcactataactatgaaagatattatggggactaaagaaatgtgtacagtaagctataaaggtcttgctgaagacgttaaatcaggagattctatactaatagatgatggtttagttggcttaagagtaaaagaaataaatggagaagatatagtttgtgttgttgaaaattcaggaatagttaaaaatcataaaggagtaaatgtacctggtgttaagataaatttaccagcaataactcctaaagatataagtgatatagagtttggaataagtcaaggaatagattatatagctgcttcttttgtaagaaaggcatctgatgtactagcaataagagaagtattagagaacaataatgcaactgatatacaaataatatctaaaatagaaaaccaagaaggtgtagagaacctagatgaaatattaaaagtttctgatggtataatggtggctagaggtgacttaggtgttgagataccaactgaagagatgccaatagttcaaaaaatgatgataaaaaaatgtaatgaattagcaaagccagttgttactgccactcaaatgcttgattctatgataagaaatccaagaccaacaagagcagaagttacagacgttgccaatgctatatatgatggaacagatgcgataatgttatctggagaaactgctgctggaaaatatcctgtagaggcagtaaaaatgatggctacaatagcaaaaagaacagaagagactttagattatgatagattactaaaggaaaatggtactaacaatgttactgtaacagatgcaataagccatgcaacttgtacaacagcagtagatttaaatgcatcagctataataacatctacttcttcaggatatactgctagaatggtatctaaattcagaccaaaatctccaataatagctactacaaataatgaaaagactatgaataaattagctcttacatggggagtatatccagttaagtcttctgttgcaggaaatacagatgaagttatagaaaaggcaattgaggcagctagacaagctgattatatagataatggggaattagtagttataactgctggagtaccagtaggagtaagtggaactactaatttaataaaggttcatgtaataagcgaagaaatcgtgcaaggtataggtgtaggtactcaaacagtagaaggtaaagttcgtataataaagaatggaaatgcttgtgtagactttaatgaaggcgacatacttgtttctactgctactgatgctgaaatgaacaattatatagaaaaagcaggagctgtagtaactgagaatggtggaatgacatcacatacagctattgtaggtataaatttagatataccagttattgtgtctgcagctgatataacaaatctagtaaaagatggagaagttgtaactgtggatgcatcaagaggcgtggtatatagaggttcaactagagttttataa

SEQ ID NO: 8506 - protein, 586 aa, Clostridium difficile 630
MLNNVKKTKIVCTLGPASQSEEVLTQLMQNGLNVCRFNFSHGSHEEHKERIDMAKKVREKLNKPVAILLDTKGPEIRTGNFEDPEVFLEEGQKFTITMKDIMGTKEMCTVSYKGLAEDVKSGDSILIDDGLVGLRVKEINGEDIVCVVENSGIVKNHKGVNVPGVKINLPAITPKDISDIEFGISQGIDYIAASFVRKASDVLAIREVLENNNATDIQIISKIENQEGVENLDEILKVSDGIMVARGDLGVEIPTEEMPIVQKMMIKKCNELAKPVVTATQMLDSMIRNPRPTRAEVTDVANAIYDGTDAIMLSGETAAGKYPVEAVKMMATIAKRTEETLDYDRLLKENGTNNVTVTDAISHATCTTAVDLNASAIITSTSSGYTARMVSKFRPKSPIIATTNNEKTMNKLALTWGVYPVKSSVAGNTDEVIEKAIEAARQADYIDNGELVVITAGVPVGVSGTTNLIKVHVISEEIVQGIGVGTQTVEGKVRIIKNGNACVDFNEGDILVSTATDAEMNNYIEKAGAVVTENGGMTSHTAIVGINLDIPVIVSAADITNLVKDGEVVTVDASRGVVYRGSTRVL

SEQ ID NO: 8507 - DNA, 1416 bp, Herminiimonas arsenicoxydans
  CDS (1)..(1416): transl_table=11
atgagacgtaatcgcaaagcaaaaatcgttgctaccctgggcccagcaagtggcgatctggaaaccatcaccgcgctgtacgaagccggtgtggacatgttccgcttcaacttcagccacggttcgcacgaagatcaccgcgcacgccacgaaatcgttcgtggtctggaaaagaaatacggcgcgccgatctccatcctggctgacttgcaaggaccaaaaatccgcctcggcacattcgcaggcgactccgctgtcttgaaagtcggcgaacagttcgtactcgatcgtgacgaaacacctggcgatgcaacacgcgtgtatctgccacatccggaattgtttgctgcagttgccgcaggtcaaaacctgttgcttgacgatggtaaagtgcgtttgaacattgtcagtaacaaggataatcgtatcgtcaccaccgttgcagtcggcggcaagatttcgaaccgcaagggtgtcaacgtgcctgacgccattctgcctattcctgccatgacagcaaaagatctggtcgatctggaatttgccttgtccctgggcgtggactgggttgcactgtcctttgtgcaacaagtttcggacatcaccgaagcgcgcgccatcatcggtgaccgtgccggcatcatgtcgaaaatcgaaaaaccggcagcaatgctggacatcgatgcaatctgcaatgcatccgattccgtcatggttgcccgtggcgatctgggcgtagaactgccggcagaacaagtgccacgcgcacaaaaagaaatcctgaaagcatcacgcaagtacggcaagccagtcatcatcgcaacacaaatgctggaatcgatgaccgaatcgccagtgcctacccgtgcagaaacttccgacgtcgccagcgcgatttacgaaggttccgatgcggtcatgttgtctgctgaatcggctagcggtaaattcccggtcaaggctgttgccatgatggatcgcatcatcaaggaagtcgaagctgatcctgcttacctttgcctgatcgacgcgcaacaagtaccaccgttgccgacacctgaagatgcaatttgccatgccttgcgtgaagtagtcaaaaccgtcaatgcagttgctaccgtgacctatacaaattccggtcacaccagcatgagcgttgcgcgtatgcgtccgaccgctcccatcctgagcatcacacctaacgtcaacacagcacgccgcctggcgttggtgtggggcatacactcgacgataggcaaggacgttggttcggttgatgaaatggtggcggcggcagttgcgaccgcagtgcgtgaaggcttcgctaaaaccggtgaacgcgttaccgtgtcggctggtttgccattcggcgaatcgggcacgaccaatctgttgcacatcgcaacagtgaagtaa

SEQ ID NO: 8508 - protein, 471 aa, Herminiimonas arsenicoxydans
MRRNRKAKIVATLGPASGDLETITALYEAGVDMFRFNFSHGSHEDHRARHEIVRGLEKKYGAPISILADLQGPKIRLGTFAGDSAVLKVGEQFVLDRDETPGDATRVYLPHPELFAAVAAGQNLLLDDGKVRLNIVSNKDNRIVTTVAVGGKISNRKGVNVPDAILPIPAMTAKDLVDLEFALSLGVDWVALSFVQQVSDITEARAIIGDRAGIMSKIEKPAAMLDIDAICNASDSVMVARGDLGVELPAEQVPRAQKEILKASRKYGKPVIIATQMLESMTESPVPTRAETSDVASAIYEGSDAVMLSAESASGKFPVKAVAMMDRIIKEVEADPAYLCLIDAQQVPPLPTPEDAICHALREVVKTVNAVATVTYTNSGHTSMSVARMRPTAPILSITPNVNTARRLALVWGIHSTIGKDVGSVDEMVAAAVATAVREGFAKTGERVTVSAGLPFGESGTTNLLHIATVK

SEQ ID NO: 8509 - DNA, 1437 bp, Burkholderia vietnamiensis G4
  CDS (1)..(1437): transl_table=11
atgcagcgcgccaccaagatagtcgccacgatcggtccagcctccagttcgccggagattctgctgcagatgatgcaggcgggcctcgacgtcgtgcggctcaatttttcgcacggcacggccgacgatcatcgccagcgcgccgagatggtgcgcgaggccgcccgcaaggtcggccgcgagatcgcgatcatggccgacctgcagggtccgaagatccgcgtcggcaagttcgagaacggcaagaccacgctggcgccgggccaggcgttcatcctcgacgcgggttgcgaactcggcaacgacgagcgcgtcggcctcgactacaaggaactgccgcgcgacctgaagccgggcgacctgctgctgctgaacgacggcctgatcgtgctgaccgtcgagcgcgtgctcggcgaggagatccacacgatcgtcaaggtgggcggcgagctgtcgaacaacaagggcatcaatcgtcagggcggcggcctgtcggcgcccgcgctgaccgcgaaggacatggaggacatccgcaccgcgatgtcgctcggcgcggatctcgtcgcggtgtcgttcccgaagaatgcaaccgacatggaaatggcgcgccagctcgcgaacatcgcgggcgcgccgtacggcatcaagccgaagatgatcgcgaagatcgagcgcgccgaggcgattccggcgctgcagagcatcctcgatgcgtccgacgggatcatggtcgcgcgcggcgacctcgcggtcgaagtgggcaacgcggccgtgccggcgctgcagaagcggatgatccggatggcgcgcgagtcgaacaagctcgtgatcaccgcgacgcagatgatggaatcgatgatccacgcgccggtgccgacgcgcgccgaagtgtcggacgtcgcgaacgcggtgctcgacggcaccgacgcggtgatgctgtcggccgaaacggccgccggcaagtatccggtcgtcacgatcgagacgatggcggcggtgtgcgtcgaagcggaaaaatcggagcacgtcgaactcgacaaggatttcctcgaccgcacgttcacgcgtatcgaccagtcgattgcgatgggcgcgctgttcaccgcgtatcacctgggtgcgaaggcgatcgtcgcgctgaccgaatcgggcgcgaccgcgctgtggatgtcgcgtcactacacgcacgtgccgatcttcgcgctgacgccgcgcgtcggcagcgagcgcacgatggcgctgtaccgcaacgtgacgccgctgcacgtcgacttcaacagcgaccgcgacgccgcgctgcaggcggcgctcgagatgatcgtcaagcagggctacgtgcagcacggcgacatggtcgtgctgaccgtcggcgagccgatggggcaggcgggcggcaccaatacgctgaagatcgtgcgggtcggcgagcactattga

SEQ ID NO: 8510 - protein, 478 aa, Burkholderia vietnamiensis G4
MQRATKIVATIGPASSSPEILLQMMQAGLDVVRLNFSHGTADDHRQRAEMVREAARKVGREIAIMADLQGPKIRVGKFENGKTTLAPGQAFILDAGCELGNDERVGLDYKELPRDLKPGDLLLLNDGLIVLTVERVLGEEIHTIVKVGGELSNNKGINRQGGGLSAPALTAKDMEDIRTAMSLGADLVAVSFPKNATDMEMARQLANIAGAPYGIKPKMIAKIERAEAIPALQSILDASDGIMVARGDLAVEVGNAAVPALQKRMIRMARESNKLVITATQMMESMIHAPVPTRAEVSDVANAVLDGTDAVMLSAETAAGKYPVVTIETMAAVCVEAEKSEHVELDKDFLDRTFTRIDQSIAMGALFTAYHLGAKAIVALTESGATALWMSRHYTHVPIFALTPRVGSERTMALYRNVTPLHVDFNSDRDAALQAALEMIVKQGYVQHGDMVVLTVGEPMGQAGGTNTLKIVRVGEHY

SEQ ID NO: 8511 - DNA, 1425 bp, Thermus thermophilus HB27
  CDS (1)..(1425): transl_table=11
atgccgccttttaagcgcaccaagatcgtggccaccctggggccggccacggacgacaaggaggtgatccgcgccctggcggaggccggggccgacgtcttccgcctgaacttcagccacggcgcccccgaggaccacaggcgccgggtgggctgggtgcgggaggtggcggaggagctcggccgaaccctggccgtcctccaggacctccagggcccgaagatccgtgtgggccgtttccgggagggccaggtcctcctccgcccggggcagaggttcgtcctcaccgccgagcccgtggagggggacgagcaccgcgtttccgtgagctacaaggggcttcccgaggacgtttccccggggcagatcctccttctggacgacggccgcatccggctcaaggtcctggaggtccggagcccggagatcctcacggaggtggaggtgggcggggtcctctccaacaacaaggggatcaacatccccggggcggacctctccatccccgccctctcggagaaggatatccaggacctggccctgggggcggagctcggggtggactgggtggcggtctccttcgtccgcacgcgggacgacctcctcctcgcccggcactacctctcccgctacggctccaaggccaggctcatggccaagatcgagaagccctcggccgtggcccggtttgaggagatcctggaggaggcggacgggatcatggtggcccggggggacctcggggtggagatgcccctggaggaggtgcccatcgtccagaagcgcctcatcctccggtgcatcgccgccgggaagccggtgatcaccgccacccagatgctggagtccatggtgcagaacccgagccccacccgggccgaggcctcggacgtggccaacgccatctttgacgggaccgacgcggtgatgctctccgcggagacggcggccggggcctacccggtggaggcggtggccatgatgagcaggatcgccaaggcggtggaatcctccccggagttcttgcagaagctcaacgtcctccgccccgcccccacccccaccacccaggacgccatcgcccaggcggcggacgacgtggtggaggcggtgggggcacgggccatcgtggtcttcacggccacgggcggctcggcgcggaggatcgcccgcacccggccccaggtgcccatcctggccctcaccccgaaccccgaggtgcggaaccagctggccttggtctggggggtctacccccatctcgcccccgacccccaggacaccgacgacatggtccgcatcgccctcagggaggtgaaagccctggggctcgcccaggtgggggaccgggtggtcatcgccgccggggttcccttcggggtccgggggacaacgaacctcatccgcgtggagcgggtggggtag

SEQ ID NO: 8512 - protein, 474 aa, Thermus thermophilus HB27
MPPFKRTKIVATLGPATDDKEVIRALAEAGADVFRLNFSHGAPEDHRRRVGWVREVAEELGRTLAVLQDLQGPKIRVGRFREGQVLLRPGQRFVLTAEPVEGDEHRVSVSYKGLPEDVSPGQILLLDDGRIRLKVLEVRSPEILTEVEVGGVLSNNKGINIPGADLSIPALSEKDIQDLALGAELGVDWVAVSFVRTRDDLLLARHYLSRYGSKARLMAKIEKPSAVARFEEILEEADGIMVARGDLGVEMPLEEVPIVQKRLILRCIAAGKPVITATQMLESMVQNPSPTRAEASDVANAIFDGTDAVMLSAETAAGAYPVEAVAMMSRIAKAVESSPEFLQKLNVLRPAPTPTTQDAIAQAADDVVEAVGARAIVVFTATGGSARRIARTRPQVPILALTPNPEVRNQLALVWGVYPHLAPDPQDTDDMVRIALREVKALGLAQVGDRVVIAAGVPFGVRGTTNLIRVERVG

SEQ ID NO: 8513 - DNA, 1797 bp, Candidatus Protochlamydia amoebophila UWE25
  CDS (1)..(1797): transl_table=11
atggcattaattagaacaaaaattgtttgtacaataggacctgcttgcaattccttagagaaaattattgagttaataaacgtaggaatgaacgttgcaaggttgaattttagtcatggaactcaagaagaacatttaaggacaattaatcttttaaaagaagcgagatgtcaacttaacttacctttagccatcatgttagatacaaaagggccagaaatacggctaggaaaaattcgagatggacaaatttttttaacggtaggtcaaaaatggcggttagtgaaaaaggaggttttaggagatgaaagtcaggtttctatttttcctctcaatattttagatcaacttcctgttgggacaacaattttatttgatgatgggtatattgcctcacgcgtgattgaaaattcatccgaaggtgtgcttgttgaaattaataacagcgggatgattcgttcaagtaaaggagttaatattcccaatacaagcctaaatttgcctgctgtcaccgaaaaagacattgacgatattcgttttggatgtagccaggatattgacttgattgctgcttcctttgttcgttctgcagaacatgtcttggagattaagcgtttattagctgatgaaaaaaaaactgatattctagttattgcaaaaattgaaaatagtgaaggggtgcaaaattttgatagcattgtccaagcagcagacggaatcatgatagcaagaggagatttaggggttgaagttcctttaagccatgttcctagattgcagaaaatgatgatccgtaaaagttatttggcaggcaagccagttgtgacagcaacgcagatgttagaatcaatgatcaataatcctagaccaactcgtgcagaaacatctgatgtagcaaatgcgatttatgatagtacatctgctatcatgctttcaggagaaacagcaattggtcgttatcctgttgagacggttaatgtgatgcgaagtatcgtagaagaggctgaagctgatttcaactacagtactttttttgatcaacatgcccctttagtttatcatgatgttccctctgctgtgactttagctactgtaaaaacagcttacagttctagcgctaaagctatttttgcttttactaaagcaggaacaacggcacgacttttatcaagacttaggcctaaaatgcctattattgcgatgacagcaaaagaaaaaatttttcatcagttggcatttaattggggagttattccttttttaagtgaaccttgtaactctttagataaaagtttaaaaaaaatcagtgatttcgcccttggaagtcaacacgtcagctatggagatttggttgtgattactgcaggaactccttttggattttcaggaacgaccaatatgatgatcgttgaaaatattggagatgttttggtaagagggcactctggatatggtatacgtgtgcatgggaacgtagtaatagttcttgctcctcagtctaaagctccttatgcggtcaaagatcaggtacttgtgattgccaaatgcgatgagagttatttatctttaatgaaggaagcttctgctattattttacagaaccatatcaatgattttgcgtctgaaaaatacgcgaagaagattgctctgagtttaggtaagcctattcttcttcgagctgatgcggcatgtcaaattttaaaagaaggacagcttgttactctcgatcctgaaaaagcccttgtttacaaaggagttgttttggaccaattgttggcgagtggagaattttcatga

SEQ ID NO: 8514 - protein, 598 aa, Candidatus Protochlamydia amoebophila UWE25
MALIRTKIVCTIGPACNSLEKIIELINVGMNVARLNFSHGTQEEHLRTINLLKEARCQLNLPLAIMLDTKGPEIRLGKIRDGQIFLTVGQKWRLVKKEVLGDESQVSIFPLNILDQLPVGTTILFDDGYIASRVIENSSEGVLVEINNSGMIRSSKGVNIPNTSLNLPAVTEKDIDDIRFGCSQDIDLIAASFVRSAEHVLEIKRLLADEKKTDILVIAKIENSEGVQNFDSIVQAADGIMIARGDLGVEVPLSHVPRLQKMMIRKSYLAGKPVVTATQMLESMINNPRPTRAETSDVANAIYDSTSAIMLSGETAIGRYPVETVNVMRSIVEEAEADFNYSTFFDQHAPLVYHDVPSAVTLATVKTAYSSSAKAIFAFTKAGTTARLLSRLRPKMPIIAMTAKEKIFHQLAFNWGVIPFLSEPCNSLDKSLKKISDFALGSQHVSYGDLVVITAGTPFGFSGTTNMMIVENIGDVLVRGHSGYGIRVHGNVVIVLAPQSKAPYAVKDQVLVIAKCDESYLSLMKEASAIILQNHINDFASEKYAKKIALSLGKPILLRADAACQILKEGQLVTLDPEKALVYKGVVLDQLLASGEFS

SEQ ID NO: 8515 - DNA, 1437 bp, Bartonella henselae str. Houston-1
  CDS (1)..(1437): transl_table=11
gtgaagcgtgcacgtaaagtaaaaattatagccactcttggcccttcttcgttttctatttccatgattgagaagctttttatggcgggagcagatgtttttcgtttgaatatgagccatactgaccgtgaaacaatggttgatttggttcagcgcatacggaaggttgaaaaaactgttcgccggccaatcggtattttagtagatctccagggaccaaaattacgcgtcggctgttttgataaagggcaagaagatttgcgtattgggcaaagttttaccttggatgatcgtgatattcttggtgatgcgcagcgtgttttttttccgcacggggaggtgctggcagctattaaacccggtgatcggttgttaattgatgatggaaagttggaactgcttgcacaggtgtgtgatggtcattctgtgcagtgccttgtggttgctgggaaccgtatttctgatcgaaaaggggtaagtcttcccgatacagttttgccttttgggccaatgactctcaaggataaagccgatcttcaggcagttttggagcagcctgttgattgggttgctctgtcttttatccagcgtccggaagatattatagcagtgcgtgcgttgaccaaaagcaaagtgtctttgatggctaagatcgaaaaacctcaagctttggagcatatagaagagattattgatgttgccgatggtattatgattgcacgcggagatctgggggtagaaatgcccttggagagggttcctgccattcagatggaacttataaaagcttgtcgtttagctggaaagcccgtcgtggtggccacgcaaatgctcgagtcaatgattacgtcatctgttcctacaagggcagaagtttctgatgttgcgacagcagtttatacgggaactgacgctgtcatgttgtctgcggaatctgcctctggtcgttatcctgaagaagctgtgctgatgatggatcgaatcgcacaacaaattgaacaagatcagacttatgcggctcaagttggcgcacagcatcctgctccagaatcaacggggaccgatgcgatttctctcgctgcgcgtcagatcgccgaaacactgcaattgacagctatcgttgcttatactgcttcaggcacaacgggtgtgcgcacatcacgggagcgtccaaacaggcccattattgccttatcgcctattgtaaaaacagcaagacgtttggctttggtctggggacttcattgtgtggtcactgaagacgcgcgggatttggaggatatggttgatcgtgcggctgcgattgcttttcaagaaggcttttgccaagggggagatcgcttccttgtgacagctggtgttcctcttggtacacctggtgctaccaatctcttgcgtatcgcttctgtttctcaagatggaacaaagggtgtttaa

SEQ ID NO: 8516 - protein, 478 aa, Bartonella henselae str. Houston-1
MKRARKVKIIATLGPSSFSISMIEKLFMAGADVFRLNMSHTDRETMVDLVQRIRKVEKTVRRPIGILVDLQGPKLRVGCFDKGQEDLRIGQSFTLDDRDILGDAQRVFFPHGEVLAAIKPGDRLLIDDGKLELLAQVCDGHSVQCLVVAGNRISDRKGVSLPDTVLPFGPMTLKDKADLQAVLEQPVDWVALSFIQRPEDIIAVRALTKSKVSLMAKIEKPQALEHIEEIIDVADGIMIARGDLGVEMPLERVPAIQMELIKACRLAGKPVVVATQMLESMITSSVPTRAEVSDVATAVYTGTDAVMLSAESASGRYPEEAVLMMDRIAQQIEQDQTYAAQVGAQHPAPESTGTDAISLAARQIAETLQLTAIVAYTASGTTGVRTSRERPNRPIIALSPIVKTARRLALVWGLHCVVTEDARDLEDMVDRAAAIAFQEGFCQGGDRFLVTAGVPLGTPGATNLLRIASVSQDGTKGV

SEQ ID NO: 8517 - DNA, 1758 bp, Staphylococcus aureus subsp. aureus MRSA252
  CDS (1)..(1758): transl_table=11
atgagaaaaactaaaattgtatgtacaattggaccagcttcagaatcagaagaaatgattgagaaattaatcaatgctggtatgaacgttgcacgattaaacttttcacatggtagtcatgaagagcataaaggtagaattgatacaattcgtaaagtagctaaaagattagacaaaattgtagcaattttattagatacgaaaggtccagaaattcgtacgcataatatgaaagacggtatcattgaacttgaacgtggtaacgaagttattgttagcatgaatgaagttgaaggaacacctgaaaagttctctgtaacttatgaaaacttaattaacgatgttcaagtaggttcatacattttacttgatgatggcttaattgaattacaagttaaagatattgaccatgctaaaaaagaagttaaatgtgatattttaaactctggtgagcttaaaaacaaaaaaggtgttaacttacctggtgtaagagttagtttacctggtattacagaaaaagatgctgaagatatccgtttcggtattaaagaaaatgttgacttcattgcagcaagtttcgtacgtcgtcctagtgatgttttagaaattcgtgaaattttagaagaacaaaaagctaacatttcagtattccctaaaattgaaaaccaagaaggtattgataatattgaggaaattcttgaagtgtctgatggtttaatggttgcacgtggtgacatgggtgttgaaatcccacctgaaaaagtaccaatggttcaaaaagatttaatcagacaatgtaacaaattaggtaaaccagttattacagctacacaaatgttagattctatgcaacgtaacccacgtgctacacgtgcagaagctagtgacgttgccaacgcaatctatgatggtacagatgcagtaatgttatctggtgaaactgctgctggtttatatcctgaagaagctgttaaaacaatgagaaatattgctgtatcagctgaagcagcccaagattacaaaaagttattgtcagatcgtactaaattagttgaaacttcattagtgaatgctatcggtatttcggttgcacatacagctttaaacttaaatgttaaagcaattgtagctgctactgaaagtggttcaacggcacgtactatctctaaatatcgtccgcattcagacattattgcagtgactccaagtgaagaaactgcacgtcaatgttcaattgtttggggtgttcaacctgtagttaaaaaaggacgtaagagtacagatgcattgttaaacaatgcagttgcaacagctgttgaaactggtagagtaactaatggtgatttaatcattattactgctggtgtaccaactggtgaaactggaactactaatatgatgaaaatccacctagttggtgacgaaattgctaatggtcaaggtattggacgtggatcagttgttggtactacgttagttgctgaaactgttaaagatttagaaggtaaagatttatctgacaaagttatcgttacaaactcaatcgatgaaacgtttgtaccttatgtagaaaaagcgttaggcttaattacagaagaaaatggaattacatcaccaagtgcaattgttggtttagaaaaaggtattccaacagttgtaggtgtagaaaaagctgttaaaaacataagcaataacgtgttagttacgattgatgctgctcaaggtaaaatctttgaaggatatgcaaacgtactataa

SEQ ID NO: 8518 - protein, 585 aa, Staphylococcus aureus subsp. aureus MRSA252
MRKTKIVCTIGPASESEEMIEKLINAGMNVARLNFSHGSHEEHKGRIDTIRKVAKRLDKIVAILLDTKGPEIRTHNMKDGIIELERGNEVIVSMNEVEGTPEKFSVTYENLINDVQVGSYILLDDGLIELQVKDIDHAKKEVKCDILNSGELKNKKGVNLPGVRVSLPGITEKDAEDIRFGIKENVDFIAASFVRRPSDVLEIREILEEQKANISVFPKIENQEGIDNIEEILEVSDGLMVARGDMGVEIPPEKVPMVQKDLIRQCNKLGKPVITATQMLDSMQRNPRATRAEASDVANAIYDGTDAVMLSGETAAGLYPEEAVKTMRNIAVSAEAAQDYKKLLSDRTKLVETSLVNAIGISVAHTALNLNVKAIVAATESGSTARTISKYRPHSDIIAVTPSEETARQCSIVWGVQPVVKKGRKSTDALLNNAVATAVETGRVTNGDLIIITAGVPTGETGTTNMMKIHLVGDEIANGQGIGRGSVVGTTLVAETVKDLEGKDLSDKVIVTNSIDETFVPYVEKALGLITEENGITSPSAIVGLEKGIPTVVGVEKAVKNISNNVLVTIDAAQGKIFEGYANVL

SEQ ID NO: 8519 - DNA, 1443 bp, Erwinia carotovora subsp. atroseptica SCRI1043
  CDS (1)..(1443): transl_table=11
atgtccagacggctcagaagaaccaagattgttaccaccctggggcccgctaccgaccgcgataataatctcgaaaagattatcaatgcgggcgctaacgttgtacgcatgaatttttctcacggcacagcagaagaccatcaattacgtgccaacaaagttcgtgaaattgcggctaaattaggccgccatgttgccattcttggcgatctacagggtccaaaaattcgtgtttctaccttcaaagaaggtaaaatcttcctgaatatcggcgacaaattcttgctggatgccaacttagcgaaaggcgaaggcgataaagaaaaagtcgggatcgattacaaaggcttgccgagcgacgtggtgcctggcgatatcctgttactggatgacggccgcgtacagctgaaagtcctccaagttgaaggcctgaaagtttacaccgaagtcaccgttggtggcccgctgtctaacaataaaggcatcaacaaactcggtggcggtctgtctgccgaagccctgacggaaaaagataaagccgacattattactgctgcaaaaattggcgtcgactatctggcagtctctttcccacgcaccggtgaagacctcaactacgcacgccgcctcgcacgcgacgcaggctgtaacgccaagatcgtatcaaaagttgaacgtgctgaagcagtctgctcagatgccgcaatggatgacattattctggcttccgacgtggtaatggtcgcaaggggcgatctgggtgttgaaatcggtgaccctgagctggtagggattcagaagaaattgattcgccgtgcccgtcagttgaatcgtgcagtcattacggccacgcagatgatggaatcgatgatcaccaatccgatgccgacacgcgccgaggtaatggacgtcgccaacgccgtgctggatggcaccgatgcggtgatgctctcagcagaaaccgctgcgggtcaatatccggctgaaaccgtcgctgccatggcgaaagtgtgtttaggtgcggaaaaaatcccaagcatcaacgtctccaagcatcgccttgacgtgcagtttgataacacggaagaatccatcgcgatgtcttccatgtatgcagccaaccacctgaaaggggttactgcactgattgccatgacggagtctggccgtaccgctctgatgatgtctcgtatcagttctggcttgccgattttcgccatgtctcgccatgagcacacactgaacctgaccgcgctgtatcgcggcgtcacaccggtacatttcgacagctatacggatggcgttgccgcggccaatgatgcggtgatcctactgcgtgataaagggttcctgatgtctggggatctggtcatcgtcacacaaggtgacatcatgggtaccgtaggcacaaccaacaccattcgcattctgcgcgtggaataa

SEQ ID NO: 8520 - protein, 480 aa, Erwinia carotovora subsp. atroseptica SCRI1043
MSRRLRRTKIVTTLGPATDRDNNLEKIINAGANVVRMNFSHGTAEDHQLRANKVREIAAKLGRHVAILGDLQGPKIRVSTFKEGKIFLNIGDKFLLDANLAKGEGDKEKVGIDYKGLPSDVVPGDILLLDDGRVQLKVLQVEGLKVYTEVTVGGPLSNNKGINKLGGGLSAEALTEKDKADIITAAKIGVDYLAVSFPRTGEDLNYARRLARDAGCNAKIVSKVERAEAVCSDAAMDDIILASDVVMVARGDLGVEIGDPELVGIQKKLIRRARQLNRAVITATQMMESMITNPMPTRAEVMDVANAVLDGTDAVMLSAETAAGQYPAETVAAMAKVCLGAEKIPSINVSKHRLDVQFDNTEESIAMSSMYAANHLKGVTALIAMTESGRTALMMSRISSGLPIFAMSRHEHTLNLTALYRGVTPVHFDSYTDGVAAANDAVILLRDKGFLMSGDLVIVTQGDIMGTVGTTNTIRILRVE

SEQ ID NO: 8521 - DNA, 1434 bp, Propionibacterium acnes KPA171202
  CDS (1)..(1434): transl_table=11
gtgcgtagagctaagattgtgaatacccttgggcccgctgtgaccagccatgacgccatgaaggagctcatggaggctggcatgaatattgcccgtctcaacatgagccacggcgactactccgagcaccaggagcgtcttgacctggttcgctcggtctcgaaagagcttggtctcaacgtggcagccttggccgacctccaaggcccgaagatccgtaccggcctgttcgagaaggccgaaggagagtcgaacggcaagatcgacctcaagattggtgacaagttcactatcaccactgacgacattgtgggcaatcaggagcgcgtctccaccactttcaagggtctgccccaggactgcaagcccggcgacgtcatcctcatcgacgacggcaagaccgtcctccaggttgactctgtgagcggcaacgacgtcaattgtcactgcactgtcgctggcccggttggcgaccacaagggcatcaacctccccggtgttgccgtgtctattcccgccctcaccaaaaaggacgaggagaacctgcgctgggctctcaaagctggcatcgaccttgttgctctgtccttcgtccgacacggctctgacatcgaccgtgtccacgagattatggacgaggagggacgtaccgtccccgttatagccaagctcgagaagccgcaggctatcgagaacctggacgagattattgacgtctttgacgccgtcatggttgctcgtggcgatatggccgtcgagtgcccgctcgaggaggttccgctgatccaaaagcagatcatcgagaaggctcggttacaggctaagcccgtcatcgtggccacccagatgctcgagtcgatgatccacgctccccgcccgacccgcgctgaggccgccgacgtcgccaacgccatccttgacggcgccgacggcgtcatgacgtccgctgagaccagcgttggtgacttcccaggtgagactgtccgcaccatggccaagatcgttgagtctactgaggcccgtggcttggacaagatcgccaagatcgactgggatccgcacaccaccagtggcatcatgtcgaaggcagctgctgagatcgctgagcgcgccgaggccaagttcatcgtggcctttaccaagtccggtgacaccgcccgtcgtatcgctcgtctgcgtccgagcaccccgctcatcgttttcacctctgatgagaccacgaccaagaccctcgcctgggtctggggcgctcacgccgtcgttaccccggtgtttaagaatgcggaggagctgtaccgctgggttaacgcgtacctgcgcgacaagggtttcgtgccggtcggtgaccgcgtcgtcgtgttgtccggttccccgatggatattccgggtaagaccaacaatctgcgcatccttcgtatcaaggaagatgactga

SEQ ID NO: 8522 - protein, 477 aa, Propionibacterium acnes KPA171202
MRRAKIVNTLGPAVTSHDAMKELMEAGMNIARLNMSHGDYSEHQERLDLVRSVSKELGLNVAALADLQGPKIRTGLFEKAEGESNGKIDLKIGDKFTITTDDIVGNQERVSTTFKGLPQDCKPGDVILIDDGKTVLQVDSVSGNDVNCHCTVAGPVGDHKGINLPGVAVSIPALTKKDEENLRWALKAGIDLVALSFVRHGSDIDRVHEIMDEEGRTVPVIAKLEKPQAIENLDEIIDVFDAVMVARGDMAVECPLEEVPLIQKQIIEKARLQAKPVIVATQMLESMIHAPRPTRAEAADVANAILDGADGVMTSAETSVGDFPGETVRTMAKIVESTEARGLDKIAKIDWDPHTTSGIMSKAAAEIAERAEAKFIVAFTKSGDTARRIARLRPSTPLIVFTSDETTTKTLAWVWGAHAVVTPVFKNAEELYRWVNAYLRDKGFVPVGDRVVVLSGSPMDIPGKTNNLRILRIKEDD

SEQ ID NO: 8523 - DNA, 1467 bp, Leifsonia xyli subsp. xyli str. CTCB07
  CDS (1)..(1467): transl_table=11
atgagaagggcgaaaatcgtcgcgaccctcgggccggcgacctccagctatgacaacatccgcgccatcgtcgacgcgggcgtcgacgtggcccggatgaacctcagccacggcagctacgaggtgcatgagggggtctacgccaacgttcggaaggctgcggaggacgccggcaaaccggtcgcggtcctggtcgacctccaaggcccgaagattcgcctcggcaagttcgaggccggtccctacgaactcgccgagggcgatatcttcacgatcaccaccgaggaaatcatcggcaccaaggagatctcctccaccacgttcaaggggttgccccaggacgtgaagccgggtgacttcctgctgatcgacgacggaaaggtgcgcgtgcgcgtgctggagaccgatggcacggccgtaaccactgaggtggtcgtggccggtcccgtctccaacaacaagggcatcaaccttcccggtgtcgcggtgaacgtgcccgcgctgtccgagaaggacgaggccgacctccgctggggcctgaatctgggcgccgatctcatcgccctctcgttcgtgcgcaacgcgggggacatcgagcgcgtacacgagatcatggccgaggagggccgtaaggtccccgtcatcgccaagatcgagaagccgcaagccgttgacgctctggagggcatcatcgaggcgttcgacggcatcatggtcgcgcgtggcgacctgggcgtcgagttgccgctggaggcggtgccgatcgtgcagaagcgcgcggtcgaactcgcccgccgtgcggccaagccggtcatcgtcgcgacgcagatgctggagtcgatgatctcgagcccggtaccgacccgcgccgagacatccgacgtcgctaacgccgtcctcgatggctcggatgcggtcatgctctcgggggagaccagtgtcggcgagtacccgaagatcaccgttcagacgatggcgaagatcgtgaaatcgaccgaagagcacggtctcgaccggatcgccccgctcggcaccaagccgcgcacgcagtccggcgcgatcaccctggccgcgaccgaggtggcggacttcgtcgaggccaagtacctctgcgtgttcaccgagtccggcgagtcggcccgtcgcatggcgcgtctgcgcagcaagatccggatcctcgccttcacaccggaggagtcgacccgtcgcaagatggcgctctattggggcgtggagtccttcgtggtcgaccgggtcacccacaccgaccagatggtcgcgcaggtggacgaggcgctgaagtccacgggccgagcggagaacggcgacaaggtggtcatcatttccgggtcgcctcccgggattcctggcaccaccaacgacatccgcgtacaccgggtcggcgacgtcctgtgtagcgaaacgcagcgaagggcctcgcgcttcggggaccgctcccggctgtga

SEQ ID NO: 8524 - protein, 488 aa, Leifsonia xyli subsp. xyli str. CTCB07
MRRAKIVATLGPATSSYDNIRAIVDAGVDVARMNLSHGSYEVHEGVYANVRKAAEDAGKPVAVLVDLQGPKIRLGKFEAGPYELAEGDIFTITTEEIIGTKEISSTTFKGLPQDVKPGDFLLIDDGKVRVRVLETDGTAVTTEVVVAGPVSNNKGINLPGVAVNVPALSEKDEADLRWGLNLGADLIALSFVRNAGDIERVHEIMAEEGRKVPVIAKIEKPQAVDALEGIIEAFDGIMVARGDLGVELPLEAVPIVQKRAVELARRAAKPVIVATQMLESMISSPVPTRAETSDVANAVLDGSDAVMLSGETSVGEYPKITVQTMAKIVKSTEEHGLDRIAPLGTKPRTQSGAITLAATEVADFVEAKYLCVFTESGESARRMARLRSKIRILAFTPEESTRRKMALYWGVESFVVDRVTHTDQMVAQVDEALKSTGRAENGDKVVIISGSPPGIPGTTNDIRVHRVGDVLCSETQRRASRFGDRSRL

SEQ ID NO: 8525 - DNA, 1746 bp, Desulfotalea psychrophila LSv54
  CDS (1)..(1746): transl_table=11
atgaataaaacaaaaataattgccaccctagggccccagagccaaagcgtcgaggagatttattcccttattcaagcgggaatgaatgttgcacggataaacctttcccatggagatgctgaaagctacaagcatcttatcagtaatgtaaaagaggctcgcaagttagcagaaaaagataccgcgatcctacttgataaccgtggccctgaaattcgtgttagcgagatggaagaagatatacatctcgttgatggagaagagctagtcatcaccaacagagctgaaactgtttccccatcgcggatcactacaaattacccacagcttgcaggtgatgtccaggtaggttcacgcatccttctcgatgacggaaagctcgccctggaagtgcttgccattgaagatgaagaggtgatcacgaaagttattgccggcggaatcctcagtagtcgtaaacgtgttgccctccccgataacgaggttaacctgccctctttgtcagaaaaagacaaagaagatatcgccttcggagtcgaacaggatgttgatttcatcgctgcttcttttgttagacaggcaggtgatgtctgggcggtacgaaaaatcatcgaagataacggtggtgatcaggagatcattgccaagatcgagaaccgccagggagtaaacaatcttgatgaaatactgcaagcagccaacggaataatggtagctcggggtgatctaggcgttgaagtacccgccgaagaggtgcctattattcaaaaaagcatcatcaaagctgcaaacagactaggcaaacctgtaatcactgccacccagatgctcgaatcaatgatcacctgccccactcctaccagagccgaggcaaatgatgtaaccaacgctatcttcgatggcaccgatgcagtaatgctctccggcgaaacagccattggtaagtatcctgttcaggctgtagcctttcttgtccgctgtgcgacaatagctgagaatgccctggactatgatcatatcctggcaaatggcctgcagaaccgaagaccaacgatcaccgactctatctcctatgcaagttgtgcgacggcagcggatcttaaagcaaccgccatcattacggcaacaagctctggttccaccgctcgcatggtggccagatatcgccccaaggctcccgttattgccgtcagcccttcgcccagcaccattcgccaccttcaacttattcgcggggtaacccccctgctctgcaactttggttcctccatggatgagcagctggatcgagtcattcatgcagcaacccttgcagagcttattcataatggcgatttggtcattataaccgccggcatgcctcttggacccacagggacaaccaatatgcttaaggtacacacggtggcagatatttgcgttaccggccaggggattggggtcaagcatgcccagggtgccgtccgcattattcaagcagaagatgattggcaggatctccccgaacataccattgcggtagtatcctcaaccaatgaatccatgctgaaacatctcggtaaggtgcgtggaattattgcagaagcaccgggactcacctcacatgcggcaattgttggccgcgaactggggatccctgttatctgtaatgttaccaatgcccttatgctctttgaaaatgaccaggttatcaccattgatgggacaactggccatatctgttacggaagtacacaaaacacatga

SEQ ID NO: 8526 - protein, 581 aa, Desulfotalea psychrophila LSv54
MNKTKIIATLGPQSQSVEEIYSLIQAGMNVARINLSHGDAESYKHLISNVKEARKLAEKDTAILLDNRGPEIRVSEMEEDIHLVDGEELVITNRAETVSPSRITTNYPQLAGDVQVGSRILLDDGKLALEVLAIEDEEVITKVIAGGILSSRKRVALPDNEVNLPSLSEKDKEDIAFGVEQDVDFIAASFVRQAGDVWAVRKIIEDNGGDQEIIAKIENRQGVNNLDEILQAANGIMVARGDLGVEVPAEEVPIIQKSIIKAANRLGKPVITATQMLESMITCPTPTRAEANDVTNAIFDGTDAVMLSGETAIGKYPVQAVAFLVRCATIAENALDYDHILANGLQNRRPTITDSISYASCATAADLKATAIITATSSGSTARMVARYRPKAPVIAVSPSPSTIRHLQLIRGVTPLLCNFGSSMDEQLDRVIHAATLAELIHNGDLVIITAGMPLGPTGTTNMLKVHTVADICVTGQGIGVKHAQGAVRIIQAEDDWQDLPEHTIAVVSSTNESMLKHLGKVRGIIAEAPGLTSHAAIVGRELGIPVICNVTNALMLFENDQVITIDGTTGHICYGSTQNT

SEQ ID NO: 8527 - DNA, 1434 bp, Borrelia garinii PBi
  CDS (1)..(1434): transl_table=11
atgatttcaaagttaacaaaaattgtagcaacaatatctgatcttagatgcgaaccagaacacataaaagatttatacgatgcaggagtaaatgtaataagactaaatactgctcatcaatcacacgaagatacaataaaagtaatagacaatgttagaaaaatttcaaataaaatagctctaatgatcgacacaaaaggaccagaagttagaacagctaatattgaaaatcctattattgtaaaaactggagacaacgtaataatctcaacttcgcctattaatgaacctaacaaccttcaaactaattatgatggatttgttaaagaagtgccccaaggatctaaagtgctaattgatgatggtgagcttgaaatgactgttgttactaagctgcctgaccgattaatttgtgaaattaaaaatgacggccaaattaaaaataaaaaatcaatcaatactcccggcatttctcttaaactgcaatcagtaaccgaaaaagacaagggatttattgagcttgcagcaaaatataatgttgattttattgcccattcgtttgtaagaaattccaaagacattcaagatgttcaaagaattttaaatgctgctggaaatcctgatgtaaaaatcatatccaaaatcgaaaatcaagaaggaattgacaatattgaagaaattgtaaaagcatcttatggaataatggttgcaagaggagatatgggggtcgaaattcctgcagaagatgtgcctattgcccaactcaaaataacacaaacctgcataaagtatggaatacctgtgattacagcaactcaaatgcttcatacaatgattgaaaatccaaggcctactagagcagaagtatctgacatcgccaacgctattttaaacggtacagatgcaattatgctatctggagaaaccgcttacgggaaatatccaattgaagctgtaaaaatgatgacaagtattgctaaaaaagttgaaaaacatagaaaaatgactttatataaagatgaacttttttacgataaaagcattacaagaaactatattataaaatgtgcaatcgatgctacaaagcttatggatgtaaaagcaattattgtagattctctaaaaggcaaaactgcaagaataatggcaacttacagggcaagtgttccattattcattacaacaaatagcgaaaggctggcaagagaattatcattatcttacggtgtttattctaatcttgtagacaataattttaaaagaactaccgaatttgtagtaacttctcttaaaatgttaaaagaacaaaatattgtcaatgacaaagatactgtaataattatttctggcaacccaaatagagatactgacaaaggaacagaatttatggaaataaacacagtagaagatgcaatcaaggggcgaaatatataa

SEQ ID NO: 8528 - protein, 477 aa, Borrelia garinii PBi
MISKLTKIVATISDLRCEPEHIKDLYDAGVNVIRLNTAHQSHEDTIKVIDNVRKISNKIALMIDTKGPEVRTANIENPIIVKTGDNVIISTSPINEPNNLQTNYDGFVKEVPQGSKVLIDDGELEMTVVTKLPDRLICEIKNDGQIKNKKSINTPGISLKLQSVTEKDKGFIELAAKYNVDFIAHSFVRNSKDIQDVQRILNAAGNPDVKIISKIENQEGIDNIEEIVKASYGIMVARGDMGVEIPAEDVPIAQLKITQTCIKYGIPVITATQMLHTMIENPRPTRAEVSDIANAILNGTDAIMLSGETAYGKYPIEAVKMMTSIAKKVEKHRKMTLYKDELFYDKSITRNYIIKCAIDATKLMDVKAIIVDSLKGKTARIMATYRASVPLFITTNSERLARELSLSYGVYSNLVDNNFKRTTEFVVTSLKMLKEQNIVNDKDTVIIISGNPNRDTDKGTEFMEINTVEDAIKGRNI

SEQ ID NO: 8529 - DNA, 1755 bp, Symbiobacterium thermophilum IAM 14863
  CDS (1)..(1755): transl_table=11
atgctgcgaaagacgaagatcgtggccaccatcggcccggccagcgagcaggtggaggtgctgacccggctgatcgaggcgggtgtcgatgtctgtcggctcaacttcagccacggcaccctcgacgagcagaggcgccggatcgagaacatccgtgaggccggccgccgggtgggcaaggacgtcgcgatcatgatcgacctgaaggggcccgagatccgcatcggaacgttcgagaacggcaaggtcacgctgcgggacggggacctcttcaccctgaccacggagccttgcgtcggcaaccaggagcgggtctgggtccagtaccccgggatcgttcacgacgtggccgagggcgggtacctgctgctggatgacggcaacctgacgttccaggcggtggaggtgacgcccaccgagatccgttgccgggtgatcgtcggcggcgtcctgtccgaccgcaagaaggtgaacctgcccggcacgaaggtctcgctgcccgcgctgtccgagaaggacatcgaggacatccgcttcggcgtcgagatgggcgtcgacttcgtggccggctcgttcatccggaaggcccaggacgtgctggagatccgccgggtgatcgaggaggcgggcggccaccagcagatcatctcgaaggtggagtcccaggaggggttcgacaacctggaggccatcctgcaggtctccgacggcctgatggtggcccgcggcgacctgggggtggaggtgcccaccgaagaggtgccgctgatgcagaagcggatgatcgagcgggccaatgccatgggcaagcccgtgatcaccgcgacgcagatgctggagtccatggtcaaccggccccgtccgacccgggccgaggcctccgacgtggccaacgcgatcatggacggcaccgacgccatcatgctgtcggcggagtccgccgccggcaagtacccggtggaggcggtgcggacgatggcgacgatcgcccgccgcaccgaggaggcgctggaccactcgcagctgatggcccgacgcggccgcttcggccggatggacagcgtcaccgaggccatctcccacgcgacggtgaccacggcccacgacctgggcgccacggccatcgtctcggccaccacctcgggctttaccgcccgtatggtgtccaagtaccgcccgggctgccccatcatcgccgtgaccccggatccgcgggtcgcgcggcagctgcggctggtctggggcgttttccccgtcgtcgagccggtggcctcgggcactgaggacctgacccagcgggccgtggaaggggccctggtttccgggctggtgaagaacggcgacctggtcgtcatcaccgccggtctgccggtgggggtgaagggcaccaccaacctgctgaaggtgcacacggtggcggacgtgctggcccagggtacgggcatcggccggcagccggtcacggggcgggccgtcatcgtgcggtccgaggaggacctggcccgcgtgcagcccggcgacatcctggtcagcaggctgaccgacgccgactgcgtccccgcgatggagcgggccgcggggatcatcacggaagagggcggcctgacctcgcacgcggcggtggccggcatctcgctgggcaagcccgtgatcgtgggcgccgagggcgccacccgccgcattcccgacggggcgatcatcacgatggacgtggcccatggcctggtcttgcgcggcgaggccaccgtcaagtaa

SEQ ID NO: 8530 - protein, 584 aa, Symbiobacterium thermophilum IAM 14863
MLRKTKIVATIGPASEQVEVLTRLIEAGVDVCRLNFSHGTLDEQRRRIENIREAGRRVGKDVAIMIDLKGPEIRIGTFENGKVTLRDGDLFTLTTEPCVGNQERVWVQYPGIVHDVAEGGYLLLDDGNLTFQAVEVTPTEIRCRVIVGGVLSDRKKVNLPGTKVSLPALSEKDIEDIRFGVEMGVDFVAGSFIRKAQDVLEIRRVIEEAGGHQQIISKVESQEGFDNLEAILQVSDGLMVARGDLGVEVPTEEVPLMQKRMIERANAMGKPVITATQMLESMVNRPRPTRAEASDVANAIMDGTDAIMLSAESAAGKYPVEAVRTMATIARRTEEALDHSQLMARRGRFGRMDSVTEAISHATVTTAHDLGATAIVSATTSGFTARMVSKYRPGCPIIAVTPDPRVARQLRLVWGVFPVVEPVASGTEDLTQRAVEGALVSGLVKNGDLVVITAGLPVGVKGTTNLLKVHTVADVLAQGTGIGRQPVTGRAVIVRSEEDLARVQPGDILVSRLTDADCVPAMERAAGIITEEGGLTSHAAVAGISLGKPVIVGAEGATRRIPDGAIITMDVAHGLVLRGEATVK

SEQ ID NO: 8531 - DNA, 1581 bp, Mannheimia succiniciproducens MBEL55E
  CDS (1)..(1581): transl_table=11
ttgattatttctatcgctttactcacaatttcagcgtataatacagcgcagttttttcttcatggctgttttttagtatttagcagtaacatgaaaaaaggttatttaaatcaaacaaataaaatatttacggagtatttaatgtccagaagattaagaagaacgaaaatcgtatgtacaatggggcctgcaacagacaaaggcaataatttagaaaaaatcattgctgccggtgcaaacgttgtacgtatgaacttctcccacggtacgcccgaagatcatatcggtcgtgctgaaaaagtacgtgaaatcgctcataaattaggtaaacacgtagcaatcttaggtgacttacaaggccctaaaatccgtgtttctacttttaaagaaggcaaaattttcttaaatatcggtgataaattcattttagacgcagagatgcctaaaggtgaaggtaaccaggaagcggttggtttagactataaaacattaccgcaagatgtggttccgggcgatatcttattattagatgacggtcgagttcaattgaaagtattggcgaccgaaggtgcaaaagtattcaccgaagtaacggtcggtggcccactatcaaataataaaggcattaacaaattaggcggcggtttatctgccgatgcattaaccgaaaaagataaagcggatatcattactgcggcgcgtatcggggtggattaccttgccgtatctttcccgcgttcaagcgcggatttaaactacgcccgtcaattagcaaaagatgcgggcttggatgcgaaaattgttgcgaaagtagaacgtgccgaaacagttgaaacggacgaagcaatggacgatatcatcaatgcggcggacgtaatcatggttgcgcgcggtgacttaggtgttgaaatcggtgaccctgaattagtcggtgttcagaaaaaattaatccgtcgttcacgtcagttaaatcgtgttgttattaccgcaactcaaatgatggaatcaatgattagcaatcctatgccgactcgtgcggaagtaatggacgtagctaacgcagtattggacggtaccgatgcggtaatgctttctgctgaaaccgcggctggtcaatatccggcggaaactgttgcggcgatggcgaaagttgcgttaggtgcggagaaaatgccaagcattaatgtgtctaaacaccgtatgaacgttcaattcgagtctattgaagaatctgttgcaatgtctgcaatgtatgcggcaaaccacatgagaggcgtagcggcgattatcacattaacaagtagcggtcgtactgctcgtttaatgtctcgcattagttccggtttaccaatctttgcattgtcacgtaacgaatctacattaaatttatgtgcattgtatcgtggtgtgacaccggttcattttgataaagacagccgtacttcagaaggtgcgaaagcagcggttcaattattaaaagacgaaggtttcttagtgtctggcgatttagtgttattaactcagggcgacgcaagcagttctagcggtactaacctttgccgtacattgattgttgaataa

SEQ ID NO: 8532 - protein, 526 aa, Mannheimia succiniciproducens MBEL55E
MIISIALLTISAYNTAQFFLHGCFLVFSSNMKKGYLNQTNKIFTEYLMSRRLRRTKIVCTMGPATDKGNNLEKIIAAGANVVRMNFSHGTPEDHIGRAEKVREIAHKLGKHVAILGDLQGPKIRVSTFKEGKIFLNIGDKFILDAEMPKGEGNQEAVGLDYKTLPQDVVPGDILLLDDGRVQLKVLATEGAKVFTEVTVGGPLSNNKGINKLGGGLSADALTEKDKADIITAARIGVDYLAVSFPRSSADLNYARQLAKDAGLDAKIVAKVERAETVETDEAMDDIINAADVIMVARGDLGVEIGDPELVGVQKKLIRRSRQLNRVVITATQMMESMISNPMPTRAEVMDVANAVLDGTDAVMLSAETAAGQYPAETVAAMAKVALGAEKMPSINVSKHRMNVQFESIEESVAMSAMYAANHMRGVAAIITLTSSGRTARLMSRISSGLPIFALSRNESTLNLCALYRGVTPVHFDKDSRTSEGAKAAVQLLKDEGFLVSGDLVLLTQGDASSSSGTNLCRTLIVE

SEQ ID NO: 8533 - DNA, 1425 bp, Legionella pneumophila subsp. pneumophila str. Philadelphia 1
  CDS (1)..(1425): transl_table=11
atgttaagacgaactaagattgttgccactttaggcccagccagcaaggaacctgaaattctgcgatccatgctggctgctggagtcaacgtagtacgaattaatttttctcatgccgattcctccgccctgcaattaattgcactggttcgtaaaatcgcagacgaattaaaccacccggttgcagtcatggctgacttacaagggcctaaaataagagtcggccgttttcaaaacaaatccatcactttaattgatggacaaaattttacattggattgtatggccccagatactctgggagacataaatggcgtatcggtcgcttatcctaatttggccaatgaactcagtattggtgatcatcttctgattaatgatgggttaattgaattggaagtcatagagatttccgggtcaaaaattcattgcaaggtagtggaaggtggagtactcactgatttgaaaggtttgaatcgaaaaggtggcgggttagcagccagaactttaacagaaaaagatagaaatgatttacgtacagcaattgaagcagaagtggactacatcagtttatcttttgtaaaagacgcagaggatatccggcaagcaagagcgctaatgaaagactatggggcccaaataacccctattatcgctaaaattgagcgcatggaagctttggatcacttaactgatattattcgcgaagcagacgccatcatggtggccagaggagatttaggcgttgaagtgggtgctgctgaagttcccgccattcaaaaacacatcatagaacaaacgcgacttttagataaagtggtgattaccgcaacacaaatgatggaatccatgataagcaatcctcagcctacccgtgccgaggtttctgatgtagccaacgcgattctggacggaactgatgctgtgatgctttcggctgaaacagcaagcggcctttttccagtcaaagtcattaccatggtcaataaaatatgtttaagcgctgagaagcatgccagctttttttatcatagtgatccggaaacctgtcattatcaacgggctgaccaggcaatcgctatggctaccatgcataccgccaatcatttccccattcaggccattatcacactgaccgaatccggagacacggctttatgggtatcccgacaccacagcaccgttcctatttttgctatatcagccaataagagaaccattggtcgtttaagccttgtaaacaatgtctttcctatctacattgattttcatcaattcaaccccgaaggattgaatcaacaaattttacatgaattaatcaaatcagggcaccttgaaaagagaggctatgtgttattaactcgcggaacccaaattggaatgcctggcggcaccaactgcatggaaattatacctgttgtctga

SEQ ID NO: 8534 - protein, 474 aa, Legionella pneumophila subsp. pneumophila str. Philadelphia 1
MLRRTKIVATLGPASKEPEILRSMLAAGVNVVRINFSHADSSALQLIALVRKIADELNHPVAVMADLQGPKIRVGRFQNKSITLIDGQNFTLDCMAPDTLGDINGVSVAYPNLANELSIGDHLLINDGLIELEVIEISGSKIHCKVVEGGVLTDLKGLNRKGGGLAARTLTEKDRNDLRTAIEAEVDYISLSFVKDAEDIRQARALMKDYGAQITPIIAKIERMEALDHLTDIIREADAIMVARGDLGVEVGAAEVPAIQKHIIEQTRLLDKVVITATQMMESMISNPQPTRAEVSDVANAILDGTDAVMLSAETASGLFPVKVITMVNKICLSAEKHASFFYHSDPETCHYQRADQAIAMATMHTANHFPIQAIITLTESGDTALWVSRHHSTVPIFAISANKRTIGRLSLVNNVFPIYIDFHQFNPEGLNQQILHELIKSGHLEKRGYVLLTRGTQIGMPGGTNCMEIIPVV

SEQ ID NO: 8535 - DNA, 1467 bp, Methylococcus capsulatus str. Bath
  CDS (1)..(1467): transl_table=11
atgacgaggggaattcgccgtaccaagatcatcgccacgctggggccggcttccgagtctccggagatgctcgagagaatcctgaaagccggggccgacgtggtccggctgaatttctcccatggtacggcggaggaacaccgcatccgcgccgagcgggtgcgggaaatcagccggcgcatgcagcgttatgtggccatcctggccgatctgcaggggcccaagatccgtatcgcccgcttcaagggcgaccgccaggtcgtgctggaggaaggccagcctttcgacctggacaccgcctttccgccggatcagggcgatgaaacccaggttggctgcgcctatgaggcgcttccgacggacgtcgaagcgggcgacaccttgctgctcaacgacggtctgatcgagctcaaggtcaaatcggtcgaaggaacccgcgtcagatgcgtcgtcaccgtcggcggcgtgctgtccaaccacaaaggcatcaacaagctcggcggcggtctctcggcgccggccctgaccgaaaaggacaaggcggatctgaagactgccgtggagatcggggccgactatctggcgatttcctttccgcgttcgaaggaagacatgctggaagcccgcgaactgttgcaccgggccggcagtcacatggggctggtggccaaggtcgagcgtgcggaagccatcaaggatggtgtgatcgaagggatcatcgacgcttccgacgccatcatggtggcgcgcggcgacctgggcgtggagatcggcgacgcccgtctgccacatgagcagaagaggctgatccgcttggcacgcagccgcaacaaggtcgtcatcacggccacccagatgatggagtcgatgatcgagaatcctttgccgacgcgggccgaggtctcggacgtggccaacgccgtgatcgacggcaccgatgccgtgatgctgtccgccgaaaccgccacggggaagtttccggaccgtaccgtggcggcgatggtgcgggtttgcaaggaagcggaaaaatacccgcggacgcgccaatcgagccaccgcatggacgagaaattccaccgcatcgacgaggccatcgccatgtcggcgatgtatatcgccaaccacctgccggtccgggccatcggtgccttgacggaatcggggtcgacgcccctgtggatgtcgcgcatcagttccggcatcccgatcttcgccctcacgccgcatgaggcggtgtgtcggcgggtgacgctgttccggggggtctatccgatttttttcaacgagcgcgccatctcggatcaccacgtgctgaaccgggcgatcgccgaagaattccttaaacgcaatctggtgaagatggacgatctggtcatcatgaccaaaggtgatttgaccggccgcaccggtggcaccaacgccttgaagatatcgcgcatcagcgacgtcatcgccgccgcgccttga

SEQ ID NO: 8536 - protein, 488 aa, Methylococcus capsulatus str. Bath
MTRGIRRTKIIATLGPASESPEMLERILKAGADVVRLNFSHGTAEEHRIRAERVREISRRMQRYVAILADLQGPKIRIARFKGDRQVVLEEGQPFDLDTAFPPDQGDETQVGCAYEALPTDVEAGDTLLLNDGLIELKVKSVEGTRVRCVVTVGGVLSNHKGINKLGGGLSAPALTEKDKADLKTAVEIGADYLAISFPRSKEDMLEARELLHRAGSHMGLVAKVERAEAIKDGVIEGIIDASDAIMVARGDLGVEIGDARLPHEQKRLIRLARSRNKVVITATQMMESMIENPLPTRAEVSDVANAVIDGTDAVMLSAETATGKFPDRTVAAMVRVCKEAEKYPRTRQSSHRMDEKFHRIDEAIAMSAMYIANHLPVRAIGALTESGSTPLWMSRISSGIPIFALTPHEAVCRRVTLFRGVYPIFFNERAISDHHVLNRAIAEEFLKRNLVKMDDLVIMTKGDLTGRTGGTNALKISRISDVIAAAP

SEQ ID NO: 8537 - DNA, 1755 bp, Bacillus clausii KSM-K16
  CDS (1)..(1755): transl_table=11
atgcgtaaaacaaaaattgtttgtacgattggaccagcaagtgagtcgcttgaaaaactaacagcactcatcgaagcggggatgaatgtagcccgtttgaatttttcacacggtgattttgaagagcacggtgcccgaattaaaaacattcgcgaagcggcaaaacggactggaaaaacggttgctattctacttgatacgaaagggccggaaatccgcacacaaacggtagaaggcggagcgattgaacttgagaaagggcaagagctcattttgtcaatgaatgaagtccaaggtacgaaagaaaagatctccattacgtatccagggctttgcgaggatgtagaagtcggaagtacgatcttgctcgatgatggcttaattgggcttgaggtaaaggaaatccgcgacactgagctggttacgattgttcgcaacagtggcgtgctgaaaaacaagaaaggcgtcaacgtcccaaatgtcagcgtcaacctaccggggatgaccgaaaaggatgcagccgacattgtatttgggattgagcaaaaagttgactttatagccgcctcctttgtgcgccgcgcttctgatgttctagaaatccgcgagctccttgaaaagcatggcgctgcagatacagcgattatcccgaaaatcgaaaaccaagaaggcgttgacaatatcgatgaaattcttgaagtatcggacggccttatggtcgcaaggggagacttaggtgtagaaattccagcagaagaagtaccgcttgtgcaaaaacagctcattaaaaaatgcaatgagttggccaagccggtcatcactgccacgcaaatgcttgattccatgcaacgcaacccgcgtcctacacgagcggaagcaagcgacgtagccaacgctatttttgacgggacagacgccattatgctttctggtgaaaccgctgctggtgattaccctgtagaatcggtgcaaacaatgcacaatattgccgaacgaacagaacaagccctcaattatgaaaacatgctgcgtcggaaaagcaaagaagtgaaaacatcgattacaagtgcaattggccagtctgttgcttacaccgcctcaaacttgaatgctgctgcgattttaacagcgacagaaagcggctatacagcacggatgacatcacgtttccggccgaaatcgccaatcttggccgtaacgagcaatgagcgtgcttaccggagaatggcgctcgtgtggggggttacgccaatacttggtaaacaagcaaacacaactgacgaaatgttagaccgtacagttgaagcggctgtcgctacaggagtggtgaaacaaggtgaccttgttatcattacggctggtgttcccgttggggagtcaggcacaacgaatttaatgaaagtccatatgcttggggaagttgcagcaaaaggacaaggcatcggacgtcgctctgcctcaggaaaagtcgttgttgcccgtgacgcaaaagaagcgattgcaaaagtaacggaaggctctgtgcttgtcacaaaatcaaccgataaagacatgatcgaagcgttcgagaaagctgctgctgtcgtgactgtagaaggcggtcttacatcccatgcagctgttgttggcttaaacttgagcacgcctgttatcgtcggtgtagccaacgcccttgaacgtttccaagacggcgatgaagtgactgtggactgcattagcggaaacatttacagcggccaagcccgtgtattataa

SEQ ID NO: 8538 - protein, 584 aa, Bacillus clausii KSM-K16
MRKTKIVCTIGPASESLEKLTALIEAGMNVARLNFSHGDFEEHGARIKNIREAAKRTGKTVAILLDTKGPEIRTQTVEGGAIELEKGQELILSMNEVQGTKEKISITYPGLCEDVEVGSTILLDDGLIGLEVKEIRDTELVTIVRNSGVLKNKKGVNVPNVSVNLPGMTEKDAADIVFGIEQKVDFIAASFVRRASDVLEIRELLEKHGAADTAIIPKIENQEGVDNIDEILEVSDGLMVARGDLGVEIPAEEVPLVQKQLIKKCNELAKPVITATQMLDSMQRNPRPTRAEASDVANAIFDGTDAIMLSGETAAGDYPVESVQTMHNIAERTEQALNYENMLRRKSKEVKTSITSAIGQSVAYTASNLNAAAILTATESGYTARMTSRFRPKSPILAVTSNERAYRRMALVWGVTPILGKQANTTDEMLDRTVEAAVATGVVKQGDLVIITAGVPVGESGTTNLMKVHMLGEVAAKGQGIGRRSASGKVVVARDAKEAIAKVTEGSVLVTKSTDKDMIEAFEKAAAVVTVEGGLTSHAAVVGLNLSTPVIVGVANALERFQDGDEVTVDCISGNIYSGQARVL

SEQ ID NO: 8539 - DNA, 1473 bp, Neisseria gonorrhoeae FA 1090
  CDS (1)..(1473): transl_table=11
atgaaccagacaagccgcgatctgacccgcatcagccacaacaccaaaatcgtcgccacccttgggccgggcagcaacaacgtcgaactgttggaagacatgatccgcgtcggcggcctgaacgtcgtccgcttcaacttcagccacggcacgcccgaattccatcaggaaaacgcccgcatcgtgcgcgaggcggcaaaacgcgccggacaggaaatcgccatcattgccgatctgcagggcccgaaaatccgcgtgggcaaaatcgccggcggcggcatcgaattgaacaaaggcgaaacattggtactcgatgccgcgctcgaaggcgaaggcacgcgcgaggcggtcggtttggactaccgcgacctgcccgacgacgttgccgcaggcgatgtcttgtggctggacgacggcctgctgaccctgaccgtggaatccgtcgaaggcagcaggattatcacaagggtggaaaacagccacatcctgaaaagcaacaaaggcatcaacaaacgcggcggcggtttgtccgcaggcgcgttgaccgaaaaagacttccgcgacctgaaaaccgcgattgccatcggttgcgactacctcgccatcagctttgtgaaatccgccgaagacctgcacatcgcgcgcgccaaagtcgaagaggaaatgaagggcagcactgccgtccgccccggtttggtttccaaaatcgaacgcgtagaagcgattgaaaaccttgatgaaatcatccttgccggcgacggcattatggttgcgcgcggcgacttggcggtcgaagtcggacacgccgccgtccccgccctgcaaaaacggatgatccgccgcgcccgcgagttgcgccgcttcagcattacggcgacgcaaatgatggaatcgatgattaccaaccccgtgccgacccgcgcggaagtcagcgatgtggcaaacgcggtattggacggcaccgatgcggtgatgtgttccgccgaaaccgccgtcggcgcgtatccgtttgaaaccgtcagccaaatggcgattatctgcgcggctgcggaaaaagagcaggattcgctcaacggcgttgccgaacagacggagtatcccgaagccgtcagcaccaacttagcgattgccggcggcgcggtcagcgtggcgcgcgcggttcacgccaaagccatcgtcgccctgaccgaaagcggttcgaccgcctttgaaatcagccgccacaatattaccctgccgattttcgcgctgaccccgagcgtttccgcccaacgccgtatggcgatgtaccggggcgtgcgcccgctgattttggcaaccagcaccgaccacgacacggcgttgaacgaagtcgaaacgatgctggtggaacacaacatcctgcattccggcgaccagtacatcatcaccagcggctcgcaaatgcgcgaatccggttcgaccaatacgctggaagtgctgcgcgtcaaataa

SEQ ID NO: 8540 - protein, 490 aa, Neisseria gonorrhoeae FA 1090
MNQTSRDLTRISHNTKIVATLGPGSNNVELLEDMIRVGGLNVVRFNFSHGTPEFHQENARIVREAAKRAGQEIAIIADLQGPKIRVGKIAGGGIELNKGETLVLDAALEGEGTREAVGLDYRDLPDDVAAGDVLWLDDGLLTLTVESVEGSRIITRVENSHILKSNKGINKRGGGLSAGALTEKDFRDLKTAIAIGCDYLAISFVKSAEDLHIARAKVEEEMKGSTAVRPGLVSKIERVEAIENLDEIILAGDGIMVARGDLAVEVGHAAVPALQKRMIRRARELRRFSITATQMMESMITNPVPTRAEVSDVANAVLDGTDAVMCSAETAVGAYPFETVSQMAIICAAAEKEQDSLNGVAEQTEYPEAVSTNLAIAGGAVSVARAVHAKAIVALTESGSTAFEISRHNITLPIFALTPSVSAQRRMAMYRGVRPLILATSTDHDTALNEVETMLVEHNILHSGDQYIITSGSQMRESGSTNTLEVLRVK

SEQ ID NO: 8541 - DNA, 1446 bp, Chlamydophila abortus S26/3
  CDS (1)..(1446): transl_table=11
atgatcgcaagaacgaaaatcatttgtactataggtccagcaacaaatactccggaaatgctcgagaagctgttagacgcgggtatgaacgtcgccaggttaaattttagtcatggtactcatgaaagtcatggtcagacaatcagtcttcttaaagagttgcgagagaaaaaaggagcgcctttagcgattatgttggacactaaaggtccagaaattcgtttaggcaagattcccacgcccattcaggtgtcacgaggtcagaaaatcactttattagagaaagagatcgagggctctctcgaagggggagtcactttacatcctcaatgcgtattcccttttgtgcgtgaaggtactgatgttttgatcgacgatgggtatctccaagctgttgtcacttctgctggtaacgattggttagagttagaatttattaattctggagagctgaagtctcataagtctttaagtatcagagaaattgatttagctcttcctttcatgaccgataaggatatccatgatcttaaatttggagtcgatcagggggttgatgttattgcggcttcctttgtgcgctgtgctgaagatatcgagagcatgcgcaagtgcttagcagattgcgggcgtggggatatgccgattattgcgaaaatagaaaatcgcctaggtgtagaaaatttccctcagattgccaaagttgcggatgggattatgattgcccgtggggatttaggaatcgagctgtctgttgtggaacttcctagtttgcaaaaatttatggcgaagatctctcgtgaaacagggcgtttttgtattactgctacacagatgctagaatcgatgattcgcaatgtattgccaacgcgtgcggaagtttcagatatagcaaacgctatttatgatgggacatctgcagtgatgttatcaggagaaacggcttcgggtagtcatcctatagctgctgtgaaaattatgcgttctgtaattcaagaaacggaaaaaaatctcaactatatgtctttcctagagattaatgatagtgagagtgctgttaaggtatctccttatcttcagtctatagggctgtcaggaattcaaattgcagagaaggcagcagcgaaagccattatcgtgtatacagaatccggaggctctccgatcttcctttctaagtatcgtccacgcttccccattattgctgttacaccaaatctatctgtatactaccgacttgctttagagtggggggtataccctatgcttactgaagagtcggatcgtacagtctggagacatcaagcttgtgtctatggtatcgaaagaggaattttatcaaattacgataaggtcctagtgttaagccgcggagcacaaatgaaagataccaataatctgacattgacaacagtaaatgatatcatctcagcatcagccaaataa

SEQ ID NO: 8542 - protein, 481 aa, Chlamydophila abortus S26/3
MIARTKIICTIGPATNTPEMLEKLLDAGMNVARLNFSHGTHESHGQTISLLKELREKKGAPLAIMLDTKGPEIRLGKIPTPIQVSRGQKITLLEKEIEGSLEGGVTLHPQCVFPFVREGTDVLIDDGYLQAVVTSAGNDWLELEFINSGELKSHKSLSIREIDLALPFMTDKDIHDLKFGVDQGVDVIAASFVRCAEDIESMRKCLADCGRGDMPIIAKIENRLGVENFPQIAKVADGIMIARGDLGIELSVVELPSLQKFMAKISRETGRFCITATQMLESMIRNVLPTRAEVSDIANAIYDGTSAVMLSGETASGSHPIAAVKIMRSVIQETEKNLNYMSFLEINDSESAVKVSPYLQSIGLSGIQIAEKAAAKAIIVYTESGGSPIFLSKYRPRFPIIAVTPNLSVYYRLALEWGVYPMLTEESDRTVWRHQACVYGIERGILSNYDKVLVLSRGAQMKDTNNLTLTTVNDIISASAK

SEQ ID NO: 8543 - DNA, 1434 bp, Corynebacterium glutamicum ATCC 13032
  CDS (1)..(1434): transl_table=11
atgggcgtggatagacgaactaagattgtatgtaccctaggcccagcggtggctagtgcagatggaattctgcgtttggtagaagacggcatggatgttgctcgcctcaacttctcccatggtgaccacccagatcatgagcaaaactacaagtgggtccgcgaggcggcggagaagactggccgtgcagtcggtattctcgcagacctccaaggaccgaagatccgtcttggccgtttcactgacggcgcaaccgtgtgggaaaacggcgagaccattcggatcaccgttgacgatgtagagggaacgcacgatcgtgtgtccaccacctacaagaatctggcaaaagacgcgaagccaggcgaccgcctgctcgttgatgacggcaaggttggcctcgtctgcgtttccgtcgaaggtaacgacgtcatctgtgaggttgttgagggcggaccagtctccaacaacaagggtgtttccctgccaggtatggatatttccgtacctgcactgtccgaaaaggatatccgtgacctgcgcttcgccctgaagctcggcgtggactttattgcactgtccttcgtacgttccccagcagatgctgaactcgttcacaagatcatggacgaagaaggtcgtcgtgttcctgtgatcgccaagctggaaaagccagaggctgtcacctccctcgagccaatcgtgttggcattcgacgccgtcatggttgctcgtggtgacctcggcgttgaggttcctctggaggaggttccactggttcagaagcgcgcaatccagattgcccgtgagaacgcaaagccagttatcgtggcaacccagatgctggattccatgattgagaactcccgcccaacccgtgcggaagcttctgacgtggcaaacgctgtgctcgatggcgcagatgctgtcatgctttctggtgaaacttcagtgggcaaagatccgcacaacgttgtgcgcaccatgtctcgcattgttcgcttcgctgaaaccgacggtcgcgtcccagacctgacccacatccctcgcactaagcgtggcgttatttcctactctgcacgtgatatcgccgagcgcctcaacgctcgtgcattggttgcgttcaccacctctggtgataccgcaaagcgtgtggctcgtctgcacagccacctgccactgctcgtgttcactccaaatgaggcagttcgctctgagctggcgctgacctggggtgcaaccaccttcctgtgtccacctgtcagcgataccgatgacatgatgcgcgaagtcgaccgtgctcttttagcaatgcctgagtacaacaagggtgacatgatggttgttgttgcaggttcccctcctggtgttaccggtaacaccaacatgattcacgtccaccttcttggtgacgacacaaggattgcaaagctctaa

SEQ ID NO: 8544 - protein, 477 aa, Corynebacterium glutamicum ATCC 13032
MGVDRRTKIVCTLGPAVASADGILRLVEDGMDVARLNFSHGDHPDHEQNYKWVREAAEKTGRAVGILADLQGPKIRLGRFTDGATVWENGETIRITVDDVEGTHDRVSTTYKNLAKDAKPGDRLLVDDGKVGLVCVSVEGNDVICEVVEGGPVSNNKGVSLPGMDISVPALSEKDIRDLRFALKLGVDFIALSFVRSPADAELVHKIMDEEGRRVPVIAKLEKPEAVTSLEPIVLAFDAVMVARGDLGVEVPLEEVPLVQKRAIQIARENAKPVIVATQMLDSMIENSRPTRAEASDVANAVLDGADAVMLSGETSVGKDPHNVVRTMSRIVRFAETDGRVPDLTHIPRTKRGVISYSARDIAERLNARALVAFTTSGDTAKRVARLHSHLPLLVFTPNEAVRSELALTWGATTFLCPPVSDTDDMMREVDRALLAMPEYNKGDMMVVVAGSPPGVTGNTNMIHVHLLGDDTRIAKL

SEQ ID NO: 8545 - DNA, 1437 bp, Haemophilus influenzae 86-028NP
  CDS (1)..(1437): transl_table=11
atgtctagaagactaagaagaacgaagattgtatgtactatgggcccatcaactgaccgtgataacaatcttgaaaaaattatcgcagcgggcgcaaacgtagttcgtatgaacttctctcacggtacacctgatgaccatatcggacgtgctgaacgtgtacgttctattgcgaaaaaattaggtaaaaccgtggcaatcttaggtgatttacaaggtcctaaaattcgtgtttctacttttaaagacggtaaaattttcttaaacgttggcgataaattcattcttgatgcagaattaccaaaaggcgaaggcactcaagaatccgttggtttagactataaaacgcttcctcaagatgttgtgccgggcgatattcttttattagatgatggccgtgttcaattaaaagtattatcaactgatggtgcaaaagttttcactgaagttactgttggtggtccattatcaaataataaaggtatcaataaattaggtggcggtttatctgcggatgccctaacagaaaaagataaagccgacattattaccgctgcacgcattggtgttgatttcttagccgtttctttccctcgttcaagtgcagatttaaattatgcacgtgaacttgctcaacaagcaggtttaaatgcaaaaatcgttgctaaagttgaacgtgcagaaaccgttgctaatgatgaagccatggacgatattattttagcatctgatgtaattatggttgctcgtggtgacttaggcgtagaaatcggcgatcctgaattagtcggtgtacagaaaaaattaattcgtcgttcacgtcaattaaatcgtgctgtaattacagcgactcaaatgatggaatcaatgattagtaacccaatgccaacgcgtgctgaagtaatggacgttgcaaacgcagtattagatggaactgatgcagttatgctttctgcagaaacagcagcaggtcaatatccttctgaaacagtggcagcaatggctagcgtatgtttaggtgcagaaaaaatgccaagcattaacgtttctcgtcaccgtatggataaagaatttgaaaccattgaagaatctgttgcgatgtctgcaatgtatgcagcaaaccacatgaaaggtgtagcggcaatcgtcactttaactagcacaggccgtactccattattaatgtcacgcattagctctggcttaccaatctttgctttatctcgtaatcaagaaaccctaaacctttgtgcactataccgcggtgtaacaccaatttatcacggtgaagaaagtcgtacagaagcaggtgcaaaagcagcacttcaatcattaaaagaaaaaggttatttatctactggcgatttagtactggtaacccaaggtggtcaaggtgcgacacaaactaacgtatgtcgtacattaattgttgaataa

SEQ ID NO: 8546 - protein, 478 aa, Haemophilus influenzae 86-028NP
MSRRLRRTKIVCTMGPSTDRDNNLEKIIAAGANVVRMNFSHGTPDDHIGRAERVRSIAKKLGKTVAILGDLQGPKIRVSTFKDGKIFLNVGDKFILDAELPKGEGTQESVGLDYKTLPQDVVPGDILLLDDGRVQLKVLSTDGAKVFTEVTVGGPLSNNKGINKLGGGLSADALTEKDKADIITAARIGVDFLAVSFPRSSADLNYARELAQQAGLNAKIVAKVERAETVANDEAMDDIILASDVIMVARGDLGVEIGDPELVGVQKKLIRRSRQLNRAVITATQMMESMISNPMPTRAEVMDVANAVLDGTDAVMLSAETAAGQYPSETVAAMASVCLGAEKMPSINVSRHRMDKEFETIEESVAMSAMYAANHMKGVAAIVTLTSTGRTPLLMSRISSGLPIFALSRNQETLNLCALYRGVTPIYHGEESRTEAGAKAALQSLKEKGYLSTGDLVLVTQGGQGATQTNVCRTLIVE

SEQ ID NO: 8547 - DNA, 1452 bp, Colwellia psychrerythraea 34H
  CDS (1)..(1452): transl_table=11
atgcctagaagaacaaaaattgttgctaccttaggtcctgcaacagacgatcgtgaaattttaaaaaatgtattagctgcgggtgtaaacgtagttagacttaatttctctcacggtattccacaagatcatatagatagagccgacaatgtcagagcaatagcaaaagaattaggcgtttatgttggtatattaggtgatttacaaggccctaagattcgtgtttctacctttaaaaatggcccaattaaattagccattggtgataagtttgaattagatgcaaccttagaaaaaggtgaaggctgtcaagaaaaagtgggcattgattataaaaaattagtacaagatgttaacactggagacattttattacttgacgatggccgtgtacaattaaaagtattatctacctctgataattcggtattcactgaagttactgttggtggccctttatcaaataacaaaggtattaaccgtcaaggtggcggtttaactgcaccagccttaaccgctaaagataaagaagacattaaattagcagcaaagatcaatgttgattttctagcggtttcatttcctcgtgatgcagcagatatgcgtgaagcacgtttactcgcgcaagaagctggctgtgatgctcgtttggtttctaaaattgaacgtgctgaagccgttaatgatgacaaaattcttgatggtattatcttagcttcagatgttgttatggtagcccgtggtgatttaggcgttgaaattggtgatgcggcattggttggtaagcaaaagcatattatcactcgctctcgtcaattaaatcgtgtagtaatcacggcaacacaaatgatggagaccatgattgagcaacctatgccaacacgtgctgaagttatggatgtagcaaatgccgtattagatggtactgatgcggtaatgttatcagcagaaactgctgcaggtaagtatcctgttgaaacagtaacagcaatggctaatgtttgtgttggtgcggagcagcatcgttcagttaatatttcaaaccatagaatggaactgacttttagtgaagtgtcagaaacaattgcactatctgctatgtacgctgcaaaccatttagagggtgttaaagcgattatatctttaaccgaatcaggtcaaaccagtaagttaatgtcacgtatcacttcaggtttaccgatattctcattatctcgccatccaaaaacattaaataaaaccgcaatataccgtggtgtttatccgattgaatttgattcaactcacgtaaacaatgacaacttatctgatgagatgttaaaagtggtaagtggcaagattgagttagcagtaggtgataaacttattttaacccatggtgatatgatggaaaccgttggtgcttcaaatacattgaaaattttaactatttctaaaagacaccttaagtaa

SEQ ID NO: 8548 - protein, 483 aa, Colwellia psychrerythraea 34H
MPRRTKIVATLGPATDDREILKNVLAAGVNVVRLNFSHGIPQDHIDRADNVRAIAKELGVYVGILGDLQGPKIRVSTFKNGPIKLAIGDKFELDATLEKGEGCQEKVGIDYKKLVQDVNTGDILLLDDGRVQLKVLSTSDNSVFTEVTVGGPLSNNKGINRQGGGLTAPALTAKDKEDIKLAAKINVDFLAVSFPRDAADMREARLLAQEAGCDARLVSKIERAEAVNDDKILDGIILASDVVMVARGDLGVEIGDAALVGKQKHIITRSRQLNRVVITATQMMETMIEQPMPTRAEVMDVANAVLDGTDAVMLSAETAAGKYPVETVTAMANVCVGAEQHRSVNISNHRMELTFSEVSETIALSAMYAANHLEGVKAIISLTESGQTSKLMSRITSGLPIFSLSRHPKTLNKTAIYRGVYPIEFDSTHVNNDNLSDEMLKVVSGKIELAVGDKLILTHGDMMETVGASNTLKILTISKRHLK

SEQ ID NO: 8549 - DNA, 1434 bp, Dechloromonas aromatica RCB
  CDS (1)..(1434): transl_table=11
atgttgcgccataccaagatcgttgccacgctgggccccgcctcttcaacgccggaagttctcgaccgcatggtgctggcgggcatcgatgtggtgcgcatgaatttctcgcacggcacggccgacgatcaccgggcgcgcgccgagggcatccgtgcggcagcagccagacacggtcgcactatcggcatcctgggtgacctgcaaggtccgaagattcgcgtcggcaagttcgaggcaggcaagatcaccctcgttcccggtgaaaaattcattctcgatgcccagtgcccgctcggcaatcaggagcgtgtcggccttgattacaaggatctgccgaaggatgtggtcaatggcgacattctgctgctcgacgacggccgcctgaaactcgaagtgaccggcgttcgcggtcatgagatttacacccgcatcatcgtcggcggcgacctgtcgaacaacaagggcatcaaccgccagggtggcggcctgactgcaccggcactgaccggcaaggacatggacgacatcaagacggccgccgacatcggcgtcgatttcgtcgctgtctccttcccgaagagcgccgccgacatgtatatggcgcgccagttgctgcgcgctgccggcagcaccgccgtgctgatcgccaagatcgagcgcgtcgaagcgatcaccaatctggctgaaatcctcgatgcctccgacggcatcatggtcgcccgcggcgacctcgccgtcgaagtcggtgacgcctcggtgccggcgctgcaaaagaagatgatccgcatggcgcgggacaggaacaagctgaccatcaccgccacccagatgatggagtcgatgattacctcgccggtgccaacccgcgccgaagtctccgacgtcgccaatgccgtgctcgacggcaccgacgccgtgatgctgtcggccgaaacggcgagcggcaagtatccggtcgaaaccgtcgaatcgatggcccgcatctgcgttgaagccgaacgctcggccgaagtcacgctcgaccgcgaattcctcgaccgcatcttcacccgcatcgaccagtcgatcgccatggccgccatctggacggcgcatcacctcaaggtgaaggccatcgctgcactgacccagtccggctcgacggccttgtggatgagccggatgaactccggcgtgcccatctacgcactgaccccggatgccgaatcggtcggccgcatggtgctctttcgcggcgtctgcccgctgccgatgaagcagcagcacaccgaccgcgaccgcctgttggctgaagccgagcaactgttgatcgatcgcggtgtcgtagaaaagggcgacctgatcgccctgaccatcggtgaaccaatcggcaccaccggcggcaccaatacccttaagatcgtccgggtgggcgagcaccaactcgactag

SEQ ID NO: 8550 - protein, 477 aa, Dechloromonas aromatica RCB
MLRHTKIVATLGPASSTPEVLDRMVLAGIDVVRMNFSHGTADDHRARAEGIRAAAARHGRTIGILGDLQGPKIRVGKFEAGKITLVPGEKFILDAQCPLGNQERVGLDYKDLPKDVVNGDILLLDDGRLKLEVTGVRGHEIYTRIIVGGDLSNNKGINRQGGGLTAPALTGKDMDDIKTAADIGVDFVAVSFPKSAADMYMARQLLRAAGSTAVLIAKIERVEAITNLAEILDASDGIMVARGDLAVEVGDASVPALQKKMIRMARDRNKLTITATQMMESMITSPVPTRAEVSDVANAVLDGTDAVMLSAETASGKYPVETVESMARICVEAERSAEVTLDREFLDRIFTRIDQSIAMAAIWTAHHLKVKAIAALTQSGSTALWMSRMNSGVPIYALTPDAESVGRMVLFRGVCPLPMKQQHTDRDRLLAEAEQLLIDRGVVEKGDLIALTIGEPIGTTGGTNTLKIVRVGEHQLD

SEQ ID NO: 8551 - DNA, 1431 bp, Thermobifida fusca YX
  CDS (1)..(1431): transl_table=11
gtgttacacgtgacacgtcgagcaaagattgtcgcgacccttggaccggctacctcgagccctgaagtcctccgcaagctcgtcgacgccggcctggacgtagcgcgactcaacctcagccacggtacccacgacgaccaccaaaccatgtatcgcaacgtccgcgccgcagcggaggccagcggacgtaatgtcggtattctcgccgacctgcaagggccgaagatccgtctcgggacgttcgtcgacggatccgtgaccctcagccccggtgacgagttcaccatcaccatcgacgatgtacccggggaccgccaccgggtctccaccacatataaaggactccctggtgatgtccgtcctggcgaccgcgtcctcatcgacgacggtcgcgttgttttggaatgcgtcaaaagcaccagcacggatgtccacacccgcgtcatcgtcggcggcccggtatccaaccacaaagggctcaacctgcccggggtgtcggttgcggtccccgcgctgaccgaaaaagacgaacgggacctgcgctgggccctggagcagggcgtcgacatggtggcgctctcttttgtgcgcagccccgccgacgcggaagacgtccaccgggtcatggacgagatgggcgtgcacgtccccctcatcgccaagatcgaaaaacctcaggcggtggagcggcttcaggacatcatcgaggctttcgacggcgtcatggtcgcccgcggcgacctcggtgtcgaactccccctcgaaaatgtgcccatggtgcagaaacgcgccattgaacggtgccgggacaaagccaaaccggtcatcgtcgccacgcagatgctcgaatccatgatccacaacccgcgccccacgcgggctgaggcttctgacgtggctaacgccgtcctcgacggcgcggacgcagtcatgctctccggcgagaccagcgtcggaaagtaccccgtggagaccgtgcagaccatggcgcggatcatcgccgccgccgaacaggagtccctgcgcgcctcccacatcctccaccgggtcccggagaccgtgggcgggtcgatcgcccgagccgctgccgaagtcggagccaccgtgggcgccaaggcccttgtcgccttcaccagcagcggggagactgcacgccggctcgcccgctaccgttcccccattccgctgctggcgttcaccaccgagcctgccacccgcgcccagctctccctcacctggggtgtggaaacccacctcgtgccgtgggtggacaacaccgacgacatggtccgccaggtcgagaacgaactcctggacatggactaccagaagggcgacaaagtcgtcatcgtcgcgggaagcccgcctggcacccgagggtcgaccaacatgttgcgcgtgcaccgtatgggtgacgccatctcaaactga

SEQ ID NO: 8552 - protein, 476 aa, Thermobifida fusca YX
MLHVTRRAKIVATLGPATSSPEVLRKLVDAGLDVARLNLSHGTHDDHQTMYRNVRAAAEASGRNVGILADLQGPKIRLGTFVDGSVTLSPGDEFTITIDDVPGDRHRVSTTYKGLPGDVRPGDRVLIDDGRVVLECVKSTSTDVHTRVIVGGPVSNHKGLNLPGVSVAVPALTEKDERDLRWALEQGVDMVALSFVRSPADAEDVHRVMDEMGVHVPLIAKIEKPQAVERLQDIIEAFDGVMVARGDLGVELPLENVPMVQKRAIERCRDKAKPVIVATQMLESMIHNPRPTRAEASDVANAVLDGADAVMLSGETSVGKYPVETVQTMARIIAAAEQESLRASHILHRVPETVGGSIARAAAEVGATVGAKALVAFTSSGETARRLARYRSPIPLLAFTTEPATRAQLSLTWGVETHLVPWVDNTDDMVRQVENELLDMDYQKGDKVVIVAGSPPGTRGSTNMLRVHRMGDAISN

SEQ ID NO: 8553 - DNA, 1434 bp, Methanosarcina barkeri str. Fusaro
  CDS (1)..(1434): transl_table=11
atgcaaattccggaccataaaacaaagattgtctgtaccataggccctgcttcctcttccgaagaagtgatcaggaaacttgtgcttgctggcatgaacgtggcaaggatcaatttttcccacgggagcttcgaaagccatagcgaagtaatccagagagtccgtaaggttgcagaggagcttgacaggacagttgcgattcttgccgacctgccaggcccgaagatccgtataggcaaactggaaaaagaaccgatcatgctccataaaggaaactctgtgacccttacggttgccgaaactacaggaaatgagacacgtattcctgtaagctacaagcaacttccggaaagcgtggttccagggagccttatttacttaagtgacggttttatccagcttcgatgcctggaagtttcgggaaaagatgtgctttgtgaggttcttatcggagggcagctctattctcataaagggctaaatctaccaggggcaaagatcttagttgattctgtaactggaaaggatcttgaaattcttgggtttgcccttagtaaagggatcgacactttcagcatttctttcatagaaagtgcggaagatattcgtaatgtccggaattttgctgcagctagaggaaagtctgtatatattgtttctaaaatcgaacgcaggcaagctgtagagaatatccaggacattctaaaagaaaccgatgctctcatgattgccagaggggacctcggggttgaaatacctattcaggaagttccttcagtccagaaggaacttatccatagtgcaaaacttcttggaattccggtaattacagccactcaaatgctggcttcaatgactgataatataaggcctacccgcgcagaagcaaccgatgtagccaacgcaatccttgacggcacagatgcggttatgctttcggaagagacggcagttggtaattatcctgtggaagctgttgaaatgatggcaaaaattgcaaaaaccacagaagactggcgttccgggacaaaatggggactagatgctattatcaagggcataacggcaagagatatgtcagtggatgaggtaataaccctccaggtgcatgaagccttgcaaaagttgccggttgcggccgtactgactcccacgagaagtggagcgaccccccgcaggatctcgcgcttcaagcctgatacctggatccttgctttcagccgtgtcccgagaacctgcggcttcctctctttatcctatggcgtttatcctatcactgtgaatgaaaatattgaaagctgggaaaaagagactactgagaaagccaaagaccttggatttgtaaaaagcggagagattgttattttcacccagggtccatcttcaggaagccccggaggcacaaatatgcttaaaatccttacccttaaataa

SEQ ID NO: 8554 - protein, 477 aa, Methanosarcina barkeri str. Fusaro
MQIPDHKTKIVCTIGPASSSEEVIRKLVLAGMNVARINFSHGSFESHSEVIQRVRKVAEELDRTVAILADLPGPKIRIGKLEKEPIMLHKGNSVTLTVAETTGNETRIPVSYKQLPESVVPGSLIYLSDGFIQLRCLEVSGKDVLCEVLIGGQLYSHKGLNLPGAKILVDSVTGKDLEILGFALSKGIDTFSISFIESAEDIRNVRNFAAARGKSVYIVSKIERRQAVENIQDILKETDALMIARGDLGVEIPIQEVPSVQKELIHSAKLLGIPVITATQMLASMTDNIRPTRAEATDVANAILDGTDAVMLSEETAVGNYPVEAVEMMAKIAKTTEDWRSGTKWGLDAIIKGITARDMSVDEVITLQVHEALQKLPVAAVLTPTRSGATPRRISRFKPDTWILAFSRVPRTCGFLSLSYGVYPITVNENIESWEKETTEKAKDLGFVKSGEIVIFTQGPSSGSPGGTNMLKILTLK

SEQ ID NO: 8555 - DNA, 1434 bp, Thiobacillus denitrificans ATCC 25259
  CDS (1)..(1434): transl_table=11
atgattcgcagaaccaaaatcgtcgccaccctcggccccgcctgctccgacgccaagacgctcgatcggatgatggaagccggcctggacgtggtccgtctcaacttctcccacggcgtggcgcaggaccacatcgaccgcgccgaactcgtgcgttcgctcgcgcgtacgcgcggtcgcgcggtcggcgtcctcgtcgacctgcaggggccgaagatccgcatcggcaaattcaaggacaacaagatcgtcctcgccaagggcgacaacttcatcctcgacgcggaatgcgcgctcggcgaccaggagcgcgtcggcctcgactacaaggaattgccgagcgacgtcgcccgtggcgtgacgctcctgctcgacgacggccggatcgaactctgggtcgaagacgtcaagggcagcgaaatccactgcaaggtcgtgcagggcggcgtgctctcgaataacaagggcatcaaccgcaagggcggcggtctttcggccgccgcgctgaccgagaaggacatcgaggacatcaagaccgccgcggcgctcaaggccgactacctcgcggtctccttcccgcgctcgggcgccgacatgcgccaggcgcgcgagttgctgcgggccgcgggcggcaggagccagctcgtcgccaagatcgagcgcactgaagcgatcgagaacctcgaagaaatcctcgatgcgtccgacgcgatcatggtcgcccgcggcgacctcggcgtcgaggtcggcgacgctgcggtgccggcgctgcagaagcgcatgatccgtatggcgatcgcgcgcaacaaggtcgtcatcaccgcgacgcagatgatggagtcgatgatcacgagcccgatcccgacccgcgccgaagtctccgacgtcgccaacgccgtgctcgacggcaccgacgccgtcatgctctcggccgagaccgcggccgggcaatacccggtcgaagccgtgcaggcgatggaccgcgtctgcctcgaagccgaaaaggaagccgagacgcagttcacgcgcgagcggctcgaccacagcttcctgcgcgccgacgaggcgatcgcgatgtcggccgtgttcacctcggtgcacctcaacatcaaggccatcgccgcgctgaccgagtccggcaatacctgtctgtggatgagccgcctgtcgacgcgcgtgccgatctacgccttgacacctcaggtcgaaacccgtagaaaagtcactctcttccgcggtgtctatccgatcaacctcaagaccgccaccaaggagcgcgacgtgctgctcgccgaggccgaggaagaattgcggcggcgcggcgccgtgcgcgacggcgacctgatcctgctgacgatcggcgagccgatcggccagtcgggcggcaccaatacgatgaagatcgtccgtgtgggcgcttcgaagaaaccctga

SEQ ID NO: 8556 - protein, 477 aa, Thiobacillus denitrificans ATCC 25259
MIRRTKIVATLGPACSDAKTLDRMMEAGLDVVRLNFSHGVAQDHIDRAELVRSLARTRGRAVGVLVDLQGPKIRIGKFKDNKIVLAKGDNFILDAECALGDQERVGLDYKELPSDVARGVTLLLDDGRIELWVEDVKGSEIHCKVVQGGVLSNNKGINRKGGGLSAAALTEKDIEDIKTAAALKADYLAVSFPRSGADMRQARELLRAAGGRSQLVAKIERTEAIENLEEILDASDAIMVARGDLGVEVGDAAVPALQKRMIRMAIARNKVVITATQMMESMITSPIPTRAEVSDVANAVLDGTDAVMLSAETAAGQYPVEAVQAMDRVCLEAEKEAETQFTRERLDHSFLRADEAIAMSAVFTSVHLNIKAIAALTESGNTCLWMSRLSTRVPIYALTPQVETRRKVTLFRGVYPINLKTATKERDVLLAEAEEELRRRGAVRDGDLILLTIGEPIGQSGGTNTMKIVRVGASKKP

SEQ ID NO: 8557 - DNA, 1770 bp, Anabaena variabilis ATCC 29413
  CDS (1)..(1770): transl_table=11
atgcaattaagagattctgtacgccggacaaaaatcgtcgctacaattggccctgccactagtagccccgaaatgctgaaagccatcattgaagcgggtgcaacaacgctgcgactcaacttttcccacggttcccacgccgaccatcagcgtagtattcgcctaattcggcaaaccgcttttgaactaaatcagccagtggcaattctccaagatttgcaagggccaaaaattcgcttaggaaaatttgaaaacgggtctatagttttagctaaaggcgatcgcttcactttaacaaatcgtccagttgttggtacgcaggaaattagctgtgtcacctacgattacttggctgatgaagtccctgtaggtgcaaaaatcctccttgatgatggccgtgtagaaatggtggtggaggatattaaccgcgacaaaggggatttacattgtcgggtgactgtagcaggtaagttatctaataacaaaggtgttaactttcctggcgtatatctctcaattaaagctatgaccgacaaagatcgtgaggatctgatgtttggtctagaccaaggtgttgattgggtagcactttcctttgtccgtaatccccaagacatcattgaaattaaagagctaatttccagcactggtaaacaagtgccagtagttgccaaaatagaaaagcatgaagcgatcgaacaaatggaagcagttctcgctttatgtgatggcgtaatggtggccagaggcgatttaggtgtagaactaccagcagaagatgtccccgtattacaaaaacgcttaattgcgacagcaaaccgcttggggattcccatcatcaccgctacccagatgttagatagcatggtgagcaatccccgtcccacccgcgcggaagtttccgacgtagccaatgccattcttgatggtacagatgcggtaatgctctccaatgaaacggctgtgggtagctacccagtggaagcggtggcgacaatggcaagaatcgccgaacgcatcgagcaggaagaagctatggctagtaaattacgccaaatgcgagataaccgccgttctatccccaacgccatcagccaagctgtaggtcaaattgctgaacagttgggagcagcagcaattatgactctgacccaaacaggggcgactgcacgcaacgtttccaagttccgcccccaaacaccaatcttagcggtaacaccccacgtcaacgtagctcgtcagctacaaatggtatggggtgtaaaacctttgttggtattagaattaccttccactggtcaaacattccaagccgccattaacgtcgcccaggagcatagtttactgtttgaaggcgatttagtcgtgatgacagccgggacactccaaggggtatctggctcaacggacttgattaaagttgaagtggtgacagcagttctaggtcagggaattggtctaggacagggtttggtaagcggttgtgctagggttgctcacaccggtatggatgtggggaactttaactccggtgatattttggttgcaccccgcacaggcgcagattttgtcgaggcgattcgcaaagcaggcgggattattacagaagatgaaagtttaaccagtcatgcggcggtgattggtttacgcctgggtgtaccagtaattgtaggtgtgaagaaagccacgcaagttattcgtgatggagcaattctgactctggatttgcaacgaggtttagtttattccggtgctgtcggaactccttaa

SEQ ID NO: 8558 - protein, 589 aa, Anabaena variabilis ATCC 29413
MQLRDSVRRTKIVATIGPATSSPEMLKAIIEAGATTLRLNFSHGSHADHQRSIRLIRQTAFELNQPVAILQDLQGPKIRLGKFENGSIVLAKGDRFTLTNRPVVGTQEISCVTYDYLADEVPVGAKILLDDGRVEMVVEDINRDKGDLHCRVTVAGKLSNNKGVNFPGVYLSIKAMTDKDREDLMFGLDQGVDWVALSFVRNPQDIIEIKELISSTGKQVPVVAKIEKHEAIEQMEAVLALCDGVMVARGDLGVELPAEDVPVLQKRLIATANRLGIPIITATQMLDSMVSNPRPTRAEVSDVANAILDGTDAVMLSNETAVGSYPVEAVATMARIAERIEQEEAMASKLRQMRDNRRSIPNAISQAVGQIAEQLGAAAIMTLTQTGATARNVSKFRPQTPILAVTPHVNVARQLQMVWGVKPLLVLELPSTGQTFQAAINVAQEHSLLFEGDLVVMTAGTLQGVSGSTDLIKVEVVTAVLGQGIGLGQGLVSGCARVAHTGMDVGNFNSGDILVAPRTGADFVEAIRKAGGIITEDESLTSHAAVIGLRLGVPVIVGVKKATQVIRDGAILTLDLQRGLVYSGAVGTP

SEQ ID NO: 8559 - DNA, 1446 bp, Rhodobacter sphaeroides 2.4.1
  CDS (1)..(1446): transl_table=11
atgagacgccttcgcaatgtaaagatcgtggccaccctggggccggcctccaacgactatgccaccatccgcgcgctgttcgaagcgggtgcggacgtgttccggctcaacatgagccacggatcgcatgacgacatccgggcgcgccaccagatgctgcgccagatcgaggccgacaccgggactccggtctgcatcctcgccgacctgcaggggccgaagctccgcgtcggcaccttcgccaacggctccgaagagctggtcgagcgcggccgcttccggctcgacctcgaccccgcgccgggcaccgccgagcgcgtgaacctgccccaccccgagatcttcgcggcgctcgagccgggatcgtcgctcctcgtcaacgacggcaagatccgcctcgaggtggccgactgcggcccggacttcgccgactgcatcgtgacggtgggcggcacgatctcgaaccgcaagggcgtgaacgtgcccgacgtggttctgcccctcgccgccctctccgagaaggaccgccgcgacctcgaattcgtctgcgaactcggcgtggactggctcgccctctccttcgtgcagcgccccgaggatgtggaagaggcgcgcagcctcgcccgcggccgggcggcgatcctgtcgaagatcgagaagcccgcggccgtgaaggcctatgacgcgatcctcgccgtctccgacgggatcatggtggcgcgcggcgacctcggggtcgaactgcccgttcaggcggtgccgccgatccagaagcgcctcgtgcgcggcgcccgtgcggcggcgaagcccgtgatcgtggccacccagatgctcgagtcgatgatcgactcgcccatgcccacccgcgccgaggtctcggacgtggcgaccgccatctacgagggcgccgacgcggtcatgctctcggccgaatctgccgcgggctcctacccgatcgaagccgtgatgacgatgaacaacacggccatctcggtcgagagcgatcccgtctaccgcgacatcatcgaggcctcgcgcgcagccaagcgcgcctcggtcgccgatgccatcgtggcggccgcgcgcgagatcgccgagacgacgccgatcaaggccatctgctgcttcacccagaccggcaagaccgtgtcgctggtggcgcgcgagcggccgcgcgtgccgatcctcgcgctgacaccgctggtcgagaccgcgcggcgtctgtcgctcacctgggggacgcactgcgtcgtcaccgcgccgcaggagcggttcaagggcgcagtcatctgcgccgcgcgggcggcactgtccgacgggttcgcgcaggagcacgagcagatcgccgtggtcgcgggcgtgcccttcaacgtgcgcggcaccacgaacatcctgcgcgtcgccccctgcgacgagcggctgatctacagcggcgatccggaatag

SEQ ID NO: 8560 - protein, 481 aa, Rhodobacter sphaeroides 2.4.1
MRRLRNVKIVATLGPASNDYATIRALFEAGADVFRLNMSHGSHDDIRARHQMLRQIEADTGTPVCILADLQGPKLRVGTFANGSEELVERGRFRLDLDPAPGTAERVNLPHPEIFAALEPGSSLLVNDGKIRLEVADCGPDFADCIVTVGGTISNRKGVNVPDVVLPLAALSEKDRRDLEFVCELGVDWLALSFVQRPEDVEEARSLARGRAAILSKIEKPAAVKAYDAILAVSDGIMVARGDLGVELPVQAVPPIQKRLVRGARAAAKPVIVATQMLESMIDSPMPTRAEVSDVATAIYEGADAVMLSAESAAGSYPIEAVMTMNNTAISVESDPVYRDIIEASRAAKRASVADAIVAAAREIAETTPIKAICCFTQTGKTVSLVARERPRVPILALTPLVETARRLSLTWGTHCVVTAPQERFKGAVICAARAALSDGFAQEHEQIAVVAGVPFNVRGTTNILRVAPCDERLIYSGDPE

SEQ ID NO: 8561 - DNA, 1752 bp, Carboxydothermus hydrogenoformans Z-2901
  CDS (1)..(1752): transl_table=11
atgaaacgcaccaagattgtttgtacaattgggccggcttcaaacgacgtaggtatcttaaaagaaatgattatatccggaatgaatgtggccagaattaattttgctcatggcagtcacgaggagcaccgggagagaattgaaaaggttagacgggcgtctttagaagtaggaatcccggtggcaattttaattgatacaaaaggtccggaaattcgcattggtaaagttgaaaacggaaaaattgtcttaaaagaaggggacttagtggtatttgatccggatatagcagagggtcaaggtttgagagttccagtaaattatccgggattagcccgggatgttaatgtcggaggaactattcttttagatgatgggttaatagaattgaaaatcgaagatattcagggtaataaagttattgcccgggttataaccggtggtgagttatccaataacaaaggagtaaatttaccgggagttaaagttaatcttccggcgttaaccgaaaaggaccggaaggatattgattttggtattgaaattggagcggactttattgcccactcttttgtccgaaaagcagcggatgtgttagctttacggcgttacctggaagaaaaaggggcggatatggaaataattgctaaaatcgaaaaccaagaaggggtcgaaaacatcgatgaaatcatcaaagttgcggatgggataatggttgcccggggggatctgggagtagaaattccaacggaagatgtgcctttggtgcaaaaggaaataattgaaaagtgtaataaaaatggtaaaccggtaatcaccgccacccagatgttagattcaatgattagaaataaacgtccgacccgggccgaagctaccgatgtggctaatgctatttttgacggcaccgatgcggtaatgctgtcgggagaaacggctgccgggaaatatccggtagaagcggttaaaacaatggcccggattgcggaaaaagcggaagaaaaattactcacgttacgaaaactaaataaacccaccacaaaatcttttaaaactgtaaccgatgccataagccacgccagtgttaccaccgctgaagaattggatgcgggggcaattatcacgcctacttcttcgggctatacggcgcgaatggtttcccggtaccgcccggcggttcctattattgctgccacaccggatatgaaggtacttagaaagttgacgctggtttggggggtatttccccttttggttaaaacctccgattctaccgatgaaatgttaagtaaagcaatagaagcctctttagaaagtgggcttttaaaacctggcgatttggtggtgcttaccgccggagttccggtgggcgtaaaagggacaaccaaccttttaaaagtccatgtagcgggaaatgttttggccaaaggtgtgggcattggaacaaggcctataaccggaacggctcgggtctgtcgaaccgccagggaagcaatcgagcggattcagccgggagatattttggtaaccgaagcaaccgacagagattttgtttcggctattgaaaaggccgcgggactggtagttgaagcgggaggacttacgtcgcatgcggctattgcggggttagagtttgggatacctgtaatagttggggtcgatggtgctacttcgataattaaagatggggaaaagttaactctagatccccagaggggtctggtataccacggttctgctaaagttttataa

SEQ ID NO: 8562 - protein, 583 aa, Carboxydothermus hydrogenoformans Z-2901
MKRTKIVCTIGPASNDVGILKEMIISGMNVARINFAHGSHEEHRERIEKVRRASLEVGIPVAILIDTKGPEIRIGKVENGKIVLKEGDLVVFDPDIAEGQGLRVPVNYPGLARDVNVGGTILLDDGLIELKIEDIQGNKVIARVITGGELSNNKGVNLPGVKVNLPALTEKDRKDIDFGIEIGADFIAHSFVRKAADVLALRRYLEEKGADMEIIAKIENQEGVENIDEIIKVADGIMVARGDLGVEIPTEDVPLVQKEIIEKCNKNGKPVITATQMLDSMIRNKRPTRAEATDVANAIFDGTDAVMLSGETAAGKYPVEAVKTMARIAEKAEEKLLTLRKLNKPTTKSFKTVTDAISHASVTTAEELDAGAIITPTSSGYTARMVSRYRPAVPIIAATPDMKVLRKLTLVWGVFPLLVKTSDSTDEMLSKAIEASLESGLLKPGDLVVLTAGVPVGVKGTTNLLKVHVAGNVLAKGVGIGTRPITGTARVCRTAREAIERIQPGDILVTEATDRDFVSAIEKAAGLVVEAGGLTSHAAIAGLEFGIPVIVGVDGATSIIKDGEKLTLDPQRGLVYHGSAKVL

SEQ ID NO: 8563 - DNA, 1443 bp, Geobacter metallireducens GS-15
  CDS (1)..(1443): transl_table=11
atggataaatcgtcgcgcaaaaccaagatcgtagccaccctcggaccggccagctcctcgccggagatgatcagcaagctcatggaggcaggggcagaccttttccgcctcaacttctcccacggggccaacgaccagcgccgggagaccattgccaccatccggcgtctttctgccgcccggggaaaggagatcggcatcctggccgacctccaggggccaaagatcaggaccggccgcatggagaacggcgccatctccctgcgcaagggagaccccctcgacatcgtcaccgatgaggtcctcggcaccccgaccctcatctccaccatctacaaggccctcccccatgacgtgaagcccggctcccgcattctcatggacgacggcctcatcgagctgaaggtccattcggtggagggaaacctggtccgctgcaccgtggtggaggggggaaccctcaaggacctgaaggggatcaacctccccggagtccatgtctcggccccctccctctcggagaaggatctgcgggacctggagttctgcctggccgagggggtggactacatcgccctctcctttgtccggagcgccgaggacgtggaggggctcaagcggatcctcttcgagcgcggcatccacatccccgtggtggccaagatcgagaagcccgaggccctgcgcaatttcaagagcatcctcaaagcggccgacggtgtcatggtggcccggggcgacctgggtgttgagatcagcgccgagaaggtccccctcttccagaaaaaaatcatccgagcctgcaacgaggcggggaagccggttatcaccgccacccagatgctggaatcgatgatcagccacccgcgccccacccgggccgagacctccgacgtggctaacgccatccttgacgggaccgacgcggtcatgctctcgggagagaccgcctcggggcagttccccctggaagcggtgcggaccatggccaaggtggccctggatgtggagcgctacgctcagatggaggacaccctcccccagcggcgccacaacccgagcatcgccgaggcggtggccgaggccgcctgccgcgccgccgtcaccgtggacgcccgggccatctcggtcatgacccagtcggggagcaccgccgccctcatctccaagttccggccgccgctccccatcatcgcctttacccagtccctggagacccggcggcgcctctccctctactggggggtgaagccgctccccattggccccatgaccggcaccgacgagcagatcgcggccgtggaatcgacgttcctctcggcggggtaccgcaagggagacgtgatcgtcataaccatgggggtgccggtggaggcccgaggttccacgaaccttatgaaggtccacaagctggggacggggaagtttttcgagattttctga

SEQ ID NO: 8564 - protein, 480 aa, Geobacter metallireducens GS-15
MDKSSRKTKIVATLGPASSSPEMISKLMEAGADLFRLNFSHGANDQRRETIATIRRLSAARGKEIGILADLQGPKIRTGRMENGAISLRKGDPLDIVTDEVLGTPTLISTIYKALPHDVKPGSRILMDDGLIELKVHSVEGNLVRCTVVEGGTLKDLKGINLPGVHVSAPSLSEKDLRDLEFCLAEGVDYIALSFVRSAEDVEGLKRILFERGIHIPVVAKIEKPEALRNFKSILKAADGVMVARGDLGVEISAEKVPLFQKKIIRACNEAGKPVITATQMLESMISHPRPTRAETSDVANAILDGTDAVMLSGETASGQFPLEAVRTMAKVALDVERYAQMEDTLPQRRHNPSIAEAVAEAACRAAVTVDARAISVMTQSGSTAALISKFRPPLPIIAFTQSLETRRRLSLYWGVKPLPIGPMTGTDEQIAAVESTFLSAGYRKGDVIVITMGVPVEARGSTNLMKVHKLGTGKFFEIF

SEQ ID NO: 8565 - DNA, 1794 bp, Prochlorococcus marinus str. MIT 9312
  CDS (1)..(1794): transl_table=11
atgtcgaatattgatttaaaaagaagaacaaaaatagtagcaactattggacctgcaactcagtctgaagagataattacaaatttaattaaagcaggagtaacaacattcagattaaatttctcacatggagatcataatgatcacgctgagagaattaaaactataagggaggtttcacaaaagctagatattgatattggtattctgcaagatcttcaaggacctaaaattaggttaggacgattcaaggatggtccagtaaaagtaaaaaaaggggataaatttacactaacctccaatgaagttgaatgttcaaatactattgcgaatgtaacttacgagaatctttctcaagaagttagtgaagggaaaagaatactattagatgatggtaaaattgaaatgattgttgaaaaagtagatactaaagctaatcttttagaatgtttggttactgtaggtggtgttttatcaaataataaaggtgtaaatttcccagatgttcaattatctgtaaaagcattaacagaaaaagataaagaggatttaaaatttggtttatctgagggagttgactggatagctctgagtttcgtaagaaatccttccgatattaatgaaattaaagatttaataaacaaaaatggtcattcaactccagtagttgcaaaaatagaaaaatttgaagcaatagatcaaattgatgctgtattacctttatgtgatggagttatggttgcaagaggggatttgggagtagaaatgcctgctgaagaagttccacttttacaaaaggatttaataagaaaagctaattcattaggtataccaataattaccgcgactcaaatgcttgattccatggcttctaatccaagaccgactagagccgaagtaagcgatgtcgccaatgcaatactggatggaacagatgcagtaatgctttcaaacgaaactgccgttggcgattatcctgtagaggcagtacaaacgatggcaacaatagcaagaagaattgagagggattatcctcttaaagctattgagagccacttacctagcacgataccaaatgctattagtggagctgtaagtaatatagctagacaactagatgcaggagcaataattcctttaacaaaatcaggttctactgctcgaaatgtaagtaaatttagaccgccaactcctattttggcaactacaactgaaaggagtgtagcgagaagacttcaacttgtttggggagtcaccccgatagtagtaaataatgatgaaagaacagcaaaaacatttagtttagctatgcaaattgctcaagaaatgggaatattaaaacaaggagatttagtcgttcaaactgcaggtacactaactggtataagtggctctacagatttaataaaagttggtttagtaaggaagatactttcaagagggatctcaataggtgaaattggagttacaggtaaagcaagaaaaataaatactaaacttgatttgtcattaatttgccctggcgaaattttatttgttaataaagaattattggaaaatgttccattgagcaaaaatattgcaggtattgttacgaaccaaaatgtagatgatgtttatgccttttttaacaaaaacaataagaagatttctacaatctgtaatgtagaaaacattgataataatcaaattattaatggtgatctagtaactttacagcttaacgaaggtgtaatttatatgggacaaattgaagatgatgaagaagctatagataaatataaatatgtctag

SEQ ID NO: 8566 - protein, 597 aa, Prochlorococcus marinus str. MIT 9312
MSNIDLKRRTKIVATIGPATQSEEIITNLIKAGVTTFRLNFSHGDHNDHAERIKTIREVSQKLDIDIGILQDLQGPKIRLGRFKDGPVKVKKGDKFTLTSNEVECSNTIANVTYENLSQEVSEGKRILLDDGKIEMIVEKVDTKANLLECLVTVGGVLSNNKGVNFPDVQLSVKALTEKDKEDLKFGLSEGVDWIALSFVRNPSDINEIKDLINKNGHSTPVVAKIEKFEAIDQIDAVLPLCDGVMVARGDLGVEMPAEEVPLLQKDLIRKANSLGIPIITATQMLDSMASNPRPTRAEVSDVANAILDGTDAVMLSNETAVGDYPVEAVQTMATIARRIERDYPLKAIESHLPSTIPNAISGAVSNIARQLDAGAIIPLTKSGSTARNVSKFRPPTPILATTTERSVARRLQLVWGVTPIVVNNDERTAKTFSLAMQIAQEMGILKQGDLVVQTAGTLTGISGSTDLIKVGLVRKILSRGISIGEIGVTGKARKINTKLDLSLICPGEILFVNKELLENVPLSKNIAGIVTNQNVDDVYAFFNKNNKKISTICNVENIDNNQIINGDLVTLQLNEGVIYMGQIEDDEEAIDKYKYV

SEQ ID NO: 8567 - DNA, 1437 bp, Rhodospirillum rubrum ATCC 11170
  CDS (1)..(1437): transl_table=11
atgaaacgaaaccgttgcgccaagattctggccaccctcggcccggccacgtcctcggaaagcaccctcgagaccctggttcgggccggtgcggacatggttcgcctgaatttcagccacggcgcccacgaagaacaccggcgccgctacgacgtggtccgcgccgttgaaaacaagctcggccgaccgatcggcatcctgatggacctccagggtccgaagctgcgggtcggtgatttcgtcggcggcaaggtcaagctggaaaccggcgccaccttccgtctcgacatggaaaaggacctgggcaccatccagcgtgtccgcctgccccaccccgaaatcttcgccgccatcggcgaaggcaccgatctgttgcttgacgacggcaaactgcggctgcgggtggaaaccttcggcgccgattacgccattacccgggtgatcaccggcggcgtgctgtcggaccacaagggcctcaatgtgcccaatgccgttctgccgatctcggcgctgaccgaaaaggaccgccgcgacctgcagttcggcctcgacctcggggtcgattgggttggcctcagcttcgtgcagcgccccgaggacgtggccgaggcgcgcaagctgatcggcggtcgcgccgccatcatcagcaagatcgaaaagcccgccgccctcgaccatctcacccatatcatcgaattgtccgacgccctgatggtcgcccgcggcgatctgggcgtggaagtgccgcccgagcgcgtgccgatcttgcaaaagcgcatcctggccgcctgccacctcgccggcaagccggtggtggtcgccacccagatgcttgaaagcatgatcaacgccccgacgccgacccgcgccgaggcctcggacgtggcgacggccatctatgatggcgccgatgcggtgatgctgtcggcggaaaccgccgtcggccagtatccggtcgaagccgtggcgatgatggacaagatcatccagcaggtggaaaccgacgagcattatcagtatctgcgcaatgcccgccgcgaaagccccgagggcacggccgccgacgccatcagcgccgccgccagtcaggtggccgagaccatcaaggccgccgccatcgtcacctatacctcctcgggatcgacgacgctgcgcgccgcccgccagcgccccggcgtgccgatcctttgcctgaccaccaacccccgcatcgcccgacggatggcgatggtctggggcgtccattcggtgctcgacaaggacatctccaacttccaggaaatggtcgaactggcggtcaaggccgcctatcgcgaaggcttcgccaatatcggcgagcgcatcgtgatgacggcgggcgtgccctttggcaccccgggcacgaccaatgttctgcgaatcgcctgggtcgaaggcgatgacagctgggcggaataa

SEQ ID NO: 8568 - protein, 478 aa, Rhodospirillum rubrum ATCC 11170
MKRNRCAKILATLGPATSSESTLETLVRAGADMVRLNFSHGAHEEHRRRYDVVRAVENKLGRPIGILMDLQGPKLRVGDFVGGKVKLETGATFRLDMEKDLGTIQRVRLPHPEIFAAIGEGTDLLLDDGKLRLRVETFGADYAITRVITGGVLSDHKGLNVPNAVLPISALTEKDRRDLQFGLDLGVDWVGLSFVQRPEDVAEARKLIGGRAAIISKIEKPAALDHLTHIIELSDALMVARGDLGVEVPPERVPILQKRILAACHLAGKPVVVATQMLESMINAPTPTRAEASDVATAIYDGADAVMLSAETAVGQYPVEAVAMMDKIIQQVETDEHYQYLRNARRESPEGTAADAISAAASQVAETIKAAAIVTYTSSGSTTLRAARQRPGVPILCLTTNPRIARRMAMVWGVHSVLDKDISNFQEMVELAVKAAYREGFANIGERIVMTAGVPFGTPGTTNVLRIAWVEGDDSWAE

SEQ ID NO: 8569 - DNA, 1749 bp, Moorella thermoacetica ATCC 39073
  CDS (1)..(1749): transl_table=11
atgcggcacacgaagattgtctgtaccatgggcccggccagcgagcgggtcgaggtaatcaaggctatgatccgggcggggatgaacgtagcccggttcaatttttcccatggcagccacgccgagcacggggcgcggatggctgccgtgcgccaggcggcagctgaactgggcgccagggtagcgttaatgctggataataaggggcccgaaattcgcctgggagagatccagggcgaggtcaccctgaaggacggcgaccaggtgaccctgaccacagaacctattattggtgacgccaggcgtttgccggtgagctttgccggtctgccgggggacgtccggccgggccagatcattctcctggacgacggcctggtggagctggaggtcctggcgaccaccgccaccgagattcactgccgcgtccgtcacggcgatgttatttccagccataagggcgtcaacgtccccggggccgagatcagcctgcctccttttaccgagcaggatattaaagaccttgagttcggcctccagcaggggatagattttatcgccctctcctttgtccggacggccggggatgtcctggcagtacgccgggagcttgagaagcgcaacgccagggtagccattatcgccaagatagaaaaccatgccggggtcaataacatccacgagatccttgaggtggccgacggggtcatggtggcccggggtgacctgggggtagagatccccgtggaagaggtccccctggtgcagaaaaagattatcgaggcgtgtaacctggccggcaagccggttatcacggccacccagatgctggagtctatgattcataacccgcggccgacccgggccgaagccagcgatgtggccaatgccatctttgacggaacggatgccattatgctctccggggaaacggctacgggccgttatccggtagaggctgtggcgaccatggcccgcatcgcccgccgggccgagaggggtttgccctatggtgacctgttgacgaaaaagggtctggctgccgagcggacggccaccgatgccatcagccacgcgagctgcaccattgcctatgaactcgacgccgccgccattatcacccccacggcttccggttccaccgcccgccgggtggccaaataccgtccccgggcgcctatcctggccaccagccccaacgagaaggttttgaaccagctctgcctggtctggggggttgaacccctcctggtggagccgacaagcggcaccgacgaaatggttaatgccgcggtggcggcggccatactctccggccgggtgaaacagggcgacctggtggttattactgccggcgtgcctgccggtgttccgggtaccaccaacctcctcaaggtccacatcgtcggcgaggtcctggtgcggggacgggggatcggcaaagaagtaaccagtggcccggtccggctggtaaagactgctgctgacgccgtggcaagggtcaaaaaaggcgacattctggtgaccactgagaccggccctgaattcctgccagctatggaaagggcggcagcagtaattacggaaaccggggggctgagttcccatgccgcggtaaccggcctgagcctgggtataccggtagtcgtcggggcaaagggggccactgaaaagctaaccgatgatctggtcgtaaccatagacgttgtccgcggcctggtctaccgcggtcagacgcgggtgttgtga

SEQ ID NO: 8570 - protein, 582 aa, Moorella thermoacetica ATCC 39073
MRHTKIVCTMGPASERVEVIKAMIRAGMNVARFNFSHGSHAEHGARMAAVRQAAAELGARVALMLDNKGPEIRLGEIQGEVTLKDGDQVTLTTEPIIGDARRLPVSFAGLPGDVRPGQIILLDDGLVELEVLATTATEIHCRVRHGDVISSHKGVNVPGAEISLPPFTEQDIKDLEFGLQQGIDFIALSFVRTAGDVLAVRRELEKRNARVAIIAKIENHAGVNNIHEILEVADGVMVARGDLGVEIPVEEVPLVQKKIIEACNLAGKPVITATQMLESMIHNPRPTRAEASDVANAIFDGTDAIMLSGETATGRYPVEAVATMARIARRAERGLPYGDLLTKKGLAAERTATDAISHASCTIAYELDAAAIITPTASGSTARRVAKYRPRAPILATSPNEKVLNQLCLVWGVEPLLVEPTSGTDEMVNAAVAAAILSGRVKQGDLVVITAGVPAGVPGTTNLLKVHIVGEVLVRGRGIGKEVTSGPVRLVKTAADAVARVKKGDILVTTETGPEFLPAMERAAAVITETGGLSSHAAVTGLSLGIPVVVGAKGATEKLTDDLVVTIDVVRGLVYRGQTRVL

SEQ ID NO: 8571 - DNA, 1428 bp, Syntrophus aciditrophicus SB
  CDS (1)..(1428): transl_table=11
atgaagatttcttcaccgaagacgaagatcgtctgcaccatcgggccggcgtctgagaatcccgacgtgatgaaacagatgatcgaagcgggaatgaacgtcgcccgactcaacttctcccatggcgacttcgcgtcccacgggaaagtcatcgggaatctgcgggctgtgtcggcattgctcggccggaggatcgcaatcctggccgatctttccggtccgaagatgcgtatcggaacgtttgcatccgaaccgatccaactcgatacgggtgacctgttcacgctgacgaccgaggacatcgtcggtgaccggaatcgagtgtccgtctcattcgatcgccttccgaagtctgtaagacccggggacatgctttttctcaatgacggatacattcagctcaaggtgaacgaggccaggggcaatgatgtcttatgcagcgtcatggtcggcggcgaacttcgttcccgcaagggactcaatctgccgggcatcgatctcgggatcagcgcttttaccgaacgtgatcgtgagtgcctgcagtttgccctcgagaacggggtggacgccgtgagccagtccttcgtcgaaggaccggaggatgtcgaggccgtgcgcagggccgccgcagacatgggatacactcccttcgttatcgcgaagatcgaacggtccggggcgcttgatcgcattgaggagatcatcgccgcagccgacggcatcatgatcgcccgcggcgacctgggtgttgaagttccgatcgaacagatcgccatggtccagaagcgggttatgctccttgcaaacatgtgcgcgaagcccgtcattacggcaacacagatgctcgagtcgatgacggaaaatcgacgccctacccgcgccgaggcaaccgatgtggccaacgcgattcttgacggcaccgactgcgtcatgctttcaggcgaatccgccatggggaggtatcctgtggaagctgtcgggatgctggcgaaaatagccctttcggcggaagcgcaccgctccatgatcgcggtcaaagagatgttcaagggaatcgatcttcgagggagggttcgtctggaacatctcattgcgatcggcgtagaggcgtgcttcgaatttgtgacaccggcggccgtgtttgtcccgacgcgaagcggcgccacggcgcggagcatggccagattccgctttcccgtatggactgtggccgtgagttccgaagaatcgacctgccaggaactccttttctcctcaggggtttatccggtgcgcgagcttcccatgcctgagaactggaatgattatgtcaaaaggcaagtcgctgatcttggtctggaaggaaaaatcgcaattctgacccggggtccgtcgcgggagcattccgagacgaatcacggcgtggaaattctcgacctgaccatttga

SEQ ID NO: 8572 - protein, 475 aa, Syntrophus aciditrophicus SB
MKISSPKTKIVCTIGPASENPDVMKQMIEAGMNVARLNFSHGDFASHGKVIGNLRAVSALLGRRIAILADLSGPKMRIGTFASEPIQLDTGDLFTLTTEDIVGDRNRVSVSFDRLPKSVRPGDMLFLNDGYIQLKVNEARGNDVLCSVMVGGELRSRKGLNLPGIDLGISAFTERDRECLQFALENGVDAVSQSFVEGPEDVEAVRRAAADMGYTPFVIAKIERSGALDRIEEIIAAADGIMIARGDLGVEVPIEQIAMVQKRVMLLANMCAKPVITATQMLESMTENRRPTRAEATDVANAILDGTDCVMLSGESAMGRYPVEAVGMLAKIALSAEAHRSMIAVKEMFKGIDLRGRVRLEHLIAIGVEACFEFVTPAAVFVPTRSGATARSMARFRFPVWTVAVSSEESTCQELLFSSGVYPVRELPMPENWNDYVKRQVADLGLEGKIAILTRGPSREHSETNHGVEILDLTI

SEQ ID NO: 8573 - DNA, 1416 bp, Frankia sp. CcI3
  CDS (1)..(1416): transl_table=11
gtgccccgtagagccaagattgtttgtaccctcggccccgcgaccagctcgccagagaaggtccgggccctcgtcgacgcgggaatggacattgcccgactaaacttctcccacggaacacacgaacagcatgccgtcacttacgcgcgggtgcgcgaggccgcggaggcggccggccgcagcgtcggcacgctcgccgacctccagggaccgaaaatccggctggggaacttcgccgacggcggggtcaccctgctgcccggtcagcggttcaccgtcacgatccgcgatgttcccggcgatcagcatcaggtcggcacgacctacccgggcctgccgggcgacgtcgcggccggggatcgcgtcctggtcgacgacggccgcctggtcctgcagatcgacggggtgactgacaccgacgtccacaccacggtcgttgtcggcgggccggtgagcgaccacaaggggatgaacattcccaacgccgcgctcaccgtcccggcgctcaccgagaaggacgccgctgacctgcggttcgctctcaacctcggggtggacatggtcgcactgtccttcgtccggagcgccgtggacgccgcggcggtgcatgcgatcatggatgaggtggggatccgggttccggtccacgccaagatcgagaagccgcaggcggtcgccgaactcgacgagatcatcgaggcgttcgacggtctgatgatcgcccgtggcgatctcggggtcgagctgccgctcgaggacgtgccgctcgtgcagaagcgcgccgtcagccaggcccgggagcgggccaagccggtgatcgtcgcgacccaggtgctcgagtccatggtcagcgcgccgcggccgacccgtgccgaggccagtgactgcgccaacgccgtcctggacggcgctgacgcgatcatgctgtcggcggagacgagcgtcggtgcctaccccatcgaggccacggccaccatggcgcgcatcatcgagaccgccgaggccgacctcggccggataccgcccctgcggaccgaaccgcgcacgctcggtggggcactcgcccaggccgccgcgtcggtaggagccgcggtcggcgcccgttacctcgtggcccacaccctcagtggtgacacggcccggcgactcgcccggtaccgtaccgaggtcccggtgctggccttcacgccgattccggctgtccgcaaccagatggcgctcttctggggcgtggaaaccttcctcgtgccgttcgcggacagcacggacgagatggtccgccaggtcgacagcgccctcttccatattggccgatgcaagccgggtgaactggtggtcgtcgtcgccgggacgccgccgggcgtggccggcatgaccaacatgatgcgggtccatcgcatcggggaggccatctga

SEQ ID NO: 8574 - protein, 471 aa, Frankia sp. CcI3
MPRRAKIVCTLGPATSSPEKVRALVDAGMDIARLNFSHGTHEQHAVTYARVREAAEAAGRSVGTLADLQGPKIRLGNFADGGVTLLPGQRFTVTIRDVPGDQHQVGTTYPGLPGDVAAGDRVLVDDGRLVLQIDGVTDTDVHTTVVVGGPVSDHKGMNIPNAALTVPALTEKDAADLRFALNLGVDMVALSFVRSAVDAAAVHAIMDEVGIRVPVHAKIEKPQAVAELDEIIEAFDGLMIARGDLGVELPLEDVPLVQKRAVSQARERAKPVIVATQVLESMVSAPRPTRAEASDCANAVLDGADAIMLSAETSVGAYPIEATATMARIIETAEADLGRIPPLRTEPRTLGGALAQAAASVGAAVGARYLVAHTLSGDTARRLARYRTEVPVLAFTPIPAVRNQMALFWGVETFLVPFADSTDEMVRQVDSALFHIGRCKPGELVVVVAGTPPGVAGMTNMMRVHRIGEAI

SEQ ID NO: 8575 - DNA, 1455 bp, Novosphingobium aromaticivorans DSM 12444
  CDS (1)..(1455): transl_table=11
gtggccaagctcgatcctcgcggacgcaaggtaaagatcctcgccacggtcggccctgccagccgcgatccggaaatgctcgaaaagctgttccgcgccggcgccgacgccttccgcgtcaacatgagccacggcgaacacgcgattcacgccgagaccatcgccaacatccgcgcgctggaaaagaaggtgaaccggccgatcacgatcctgtgcgacctgcaggggcccaagcttcgcgtcggcaagttcaaggacggccgcgcggtcatccgccattcgggccacttcacgctcgatcgcaatcccgagccgggcgatgaaacccgcgtctgcctgccgcatcccgaactgttcggcgttcttcacaagggccagcgcctgctgatcgacgacggcaagctgcggctgcgggtgatccgcgccgacgagaacgagatcctctgttcggccgaagtcggcggcgtcatttccgatcgcaagggcgtcaacgttcccgatgcggtggtgcccgttcccgcgctgaccgacaaggatcggcgcgacctgtcgttcgcggttgagcagggggcggactggatcgcgctgtcgttcgtccagcggcccgaggacgtggccgaggcgcggcgcctgctgggcggccacggctcgctcatggccaagatcgaaaagccggcggcgatttcccggcttgaagagatcgtcgagctttcggacggcatcatggtcgcccgcggcgaccttggcgtcgagctgaaccctgaagaggtgccgccgctccagaagcgcatcgtcgaaaccgcgcgccgccagggcaagccggtggtcgtcgccacgcagatgctcgaatcgatgatcgaagcgccgacgccgacccgcgccgaagtttcggacgtcgccaatgcggtctatgacggcgccgacgcggtgatgctctcggccgaaaccgccgccggtgcctggccggaagaggcggtcaccatcatgcaccgcatcgccgcgcaggtcgaagccgatccgggctatggcgcgcgcgtccacttcttagagacgcttcccgatccgaccaccgccgacgcccttgcgcaggctgcggcgagcatcaccgagaccttgccgatttccgggatcatcgtgtttaccggatcgggttccaccgctcgccgcgtggcgcgcgaacgtcccggcgtgccgatgctcgtgctcacgccttcgcacaagacggcgcgcaaggtcgggctgctgtggggcgcccatgccgtcagcaccaaggacatcggcagcttcgaggagatgatcgccaagggcaagcgcatggcgctgcgccacggcttcggctcggccggatccaagctcgtcgcgctggcgggtgttccgttcggcacgccgggggcgaccaacctgctccacgtggtgacgcttaccggcgacgaactcacccgccacggcgaatga

SEQ ID NO: 8576 - protein, 484 aa, Novosphingobium aromaticivorans DSM 12444
MAKLDPRGRKVKILATVGPASRDPEMLEKLFRAGADAFRVNMSHGEHAIHAETIANIRALEKKVNRPITILCDLQGPKLRVGKFKDGRAVIRHSGHFTLDRNPEPGDETRVCLPHPELFGVLHKGQRLLIDDGKLRLRVIRADENEILCSAEVGGVISDRKGVNVPDAVVPVPALTDKDRRDLSFAVEQGADWIALSFVQRPEDVAEARRLLGGHGSLMAKIEKPAAISRLEEIVELSDGIMVARGDLGVELNPEEVPPLQKRIVETARRQGKPVVVATQMLESMIEAPTPTRAEVSDVANAVYDGADAVMLSAETAAGAWPEEAVTIMHRIAAQVEADPGYGARVHFLETLPDPTTADALAQAAASITETLPISGIIVFTGSGSTARRVARERPGVPMLVLTPSHKTARKVGLLWGAHAVSTKDIGSFEEMIAKGKRMALRHGFGSAGSKLVALAGVPFGTPGATNLLHVVTLTGDELTRHGE

SEQ ID NO: 8577 - DNA, 1437 bp, Francisella tularensis subsp. holarctica
  CDS (1)..(1437): transl_table=11
atgagaagaacaaaaattttagctactcttggtcctgctagtgaatcaagagaagctctaacagagatgattaaagcaggggttaatgcagttagatgtaatttttcgcatggctctgctgaagatcatcgcaaaagagttgatttaattcgtcaaatcgcaaaagagcaagatacacatgttggtattttagctgatttacagggaccaaaaatcagattatcaaaatttaaaaatggttccgtagaaattaagaaaggtcaaaaatttacactggatgctgatcttggtattaatgatggtgatgagaatactgtagggattgactataaagaactcattcaagatgtaaaaaaaggcgatatactacttgtagatgatggcaaaattgtcttagaggttgattctgtaaaaggaaataaggcagtcactaaagttgtcgttggcggtaaagtttctaataataaaggcatcaataagaaaggtggcggacttacagcacctgcacttactgagaaagacaaagaagatataaaaatagctgcgatgctacaagtggatttcttagcggtatcatttgtcagagatggtaaggatatggagtatgcacgtcaacttgtccacgaagccggttggagacctgctatggtggctaaaattgagcgtgcagaggctgtcttggaagataaccttaagagtattgttgatgcttctgaccttgtaatggtagcgcgtggtgatttggctgttgaaattggtgatgagaatgtgccaactatacagaagcttattatcaatacagctagacgaaatgaaaaaggttctattactgctacacaaatgatggagtcgatgatagagaactcttcaccaactcgtgctgaagcatctgatgttgctaatgctgtttttgatggcacagatgctgtaatgttatcagctgaaacagcggtaggtaaatatcctgttgaaacagtttctgcaatgtcaaggatatgtaaatctgctgaaaaaagtaagtatacacatatttctaaaaagcaaaaaatagctgattgtgataggattgatcatgctgtatctgttgcagcagtcaaaatagctaacgatattggagctaaaggattaattgtattgacagagggtggtaatacttcgcgttggatgtcacgaataaatactgatttacctatttacgcattatcaagaaacgcaacaactttaggtgcgatgacattatttagaggtgtggtaccaatatactttgattcaactagaatgtctaagttgtatgtaaatagatcagcttgtatggagctagagagcagaaatttagccaaagatggtgatatttttgtgcttactagtggcgatagtatgggtgtacatggaagcactaataagattaaagtgataattgcaggtcaggtaagataa

SEQ ID NO: 8578 - protein, 478 aa, Francisella tularensis subsp. holarctica
MRRTKILATLGPASESREALTEMIKAGVNAVRCNFSHGSAEDHRKRVDLIRQIAKEQDTHVGILADLQGPKIRLSKFKNGSVEIKKGQKFTLDADLGINDGDENTVGIDYKELIQDVKKGDILLVDDGKIVLEVDSVKGNKAVTKVVVGGKVSNNKGINKKGGGLTAPALTEKDKEDIKIAAMLQVDFLAVSFVRDGKDMEYARQLVHEAGWRPAMVAKIERAEAVLEDNLKSIVDASDLVMVARGDLAVEIGDENVPTIQKLIINTARRNEKGSITATQMMESMIENSSPTRAEASDVANAVFDGTDAVMLSAETAVGKYPVETVSAMSRICKSAEKSKYTHISKKQKIADCDRIDHAVSVAAVKIANDIGAKGLIVLTEGGNTSRWMSRINTDLPIYALSRNATTLGAMTLFRGVVPIYFDSTRMSKLYVNRSACMELESRNLAKDGDIFVLTSGDSMGVHGSTNKIKVIIAGQVR

SEQ ID NO: 8579 - DNA, 1734 bp, Desulfitobacterium hafniense Y51
  CDS (1)..(1734): transl_table=11
atgcgccgcaccaaaatagtatgtaccatcggaccgtccagtgaatccaatgagaagattcgccaattacttaaggccggcatgaatgtagcccgtttaaatttctctcatggaacccatggtgagcatggcaagcggatacgaaccttaagagaagaagcacagaaactcggtgttcatttaggggttcttctggataccaaaggcccggaaatcagaacgggaacggttccggaggagggagttcaattaaacagcggtgatacctttattcttgataccgatctatcgactctggggtccgcagagcgggtgggtataacctaccttcagctttggcaggaggttcatcagggtacgcatatccttcttgatgatggtctcatcgaccttgaagtcattgccagtgaggaaggaaagatcatcaccaaaatccaaaatggcggagttcttaaatcgaaaaaaggggtcaatgtgccaggtgttccgattcagctgccggcgattacggaaaaagatcgtgatgatatcatctttggcttaagggaaggaatcgactttattgctgcttcttttgcccgcaaggctgccgatattttggccgtaaggcgtttggttgaggaagaaggggccaatgtcaagattatcgctaagattgaaaaccgcgaaggtatcgagcatttagatgagatcctggaggttgccgacggtctgatggtagcccgcggggatctgggagtggaggtgcctgtagaagaggtccccattcatcaaaaggacatgattgaaaaatgccatcatctgggtaaacccgtcatcgtggctacacagatgctggattccatgatccgcaacccgcggccgacccgggcggaagccagtgatgtggctaatgccattttagacggtaccgatgccatcatgctttccggggagacggctgccggacagtatccggtagaagctgtggagatgatgaataagatagctctgcagatcgaaaaacattatgaaccgcggaagatttatgacccccatatcaatattgccgaagccatcagtcatgccagctataccgtagccagagatctggaggcggccgctattcttactcctactcattccgggttgacggcccgcatgatctccaagtaccgtcccacctccctgattattgctgccacaccttttgttcatgtagcccgccaactctctttgacctggggaatttatcctttgctgattcccgagagcttaggcacggatcagcttttatctgtttctgtgaatgaagcgatttcccatcacctgatcaagaccggtgatgtggttgtcattaccgcaggggttcccgttggtaaagtagggaccaccaatatcatcaaagttcaggtcatcggggatgtgatcgcgaaaggaacggggattggccgcaaagcttattccggaacggcacggatagccacttcggctgctttggagcttttccaaaaaggagatatcctggtagcgccttataccgataaagagctgatccccttaatcgccaaagccggggcaattctggtggaagaagggggactcacctcccatggggcgatagccgccttaaactatggcattccggctattgtcggtgccgccgatgtgctgatgaaggttaaggatgggcaagtgctgactgtggatgctttggcaggtgtggtctatgagggcaccgtcagtattatctag

SEQ ID NO: 8580 - protein, 577 aa, Desulfitobacterium hafniense Y51
MRRTKIVCTIGPSSESNEKIRQLLKAGMNVARLNFSHGTHGEHGKRIRTLREEAQKLGVHLGVLLDTKGPEIRTGTVPEEGVQLNSGDTFILDTDLSTLGSAERVGITYLQLWQEVHQGTHILLDDGLIDLEVIASEEGKIITKIQNGGVLKSKKGVNVPGVPIQLPAITEKDRDDIIFGLREGIDFIAASFARKAADILAVRRLVEEEGANVKIIAKIENREGIEHLDEILEVADGLMVARGDLGVEVPVEEVPIHQKDMIEKCHHLGKPVIVATQMLDSMIRNPRPTRAEASDVANAILDGTDAIMLSGETAAGQYPVEAVEMMNKIALQIEKHYEPRKIYDPHINIAEAISHASYTVARDLEAAAILTPTHSGLTARMISKYRPTSLIIAATPFVHVARQLSLTWGIYPLLIPESLGTDQLLSVSVNEAISHHLIKTGDVVVITAGVPVGKVGTTNIIKVQVIGDVIAKGTGIGRKAYSGTARIATSAALELFQKGDILVAPYTDKELIPLIAKAGAILVEEGGLTSHGAIAALNYGIPAIVGAADVLMKVKDGQVLTVDALAGVVYEGTVSII

SEQ ID NO: 8581 - DNA, 1443 bp, Saccharophagus degradans 2-40
  CDS (1)..(1443): transl_table=11
atgttcagacgtaccaaaattgttagcacacttgggccagcaaccgacgagcccggtattttagaaaaacttattcttgcaggtgttaacgtagtacgtctgaatttctcccacgggagtccggaagatcacaagcgtcgtgcagatgaagtacgcagcttggccgctaagcacggtaagtttgttgcagtattgggcgaccttcaaggccccaaaattcgtattgctcgttttgcagatggcccaatcagcttggctgttggtgacaagtttcttttggatgcgagcttagagcgtgatgcaggtaaccagcatcaagtgggcatcgactataaagaattgccaaacgacgtaaacccaggcgacagcttattgctggatgacggccgtgttgtgttgaaagtactttctgttgaaggcactaaagttcacacggaagtaacggttgctggcaagctttcaaataacaaaggtattaaccgtcaaggtggtggcttaacagcgccagcacttaccgataaagaccgtgcagacattaaaactgctgttgctatcgatgttgattacttggctgtgtcgttcccacgcagtgcagaagacatgaatcttgctcgtcagttagttgtagaggccggcggcaatatccacctagttgctaaaattgaacgcgctgagtcagtagaaaaccaagaagtattggatgacctcattcgcgcttcagacgcagtgatggttgcccgtggtgacttaggtgttgagattggcgatgccgctttgattggcatgcaaaagcttattatcgaacgtgctcgtgctttaaaccgttgcgtaattactgcgactcaaatgatggagtccatgattagcagcccattaccaactcgcgcagaagtattcgacgtggctaacgccgtgttggatggtaccgatgctgtgatgttgtctgctgaaactgcagctggccaattccctgtgcaaacagttgaggcgatggtacgtgtgattcttggtgcagaaaaacacccacgtgcggaaactcgtcctgttcgtgcagacggcgactacagtgctattgacgaatctattgcattggcagctatgtacacagcacaccaattgaaaggtgttaagtgtattgccagcatgactgaatctggttcaactccaatgttgatgtcgcgctttggtgctcgtttgccaattttcgcattctctcgcgatattcgtacattgcgtcgcgcggcattgttccgcggtgttcaaactattttgtttgataacaacgctatcccaccgggtgaaatgtatgatcgtgcattagaaatcatgcgcgagcaaaagattatcgaagatggcgaccttgtgattctttctaaaggtgacactagcgagcacggtggaaccaacaccatgaagattcttcaggttggttcaactaactaa

SEQ ID NO: 8582 - protein, 480 aa, Saccharophagus degradans 2-40
MFRRTKIVSTLGPATDEPGILEKLILAGVNVVRLNFSHGSPEDHKRRADEVRSLAAKHGKFVAVLGDLQGPKIRIARFADGPISLAVGDKFLLDASLERDAGNQHQVGIDYKELPNDVNPGDSLLLDDGRVVLKVLSVEGTKVHTEVTVAGKLSNNKGINRQGGGLTAPALTDKDRADIKTAVAIDVDYLAVSFPRSAEDMNLARQLVVEAGGNIHLVAKIERAESVENQEVLDDLIRASDAVMVARGDLGVEIGDAALIGMQKLIIERARALNRCVITATQMMESMISSPLPTRAEVFDVANAVLDGTDAVMLSAETAAGQFPVQTVEAMVRVILGAEKHPRAETRPVRADGDYSAIDESIALAAMYTAHQLKGVKCIASMTESGSTPMLMSRFGARLPIFAFSRDIRTLRRAALFRGVQTILFDNNAIPPGEMYDRALEIMREQKIIEDGDLVILSKGDTSEHGGTNTMKILQVGSTN

SEQ ID NO: 8583 - DNA, 1443 bp, Methylobacillus flagellatus KT
  CDS (1)..(1443): transl_table=11
atggcattacgtaaaacaaaaattgtggcgacgctggggccggcttccagtgaggaggcggtgattgagcggctggtggatgccgggatggatgtagtgcgactcaatttttcgcatgggtctgcgcaagaccatattgcccgcgccgagttggtgcgcgatatctcccgtcgcagcgggcggccagtgggggtattgtgcgacctgcaggggccgaagattcgtatcggcaagttcgaaaatgaccgcatcctactgaaggccggcgacaggttcatcctcgacgcggcgtgcaagttgggcaaccaggagcgggtggggttggattacaagacgctgccatccgaagtggagcctggtgcggtgttgctgctggatgacgggcgcattgtgctcaatgtcgaagcggtgaacggcggcgaggtgcattgcacggtggcggccggtggagtgctgtcgaacaataagggcatcaatcgtaaagggggagggctttctgcgccagcgttgacgctgaaggatcaggaagatatccggacggcagtggcattggaggcagactatatcgctgtttcgttcccgcgcagcggtgcggatatcgagctggcgcgccacttggtcagggaggcaggcggccatgcggcgattgtcgccaagatcgagcgcgcggaggcgatagatgcgctcgaagagattatcgatgctgctgatgtgatcatggtggcgcgcggcgacctcggcgtcgaggtgggcgatgcggcggtgcccggcttgcagaagcgcatgatccgcacggcgcgcatgcgcaacaagctggtgattacggcgacgcagatgctggagtccatgatcagcagcccgatcccgacccgggcagaggtatccgatgtcgcgaatgccgtgctggatggcaccgatgcggtgatgctttccggcgagacggctgtggggcattatccggtcgagtccatccaggccatgcaccgtgtctgtctggaggcggagaaggagtatgatagccatcatcttcaggcgccgatcaatgatgaattcgagttcatcgatgaggcgattgccatggcatcggtgtatgcggcagaacatttgaatgtgaaggcgattgctgccctgacaaagtcgggttcatctgtcacctggctgtcacgctcgaatacgaatgtgccgatttatgccttgacgacagaacgcgacacaagacgcaagctgacgttgtaccggggggtctatccttatcatgtggagtttgctagccaggaactgagcaagatactctacgatgcagaggaaacgctattgcggctgggcgctgtgcagcgcggcgatctcatgatgctgaccttcggcgagccgatcggcaaggcgggcggcaccaataccctgcagatcgtcagagtaggcgagcacaggcgcgagcggcactga

SEQ ID NO: 8584 - protein, 480 aa, Methylobacillus flagellatus KT
MALRKTKIVATLGPASSEEAVIERLVDAGMDVVRLNFSHGSAQDHIARAELVRDISRRSGRPVGVLCDLQGPKIRIGKFENDRILLKAGDRFILDAACKLGNQERVGLDYKTLPSEVEPGAVLLLDDGRIVLNVEAVNGGEVHCTVAAGGVLSNNKGINRKGGGLSAPALTLKDQEDIRTAVALEADYIAVSFPRSGADIELARHLVREAGGHAAIVAKIERAEAIDALEEIIDAADVIMVARGDLGVEVGDAAVPGLQKRMIRTARMRNKLVITATQMLESMISSPIPTRAEVSDVANAVLDGTDAVMLSGETAVGHYPVESIQAMHRVCLEAEKEYDSHHLQAPINDEFEFIDEAIAMASVYAAEHLNVKAIAALTKSGSSVTWLSRSNTNVPIYALTTERDTRRKLTLYRGVYPYHVEFASQELSKILYDAEETLLRLGAVQRGDLMMLTFGEPIGKAGGTNTLQIVRVGEHRRERH

SEQ ID NO: 8585 - DNA, 1440 bp, Ralstonia metallidurans CH34
  CDS (1)..(1440): transl_table=11
atgacacgttccaccaagatcgtcgccacgattggccccgcatccagcacgctggaagtgttgacccgcatgatcggagcaggggttgacgtggtgcgcctgaacttctcgcatggcaccgcgcaggaccatatcgatcgcgccgccctggtgcgtgaggcggcggcggcctgcgggcgcgaggtggccatcatggccgacctgcagggccccaagatccgcgtgggcaagttcgagaacggcaagatcacgctcaagccgggcgacgcgttcatcctcgattcggcctgccagatgggcaatcaggagcgcgtgggcctggattacaaggatctgccgcgcgatgtgggcccgggcgacctgctcctgctcaacgacggcctgatcgtgctggtggtggaccgcgtgctcggcaacgagatcttcaccacggtgcgtatcggtggcgagctgtccaacaacaagggcatcaatcgtcagggtggcggcctgtcggcgccggcgctgaccgccaaggacatggaggacatcaagaccgccatggcgctgggcgcggactacgtggccgtgagcttcccgaagaacgccactgacatggaaatggcccgccagctcaccaacgtggcaggccagccgcacaaccacaaggcgcgcatgatcgcgaagatcgagcgggccgaggcgattcgtccgggcgtgctcgaggaaatcctgctggcgtcggacggcatcatggtggcgcgcggcgatctggccgtcgaagttggcaacgccgccgtgcccgcgctgcagaagcgcatgatcaagctggcccgcgaggccaacaagctgacgatcaccgccacccagatgatggagagcatgatcgtcaacccggtgccgacgcgggccgaagtgtccgacgtggccaacgccgtgctcgatggcaccgacgccgtgatgacgtcggccgagaccgctgccggccgctatccggtggaaacggtcgaagccatggccgcgatctgtctggaagccgagaagtcggaggtggtgcagctcgacaccgacttcctgaaccagaccttcgcgcggatcgaccagtcgatcgcgatgggtgcgctgttcaccgcctatcatctaggtgtcaaggcgatcgcggcgctgaccgattccggcgccacggcgctgtggatgagccgtcaccgcattcatgtgccgatctacgcgatgacgccgaacctggcgtcgcaacgcaagatgcagctctatcgcaatgtggtgccgctgccgctgcagtcgagcgcggaccgcgacgtggcgcttgagcaggccgaggaactgctgctgtcccagggcgtggtgcagcgcggcgatttcatcgtgctgacgatcggcgagccgatgggccagcccggcggcacgaatacgctcaagatcgtgagggtgggcacccggtag

SEQ ID NO: 8586 - protein, 479 aa, Ralstonia metallidurans CH34
MTRSTKIVATIGPASSTLEVLTRMIGAGVDVVRLNFSHGTAQDHIDRAALVREAAAACGREVAIMADLQGPKIRVGKFENGKITLKPGDAFILDSACQMGNQERVGLDYKDLPRDVGPGDLLLLNDGLIVLVVDRVLGNEIFTTVRIGGELSNNKGINRQGGGLSAPALTAKDMEDIKTAMALGADYVAVSFPKNATDMEMARQLTNVAGQPHNHKARMIAKIERAEAIRPGVLEEILLASDGIMVARGDLAVEVGNAAVPALQKRMIKLAREANKLTITATQMMESMIVNPVPTRAEVSDVANAVLDGTDAVMTSAETAAGRYPVETVEAMAAICLEAEKSEVVQLDTDFLNQTFARIDQSIAMGALFTAYHLGVKAIAALTDSGATALWMSRHRIHVPIYAMTPNLASQRKMQLYRNVVPLPLQSSADRDVALEQAEELLLSQGVVQRGDFIVLTIGEPMGQPGGTNTLKIVRVGTR

SEQ ID NO: 8587 - DNA, 1530 bp, Acidobacteria bacterium Ellin345
  CDS (1)..(1530): transl_table=11
atgactttctcgtataacgccttcaccgagcccgccggcgaacacaccgccactcatcgccgtgccaagatcgtttgcaccatcggccccgcctgcaataccgaggccgcgatgcaggagctgatgcgcgccggcatggacgtcgctcgcttgaatttttcgcatggtacgcacgacgagcatctcgtggtcatccagcgcctgcgtaaagttgcggccgaggagcagcgctctatctgcatcctgcaagacctgcaaggtcccaagatccgcaccggattgctcaaagatcacaagcccgtgatgctcgaaaccggcaacacggtcacgatcacgccgcgcgacattgtcggcgatgcctcgctgctcgcaaccacctttcaaaccctcgccctggatgtgcagcctggctcgcgcatcctgctctccgacggcaagattgaactcagcgtcagtcgcatcgaaggcgccgatgtcgagtgccacatcgtgaacggcggcgaactcaaggagcaccagggcatcaacattcccggcgcgatcctcagcattcctgcgctcaccaataaagacctcgaagatctcgcgttcggtctgaaaaacggcgtggatgccgttgccatctcattcgtgcgcaccgccaacgatctcaagcaagtgcgcaacgcgatctccgagcaccagggcaatgtcttcgtcatcgctaagctcgaaaagccccaagctatcgagcacttggaagagatcttcaatgagaccgacggtgtcatggttgcgcgcggcgatctcggcgtcgaagtgccgcccgaaaaagtgccagtccttcagaagcacatcatcaagcgctcgcagagccgccgcattcccgtcatcaccgcgacacagatgctggagtctatgatcgacaatccgcgcccaacgcgcgccgaagccagcgacgtggccaacgccatcttcgacggcaccgatgccgtcatgctctcgggcgagaccgccagcggcaagtatccccgcgaagccgtggcgatgatggcacgcatcattacggaagccgagtcgcactgcctcgccgagggccgtcgccgccgtcacgaagaccacaagaacaccatctctgaggccgtgtgcgatgcggtttcgcacgccgccgaagacctcgacatgctcgcgatcgccatctataccgaatcgggcaacacggcgcgcatcctctccaagcatcgccccaagccgccgatctacgccttctcgcacctcgacaccgtgatcaaccgcctgaacctgttttggggagtgcatccggtacagtgcgagcctttgcgttcctcaaaagaaatgattctctacgccgaacagttacttctcggtgcccaccaggtggctgcgggagatatcattggagtcgttgcgggcacgcgttccacatcaggttctacgaacttcatgcgcctgcacgtgattggcagcgagtccgaggaagagcgaccgcccgcggagaacgcgccgccgatgaagaaagagattcgatga

SEQ ID NO: 8588 - protein, 509 aa, Acidobacteria bacterium Ellin345
MTFSYNAFTEPAGEHTATHRRAKIVCTIGPACNTEAAMQELMRAGMDVARLNFSHGTHDEHLVVIQRLRKVAAEEQRSICILQDLQGPKIRTGLLKDHKPVMLETGNTVTITPRDIVGDASLLATTFQTLALDVQPGSRILLSDGKIELSVSRIEGADVECHIVNGGELKEHQGINIPGAILSIPALTNKDLEDLAFGLKNGVDAVAISFVRTANDLKQVRNAISEHQGNVFVIAKLEKPQAIEHLEEIFNETDGVMVARGDLGVEVPPEKVPVLQKHIIKRSQSRRIPVITATQMLESMIDNPRPTRAEASDVANAIFDGTDAVMLSGETASGKYPREAVAMMARIITEAESHCLAEGRRRRHEDHKNTISEAVCDAVSHAAEDLDMLAIAIYTESGNTARILSKHRPKPPIYAFSHLDTVINRLNLFWGVHPVQCEPLRSSKEMILYAEQLLLGAHQVAAGDIIGVVAGTRSTSGSTNFMRLHVIGSESEEERPPAENAPPMKKEIR

SEQ ID NO: 8589 - DNA, 1446 bp, Silicibacter sp. TM1040
  CDS (1)..(1446): transl_table=11
atgaaacgcacgcgcaatgtcaaaatcgtggccacgctcggtcctgcctccgagacctacgagaccattcgcgctctgcatgaggcaggtgcggatgtgttccgcctgaatatgtcccacggcagccacgatgaaatcgcggtgaagcacaagatcatccgccaggtcgaagaagacctggactccaccatcgccattctggccgacctgcagggacctaaactccgcgtcggcgtgtttgcgaatggtgccgaggaactcgaagaaggggcaaatttccgccttgatctcgatccggccgagggcgatctgtcgcgcgtttgcctgccgcaccccgagatttttcaggcgctggagcccggtgcttcgcttctggtcaacgatggcaagatccgtctcaaggtggaggattgcggcgaggattatgccaattgcgtcgtgaccaccggtggcaccatctcgaaccgcaagggtgtgaatgttcccgatgtgatcctgccgttggcggcactttcggaaaaagaccgtgcggatctggagtttgtctgcgagctcggtgtcgactggctggcgctgtccttcgtacaacgcgcaaaagacgtctttgaggcccgcgctctggctgatgggcgcgccgcaatcctctccaagatcgaaaagcccgccgccgtcgacaactttgcagaaattctggatgcctccgatggcatcatggtagcgcgcggagatcttggcgttgagctgccggtttcgcatgtgccgccgatccagaaacgcctggtccgcaagagccgcgcggccgcaaagcccgtgattgtggcgacacagatgctcgagagcatgatcgagagcccgatgcccacccgtgcagaggtctctgacgtggcaaccgcgatctacgagggcaccgacgctatcatgctcagcgcggagtctgcagcgggtcagtaccctatcgaagcggttcagacgatggacaaggtcgcaaccgaagtggagcaggacccgacatatcgcgacattatcgccgcttcccgctcttccaagggtgacaccatcgcggatggcatcgtggcagctgcgcgcgagattgcggagaagaccgagatcaaggcgatctgctgttttacacagtccggaaccaccgcgcttttgactgcgcgcgagcggccctatgtgccgatcctcgcgctgacaccgctggcaaaaaccgcccgccgcctttgcctgacctggggttgcaactgtgtggttacgcccaaggtggatcgcttcaagggggctgtggtatctgctgcgcgtgccgcgcgttcgggtggctttgcctctgagacggatcaggttgtcgtcactgccggtgtgccgttcaacgtaccgggcaccaccaatatcttgcgcattgcgccttgtgatgaacgcctgatttacaataccgacccggaataa

SEQ ID NO: 8590 - protein, 481 aa, Silicibacter sp. TM1040
MKRTRNVKIVATLGPASETYETIRALHEAGADVFRLNMSHGSHDEIAVKHKIIRQVEEDLDSTIAILADLQGPKLRVGVFANGAEELEEGANFRLDLDPAEGDLSRVCLPHPEIFQALEPGASLLVNDGKIRLKVEDCGEDYANCVVTTGGTISNRKGVNVPDVILPLAALSEKDRADLEFVCELGVDWLALSFVQRAKDVFEARALADGRAAILSKIEKPAAVDNFAEILDASDGIMVARGDLGVELPVSHVPPIQKRLVRKSRAAAKPVIVATQMLESMIESPMPTRAEVSDVATAIYEGTDAIMLSAESAAGQYPIEAVQTMDKVATEVEQDPTYRDIIAASRSSKGDTIADGIVAAAREIAEKTEIKAICCFTQSGTTALLTARERPYVPILALTPLAKTARRLCLTWGCNCVVTPKVDRFKGAVVSAARAARSGGFASETDQVVVTAGVPFNVPGTTNILRIAPCDERLIYNTDPE

SEQ ID NO: 8591 - DNA, 1434 bp, Myxococcus xanthus DK 1622
  CDS (1)..(1434): transl_table=11
atgcgaagagcgaagattgtctgcaccctcggtcccgccagccagagccaggagatgctcgaagcgctcctggagaacggcatggacgtggctcgcctgaacttctcccacggcagccacgagcagcacgcggagaacatcgcgaagctgcgcgccgcgtcgctgaaggttcgcaaggcggtgggcatcctcggcgacctgcaaggcccgaagattcgcactggccgtttcgtgaagggcagcaccgagctgaaggaaggcggcaccttccacatcaccacggatgaaacggtcccgggcacggacgaaatcgtgtccacgacgtacccgttcctggccgcggacgtgaatccgggggaccgcatcctcctggatgacggcctgctggagctgaaggtcctggagacggacaagcagaagctcatccgcacgcaggtcatccacggcggcacgctgaagaacaacaagggcatcaacctgcccggcgtggcggtgcgcgcggaggcgctgacgccgaaggaccgtgaggacctggtgttcgggatcaaggccggcgtggattacatcgcgctgtccttcgtgcgccagccgtccgacctggacaccgcgcgccaggccatggccgaggtgggccgcacggtgcccatcatcgccaagctggagaagccggaggccattgcccggctggacgccatcctggacaagacggacggcgtgatggtggcgcgcggcgacctgggcgtggagattccccccgaggaagtgccggccgtccagaaggacatcatccggcgctccaacctgcgcggcctgcccgtcatcgtggccacgcagatgctgaactccatgattgataacccgcgccccacgcgcgccgaggccagcgacgtggccaacgccgtgttcgacggcgcggacgcggtgatgctgtcgggcgagacggccagcggcaagttccccatcgagtccgtgcagatgatggagcgcatcatcctggcggccgagtcctccgcgcgcacgacgcagtcgctgatgcgcgtgctggagacgccggtggggctgcccaaccacttcccggacgtcatcgcgcgcgtggcctgcgaggcggccaaggcgagcaacgcctcgctcatcgcggccttcacgctgtcgggtgtgacggcgcgcctgctgtcgcactaccggcccccggtgccgattgtcgccttcagccccaaccaggaagtgcgccgccggctgtcgctgttgtggggcgtggtgccgcgcgtgctggagcccacccaggacaccgaggccatggtgaagcgcgtggaggaagagctcctggcgcgaggcctgggccgcaagggcgaccgcatcgtcatcgtgttcggcgcgcccgtggggcagccgggcaagatcaacagcctgcgcctgcacaccatccagggctga

SEQ ID NO: 8592 - protein, 477 aa, Myxococcus xanthus DK 1622
MRRAKIVCTLGPASQSQEMLEALLENGMDVARLNFSHGSHEQHAENIAKLRAASLKVRKAVGILGDLQGPKIRTGRFVKGSTELKEGGTFHITTDETVPGTDEIVSTTYPFLAADVNPGDRILLDDGLLELKVLETDKQKLIRTQVIHGGTLKNNKGINLPGVAVRAEALTPKDREDLVFGIKAGVDYIALSFVRQPSDLDTARQAMAEVGRTVPIIAKLEKPEAIARLDAILDKTDGVMVARGDLGVEIPPEEVPAVQKDIIRRSNLRGLPVIVATQMLNSMIDNPRPTRAEASDVANAVFDGADAVMLSGETASGKFPIESVQMMERIILAAESSARTTQSLMRVLETPVGLPNHFPDVIARVACEAAKASNASLIAAFTLSGVTARLLSHYRPPVPIVAFSPNQEVRRRLSLLWGVVPRVLEPTQDTEAMVKRVEEELLARGLGRKGDRIVIVFGAPVGQPGKINSLRLHTIQG

SEQ ID NO: 8593 - DNA, 1434 bp, Rubrobacter xylanophilus DSM 9941
  CDS (1)..(1434): transl_table=11
atgagggtgcggcggaccaagatagtggccaccctggggccggccacctcctccgaggagagcatcggggcgctggtccgggcgggggtggacgtgatgcggctgaacttcagccacggcacccacgacatgcacctggacaacgcccgcaccgtccgcgaggccgccgccgaggccgggcgcaacgtggcgatcatgcaggatctgcaggggccgaagatccggaccggcgaggtggagggcgggaccgagctcgtggagggcagccgggtcgtgatagcccccggcgacttcgtgggggacgccagccgactctccacctcctacgaccggctggcgcaggacgtgaagcccggccaccggctgctcatagacgacgggctcatcgggctgcgggtggagagcatcaaggagaacggagagatcgtctgcgaggttttggagggcgggcccgtctcctcccacaaggggctcaacttcccggactcctcgctctccataagcgggctgacggagaaggatctggaggatctgcgcttcggccttgaggagctgcgccccgactgggtagccatctccttcgtgcgcaccggcgaggaggtgctcgacgtcaaggagcgcatccgggagctcggcggggacgtgccggtgatctccaagatcgagaagcacgaggcgatagacaacatagaggaggtcatagaagcctccgacggggtgatggtggcccgcggggacctggcggtggagctctcggcggagcgggtgcccatagagcagaagcggatcgtcgcgcgctgccgccggcggggccggccggtgatcgtggccacccagatgctggactcgatgatgcgcaacccccgccccacccgggccgaggtctccgacgtggcgaacgccatcttcgaccggaccgacgcggtgatgctgagcggggagacggccgtcggccgctacccgacccagagcgtgatggagatggaccgcatctgccgggcggcggagggggccatagactacggccgggacatcgccgcctccaccgcctgggggcggggcgaccgctacgacgccgtcacccacgccgcctgcgagctcgccgaggtgctcgaggcgcaggcgatcctcacctccacccagaccggcctctcctgcataagggtcgcccgcttccggccgccgaacaggatcctggcggtgagccccatcgaggccacggtccgccgcctcgccctggtgtggggggtgacggcggtgcggggcgagcaggcgggctcgatagaggagcgcttcagggagtccgtggaggccgccgaggccagggggcacctgaagaagggcgaccggctggtcttcaccggggggacggcgggctccctgccgggctccaccaacctgctgcaggtgcacacggtgggggagaacgggtga

SEQ ID NO: 8594 - protein, 477 aa, Rubrobacter xylanophilus DSM 9941
MRVRRTKIVATLGPATSSEESIGALVRAGVDVMRLNFSHGTHDMHLDNARTVREAAAEAGRNVAIMQDLQGPKIRTGEVEGGTELVEGSRVVIAPGDFVGDASRLSTSYDRLAQDVKPGHRLLIDDGLIGLRVESIKENGEIVCEVLEGGPVSSHKGLNFPDSSLSISGLTEKDLEDLRFGLEELRPDWVAISFVRTGEEVLDVKERIRELGGDVPVISKIEKHEAIDNIEEVIEASDGVMVARGDLAVELSAERVPIEQKRIVARCRRRGRPVIVATQMLDSMMRNPRPTRAEVSDVANAIFDRTDAVMLSGETAVGRYPTQSVMEMDRICRAAEGAIDYGRDIAASTAWGRGDRYDAVTHAACELAEVLEAQAILTSTQTGLSCIRVARFRPPNRILAVSPIEATVRRLALVWGVTAVRGEQAGSIEERFRESVEAAEARGHLKKGDRLVFTGGTAGSLPGSTNLLQVHTVGENG

SEQ ID NO: 8595 - DNA, 1437 bp, Mesorhizobium sp. BNC1
  CDS (1)..(1437): transl_table=11
atgaagcggagccgcaaggtcaagatcctcgccacgctcgggcccgcatcttcggatgaggaaatcatcgtccgccttcatgaggccggtgctgacgcgttccgcatcaatatgagccacacggaccacccgacgatgcgtgagctggtggcacgcatccgcagcgttgaaacgcaggtgagccgtcccatcggcattctggccgatctgcagggcccgaagctgcgtgtcggcactttcgccgataagagcgccacattaagcatcggccaggaattcactttggacgataatccggcgccgggcgacgccacgcgcgtgcatctgccgcacccggaaattctgcaagccgtccaaccgggtcaccgcctcctgatcgatgacggccgcctgcaactcgcagcactcaagaccgacggccgatcgatagtcgcccgggtcatcgcgggaaacaagatctccgaccgcaagggcgtcagccttcccgacacggaattgccgctcggcgcccttacggaaaaggaccggcgcgacctggacgcggtgctgcaaacgggcgtcgattggatcgccctgtcttttatccagaggccgcaagacctggcggaggtccgcaaaatcgcgcgtggccgcgccgccctgatggcgaaaatcgaaaagcctcaggcggtgaaacgcctgccggagatcatcgagctttccgacgggttgatggtggcacgcggcgatcttggcgtggaaatgccgcttgaggcggtgccgggcatccagaagcagatcacgcgcgcctgccgccgcgccggcaagccggttgtggtggcgacgcagatgctggaatccatgatcacggcgcccgtgccgacccgcgccgaggtgtcagatgtggcgacggccgtgttcgagggcgcggatgcggtaatgctctccgccgaatcggctgccggccagtacccggtcgaggcggtggccatgatgaatgcgatcgcgatccaggtcgagcgcgatcccgtattcaacgatgtcatcaatgcgcagcgcacggagccggaagcgacgggcgccgacgccatctcgctcgcctcgcgagagatcgcggaaacgctgaaactcgcggccatcatcacatatacggcgtcgggcaccacagggcttcgcgccgcccgcgagcggccgaaggtgccgatcatcgcgctttcgccggtggtcgagacgacgcgccgcctcagtctggtctggggtacccattgcgttgtctcggaagatgcaaccgacctcgatgatatggtggatcgggcgtgccgcattgcctatgaggagcagttcgccaagccgggcgaccgcgtgatcatcaccgccggcgtgccgctcaggacgccgggcgtcaccaatatgctgcgcatcgcctatatcggctcggatgggctgagcggattgtaa

SEQ ID NO: 8596 - protein, 478 aa, Mesorhizobium sp. BNC1
MKRSRKVKILATLGPASSDEEIIVRLHEAGADAFRINMSHTDHPTMRELVARIRSVETQVSRPIGILADLQGPKLRVGTFADKSATLSIGQEFTLDDNPAPGDATRVHLPHPEILQAVQPGHRLLIDDGRLQLAALKTDGRSIVARVIAGNKISDRKGVSLPDTELPLGALTEKDRRDLDAVLQTGVDWIALSFIQRPQDLAEVRKIARGRAALMAKIEKPQAVKRLPEIIELSDGLMVARGDLGVEMPLEAVPGIQKQITRACRRAGKPVVVATQMLESMITAPVPTRAEVSDVATAVFEGADAVMLSAESAAGQYPVEAVAMMNAIAIQVERDPVFNDVINAQRTEPEATGADAISLASREIAETLKLAAIITYTASGTTGLRAARERPKVPIIALSPVVETTRRLSLVWGTHCVVSEDATDLDDMVDRACRIAYEEQFAKPGDRVIITAGVPLRTPGVTNMLRIAYIGSDGLSGL

SEQ ID NO: 8597 - DNA, 1413 bp, Cytophaga hutchinsonii ATCC 33406
  CDS (1)..(1413): transl_table=11
atggtaaacaagaaaacaaagattattgcaactgtaggtccggcatgtaacacgaaggagaagttatgggagttggttcaagctggcgcgaacattttcagattgaatttttctcacggcactcacgatgtacatcaaggcgtaattaacgcgatccgcgaacttagaaaagaacacaatgttaacatagcaatccttcaggatttgcaaggtcctaagatccgtactgacgaagttgagaacaacggtgttgaacttgttgcaggtgcgcagattgttattactaaagaaaaaatgttaggtactaaagataaaattagtacttcttataaaatgcttacatcggatgttaaaaaaggcgatgctattttaattgatgatggtaatattgaattaaaagttttagaaacaggtaatggtgaagttacgtgtgtggttatttatggcggtatcttaaaatcacgtaaaggtatcaacctgccaaacacaattgtttccgaaccttcattaacagacaaggataaagaagatttattattcggtttgaaaaatgaagttgactggattgcgctttcttttgttagaagcgcagttgatctgaatgaattaaaagcaattattgctgaacatggtaaatcatgtaaagtaattgccaaggttgaaaaacctgaagcagttaaagatattgatgcgattattgaagcatctgatgcaatcatggttgcacgtggtgacctgggggttgaacttcagatggaagatgttccgatgatccagaaaatgatcattaaaaaatgtaatcagttagctaaacctgttattgtggcaacacaaatgatggaaagtatgattacaaacgcgcgtcctacacgtgccgaagcaagtgacgtagcgaacgcaatcattgatggtacagatacaatcatgttgtctgctgaaacagcttcaggaaactatccggtgatcacggttaaagcaatgacacgtatttgccaggcggtagaaaaagaagctgatatctataataaatcaacattagatgatattacaaataccagcgacagtgttatcgcttctgcatgtgaattagcggataaagtaaatgctaaagcaattatcggattgtctcaatccggttattctgctttcagaattgcaagccacaggccaaaagcaagcatttatatcgctacacatgatgagcaattaatgaatcagatgaaccttgtttggggtgtacaggctttcaggtttgaaaaatttacaacaacagacgaatcaatcgaagcggttaagaaaagccttgttgaaaaaggacttttaaagaaaggtgatatctacgttactacggcttctatgccaatggcagatattcagcttgcaaacagcctgaagttaggaattgttgaataa

SEQ ID NO: 8598 - protein, 470 aa, Cytophaga hutchinsonii ATCC 33406
MVNKKTKIIATVGPACNTKEKLWELVQAGANIFRLNFSHGTHDVHQGVINAIRELRKEHNVNIAILQDLQGPKIRTDEVENNGVELVAGAQIVITKEKMLGTKDKISTSYKMLTSDVKKGDAILIDDGNIELKVLETGNGEVTCVVIYGGILKSRKGINLPNTIVSEPSLTDKDKEDLLFGLKNEVDWIALSFVRSAVDLNELKAIIAEHGKSCKVIAKVEKPEAVKDIDAIIEASDAIMVARGDLGVELQMEDVPMIQKMIIKKCNQLAKPVIVATQMMESMITNARPTRAEASDVANAIIDGTDTIMLSAETASGNYPVITVKAMTRICQAVEKEADIYNKSTLDDITNTSDSVIASACELADKVNAKAIIGLSQSGYSAFRIASHRPKASIYIATHDEQLMNQMNLVWGVQAFRFEKFTTTDESIEAVKKSLVEKGLLKKGDIYVTTASMPMADIQLANSLKLGIVE

SEQ ID NO: 8599 - DNA, 1473 bp, Rhodococcus sp. RHA1
  CDS (1)..(1473): transl_table=11
atgacagcaacagtttccgaatacctcggcacacccggccgggaggcgcccgcgtcggcgaggcgcgcgaagatcgtgtgcaccctcgggcccgcaacggcaaccggcgaccgcatacgcgaactcgtcgactgcggaatggacatcgcacggctcaacttcagccacggcgaacattccgatcacgaggagaactacctccgggtgcgggacgcgtccgaactcgccggccgggcagtaggtattctcgccgatcttcagggcccgaagatcaggttggggcgtttcgccgaaggcagcacagtctggtcggacggcgacctcgtgcggatcaccgtcgacgagtgcgagggcacccacgaccgggtctccaccacctacaagcagctggccgaggacgccgagcccggtgaccggttgctcgtcgacgacggcaagatcggattggtcgtcacggacgtcgacggcaacgacgtggtgtgccgggtcaccgagggcggaccggtcagcaacaacaagggtgtgtccctgccggggatgaacgtgtcggttccggccctgtcgggcaaggacatcgccgacctcgagttcgcgctgcgtctcggcgtcgacctcattgccctgtcgttcgtgcgatcggccgcagacatcgaactcgtccatgccgtgatggatcgggtcggccgcagggtcccggtgatcgcgaagctcgagaaaccggaggcgatcgacaacctcgaggccatcgtgctggcgttcgacgcggtgatggtcgcccgcggcgatctgggtgtcgaactacccctcgaacaggtgccgctcgcgcagaaacgggccatccaaatagcccgcgagaatgcgaagccggtcatcgtcgcgacgcagatgctcgagtcgatgatcgagaactcgcggcccacccgcgccgaggcgtccgacgtggccaacgccgtcctcgacggtgccgacgccgtcatgctgtcgggcgaaacgtccgtcgggaagcacgtgatggaaacggtccgcaccatgggccgcatcatcagcgcagtcgaggagaagtccacgcacgttccgccgctggcgcacgtaccccgcacgaagggcggagtgctgtcctacgcggcgcgcgacatcggggaacgattgggcgcggcggcgctcgtcgcgttcacccaatccggggacacggtgcggcggctggcgcgactgcacactccgctgccgttgctggcgttcaccccgctcccggcggtgcgcgctcagctcgcgctgacgtgggggaccgagacgttcctcgtcgaccccgtcgaatcgaccgaccagatgatccatcaggtcgaccacgcgctcctcggcctgggacggtaccagcggggtgacctcgtcgtcatcgtcgcgggatcgcctccgggcaccgtcggctcgacgaacctgatccacgttcacaggatcggcgaggaagaccactga

SEQ ID NO: 8600 - protein, 490 aa, Rhodococcus sp. RHA1
MTATVSEYLGTPGREAPASARRAKIVCTLGPATATGDRIRELVDCGMDIARLNFSHGEHSDHEENYLRVRDASELAGRAVGILADLQGPKIRLGRFAEGSTVWSDGDLVRITVDECEGTHDRVSTTYKQLAEDAEPGDRLLVDDGKIGLVVTDVDGNDVVCRVTEGGPVSNNKGVSLPGMNVSVPALSGKDIADLEFALRLGVDLIALSFVRSAADIELVHAVMDRVGRRVPVIAKLEKPEAIDNLEAIVLAFDAVMVARGDLGVELPLEQVPLAQKRAIQIARENAKPVIVATQMLESMIENSRPTRAEASDVANAVLDGADAVMLSGETSVGKHVMETVRTMGRIISAVEEKSTHVPPLAHVPRTKGGVLSYAARDIGERLGAAALVAFTQSGDTVRRLARLHTPLPLLAFTPLPAVRAQLALTWGTETFLVDPVESTDQMIHQVDHALLGLGRYQRGDLVVIVAGSPPGTVGSTNLIHVHRIGEEDH

SEQ ID NO: 8601 - DNA, 1440 bp, Haemophilus somnus 129PT
  CDS (1)..(1440): transl_table=11
atgtctagaagactaagaagaacaaaaatagtatgtacactgggaccatccacagatcgaggtaataatttagaaaaaattattgtagccggtgcaaatgttgttcgtatgaatttttctcatggtacaccagaagatcatcttgctcgtgctgaaaaagttcgtgaaattgctaaaaaattaggtaaaactgttgcaattttaggagatctacaaggtccaaaaattcgggtatctacttttaaagagggtaaaattttcttaaatattggtgataattttactttagatgctgatttacccaaaggtgaaggtaatcaagaagccgtaggactggattataaaacattaccgcaagatgttgttccgggcgatattttattattggatgacggacgtgttcaattaaaagtgttatcgacagacaatactaaagtatttacagaagtaattgttggcggtccattatcaaataataaaggtatcaataaattaggtggtgggctatctgctaacgcactgacagaaaaagacaaagaagacattattttagctgcacgtattggtgttgattatcttgctgtttctttccctcgttccagtgctgatttaaattatgctcgtgaattagctcaacaagcaggtttaaaagccaaaattgtggctaaagttgaaagagcggagactgttattgacgaggaggcaatggacgatattattttagcttctgatgtaattatggttgctcgtggtgatttgggtgttgaaattggtgatccggaattagtcggaatacagaaaaaattaattcgtcgttcacgtcagctaaatcgtgtagtgattaccgcaacacaaatgatggaatctatgattagcaatcctatgccaactcgtgccgaggtgatggatgttgccaatgctgtattagatggcactgatgccgtcatgctttctgcggaaacagcagcaggtcaatacccttcagaaactgtttcagcaatggctaaagtttgtttaggtgctgaaaaaatgcctagtgtaaatatttctcggcatcgcttagataaagaatttgatacgattgaagaaactattgcgatgtctacgatgtttgcagccaaccatatgaaaggtgttgcagccattatcgcaatgacaagtagtggtcatactgcaaaattgatgtctcgcattagttccggactaccaatttttgccctttctcgaaatgaaagtacattaaatttatgtgcattgtatcgtggtgttattccaattcattttgatcaggatagtcgtacgcttgaaggattaaaagctgccatacaatcgctaaaagataaaggttatttagtttccggtgatttggttttattaactcaaggagaccacttaacatcaaatggtacgagtacttgccgtgctttagtggttgaatga

SEQ ID NO: 8602 - protein, 479 aa, Haemophilus somnus 129PT
MSRRLRRTKIVCTLGPSTDRGNNLEKIIVAGANVVRMNFSHGTPEDHLARAEKVREIAKKLGKTVAILGDLQGPKIRVSTFKEGKIFLNIGDNFTLDADLPKGEGNQEAVGLDYKTLPQDVVPGDILLLDDGRVQLKVLSTDNTKVFTEVIVGGPLSNNKGINKLGGGLSANALTEKDKEDIILAARIGVDYLAVSFPRSSADLNYARELAQQAGLKAKIVAKVERAETVIDEEAMDDIILASDVIMVARGDLGVEIGDPELVGIQKKLIRRSRQLNRVVITATQMMESMISNPMPTRAEVMDVANAVLDGTDAVMLSAETAAGQYPSETVSAMAKVCLGAEKMPSVNISRHRLDKEFDTIEETIAMSTMFAANHMKGVAAIIAMTSSGHTAKLMSRISSGLPIFALSRNESTLNLCALYRGVIPIHFDQDSRTLEGLKAAIQSLKDKGYLVSGDLVLLTQGDHLTSNGTSTCRALVVE

SEQ ID NO: 8603 - DNA, 1764 bp, Trichodesmium erythraeum IMS101
  CDS (1)..(1764): transl_table=11
atggaactacaaaattatctgcgtcgcactaaaatagtagccactattggcccagccacaattaagcctgatgtacttcgggagctaattaaagctggtgctacaaccctgcgactcaacttttctcatggaactcatgaagatcatcagaatagtattcgccttatccggcaaacctcttttgagctgaatcaaacggtggctattctacaggatcttcaaggaccaaaaattagattaggaaaatttgaaacaggctcaatatctttagaggatggagacccttttattttgacgagtcacttgaaattaggaactcaaaaaatttcttctgtaacttatgaacctttggcagatgaagtgccggaaggggcaaaaattctccttgatgatggcaaagtagaaatgttagtggagaaagtagataaaacagagaaagaactacattgtcgtgttgtagtcggtggtactctttctaataataaaggtgttaactttccgggagtttatctgtcaattaaagcactgacagacaaagacagaaaagatttaatgtttggtcttgaccaaggagtagactgggtagcgcttagttttgttcgtaacccccaggatgttatagagattaaacaattaattgctaatgcggggaaaaaggttcctgtaattgctaaaatagaaaagcacgaagctatcgaacaaatggaagaaattttggctttgtgtaatggggtgatggttgcccgtggtgacttgggggtggagttacctgcagaggaggtacctctgttacaaaaacgactaatttctacttctaacaggatgggaatacctgtaattactgctacccaaatgttagatagtatggtgaataacccccgcgctactcgtgccgaaatttctgatgtggcaaatgcaattattgatggtactgatgctgtcatgttatcaaatgagacagcagtgggtaagtatcctgtggaagctgtaacaacaatggcaactatcgccaaacgcattgagcaagaagttattacttgcaacgtttcgagtatgaatgatacaggtcattctattcccaatgctattagtcatgcagttagtcagattgcacaagagttagatgcagcagctattatgagtctgacaaaaaccggtgcaacagcacgcaatgtatctaagtttcgaccaaaaactcctattttagcagtgactccccatgtggatgtggcgcgacagttacaacttgtatggggagtgaaaccactattagtattggatttaccttctgcaggtcagactttccaatcagccattaatgtagctcaggaaaacgagttattggttgatggagatttagtagttatgactgcgggtactttacaaggcatagcaggttcaacagatttaattaaagttgaggttgtaactgcagttttgggtcaaggtactggagttggtcaaggttctgtgagcggtcgtgctcgggttgctcgtaattcgacggaggttcgggattttaaccatggagaaattttggtggttaatcagacaaatgctgagtttgtggaggcaatgcaaaaagcttctggagtggtgacggaagaggatagtgttaccagtcatgctgcagttattggtttacgtttggggttgccagtgatcgtgggagtgaagaatgcgactaatgtagttcgggatggaacaattttgacgttggatgctcaaagaggtatggtttactctggaactaatcgaaggtaa

SEQ ID NO: 8604 - protein, 587 aa, Trichodesmium erythraeum IMS101
MELQNYLRRTKIVATIGPATIKPDVLRELIKAGATTLRLNFSHGTHEDHQNSIRLIRQTSFELNQTVAILQDLQGPKIRLGKFETGSISLEDGDPFILTSHLKLGTQKISSVTYEPLADEVPEGAKILLDDGKVEMLVEKVDKTEKELHCRVVVGGTLSNNKGVNFPGVYLSIKALTDKDRKDLMFGLDQGVDWVALSFVRNPQDVIEIKQLIANAGKKVPVIAKIEKHEAIEQMEEILALCNGVMVARGDLGVELPAEEVPLLQKRLISTSNRMGIPVITATQMLDSMVNNPRATRAEISDVANAIIDGTDAVMLSNETAVGKYPVEAVTTMATIAKRIEQEVITCNVSSMNDTGHSIPNAISHAVSQIAQELDAAAIMSLTKTGATARNVSKFRPKTPILAVTPHVDVARQLQLVWGVKPLLVLDLPSAGQTFQSAINVAQENELLVDGDLVVMTAGTLQGIAGSTDLIKVEVVTAVLGQGTGVGQGSVSGRARVARNSTEVRDFNHGEILVVNQTNAEFVEAMQKASGVVTEEDSVTSHAAVIGLRLGLPVIVGVKNATNVVRDGTILTLDAQRGMVYSGTNRR

SEQ ID NO: 8605 - DNA, 1440 bp, Shewanella sp. MR-4
  CDS (1)..(1440): transl_table=11
atgttccgcagaaccaaaatcgtcaccactctgggccccgccactgaccgtgacgataacttacgccgtattatcgcggcaggtgcaaacgttgttcgtcttaacttctcccacggttcccccgaagatcatctcaaacgcgcgactcaagctcgcgaaattgcaaaagaattaggtgtccatgttgctattttaggtgacttacaaggtcctaagatccgtgtatctacctttaaagacaacaaaaaagttcaactgaacttaggtcaagcctacattctggatgccgagttaggtaaaggcgaaggcgacgagaatcaagtcggtatcgactacaagcaattgccagacgatgtgaaaattggcgatatcctgatgctcgacgacggccgtgtacaactgcgtgttgagcgcgttgaaggtcgtaaagtgcacacgactgttaccgttgctggccctctatcaaacaataaagggatcaacaaacaaggtggtggtctatctgcagcggctctgactgaaaaagacaaggctgatatcctgactgcggccatgatccaagtggattacttagccgtgtctttcccacgtagtggcgccgatctggaatacgcgcgttctttagcgcagcaagctggcagtaatgcactgatcgtcgcaaaagtagaacgtgctgaagccgtggctagcgaagaagcgatggatgatgtaattttagcctctgacgtagtcatggttgcccgtggtgacttaggggttgagattggtgatgcagcgcttgtagcagtacagaagaagcttatcgctcgctctcgtcaactgaataaaatcgtgatcactgcgactcaaatgatggagtcaatgatttcgagcccaatgcctactcgcgcggaagtcatggacgtggccaacgccgtgctcgatggtactgacgcagtgatgctgtctgccgaaactgctgctggtgacttcccagaagaaaccgttaaggcgatggcgaatgtgtgtatcggtgccgaatctcacccaagcgtgaaagtttctaagcacagattagatgcacgtttcacttcagttgaagaaacgattgcactatcgactatgtatgctgctaaccacttagaaggcgtgaaagcaattattgccttaactgagtctggcgcaacacctaaactgatgtcacgtatcagttcatctttacccatccttggtttatcacgccatgagacaacgctggcgaagatggcactgtaccgtggtgtgttaccgatttacttcgactcaaccatttatcctgccgatgagttagcgcaaaaagcgttggaatcattaacaactgcgggttatctgcagagtggcgacttggtattaatgaccaagggtgatgcgatggaaactatcggcggcactaacacttgtaaagtgttgatcgttgcataa

SEQ ID NO: 8606 - protein, 479 aa, Shewanella sp. MR-4
MFRRTKIVTTLGPATDRDDNLRRIIAAGANVVRLNFSHGSPEDHLKRATQAREIAKELGVHVAILGDLQGPKIRVSTFKDNKKVQLNLGQAYILDAELGKGEGDENQVGIDYKQLPDDVKIGDILMLDDGRVQLRVERVEGRKVHTTVTVAGPLSNNKGINKQGGGLSAAALTEKDKADILTAAMIQVDYLAVSFPRSGADLEYARSLAQQAGSNALIVAKVERAEAVASEEAMDDVILASDVVMVARGDLGVEIGDAALVAVQKKLIARSRQLNKIVITATQMMESMISSPMPTRAEVMDVANAVLDGTDAVMLSAETAAGDFPEETVKAMANVCIGAESHPSVKVSKHRLDARFTSVEETIALSTMYAANHLEGVKAIIALTESGATPKLMSRISSSLPILGLSRHETTLAKMALYRGVLPIYFDSTIYPADELAQKALESLTTAGYLQSGDLVLMTKGDAMETIGGTNTCKVLIVA

SEQ ID NO: 8607 - DNA, 1455 bp, Alkalilimnicola ehrlichei MLHE-1
  CDS (1)..(1455): transl_table=11
atgcccctgccccgccgcaccaagatcatcgccaccctcgggccagcctccgacggcccgcagatggccacccggctggtgaaggccgggatcgacctggtccgcatcaacttctcccacggcacggtggacgatcaccgccggcgggtggaggctgtccgtcaggcggcccgggaggccggccgtgaggtcggggtgctggccgacctgcaaggtccgaagatccgcatcgagggcttccgtaacggcgcggtggacctcgaggaggacgcaccattcaccctcgacaccgctttggataaggatgccggtgacacggagcgcgtcggggtggcctatccccagctggtccgggatgtggagccgggcgacgtcctgcttctggacgacggccgggtactgctcaaggtggagtcggtcagcgacacggccatccactgccgggtcgccaccggcggccggttgtccaaccgcaaggggctgaaccgcctcggcggcggcctctccgcggaggcgctgaccgacaaggacgaggcggatatccgtaccgcggtggaactgggggccgactatctggcggtctcgttcgtgcgcgaggcggcggatgtggagcgggcccgtgaactgctgcaggccgccggtggcaacgccgggatcatcgccaagatcgagcgcgccgaggcgctggattgccagaccgagatcatccaggctgccgacgccatcatggtggcccgcggcgacctgggcgtggagatcggcgatgccgcgctgccgcaggtccagaaacaactgatccaccaggcccgcgacctgaaccgggtggtgatcacggcgacccagatgatggagtccatgatcgagagcccgctgcccacgcgcgccgaggtcttcgacgtggccaacgccgtccttgacggcaccgatgcggtgatgctctcggcggagaccgcggccggtgaatatcccgacgcggcggtggcggccatggaccgggtctgccgggaggcggagaagagccgggccgccaccgagtccggccaccggttggagtgccgcttcggcagctccgaggaggcggtggccatggcggccatgtacaccgccaaccacctgccggtgaaggcgatcatcgccctcaccgaatcgggcaccaccgcactctggatgtcccgtatccgctccggcatcccgatctatgccttgacccggcacccggagacccagggccgggtcaccctctaccgcggggtctaccccatcgccttcgacccgacccagggcgatgccgacagcgtgcgccagcgcctggtccagacgctgcgggagaagcggctggtgacggaggaggaccacctggtgctgaccttcggcagtcggatgggggtggccggtggcaccaacaccatgaaggtggtgaaggtgggtgacctgttgaacggcacggggcattag

SEQ ID NO: 8608 - protein, 484 aa, Alkalilimnicola ehrlichei MLHE-1
MPLPRRTKIIATLGPASDGPQMATRLVKAGIDLVRINFSHGTVDDHRRRVEAVRQAAREAGREVGVLADLQGPKIRIEGFRNGAVDLEEDAPFTLDTALDKDAGDTERVGVAYPQLVRDVEPGDVLLLDDGRVLLKVESVSDTAIHCRVATGGRLSNRKGLNRLGGGLSAEALTDKDEADIRTAVELGADYLAVSFVREAADVERARELLQAAGGNAGIIAKIERAEALDCQTEIIQAADAIMVARGDLGVEIGDAALPQVQKQLIHQARDLNRVVITATQMMESMIESPLPTRAEVFDVANAVLDGTDAVMLSAETAAGEYPDAAVAAMDRVCREAEKSRAATESGHRLECRFGSSEEAVAMAAMYTANHLPVKAIIALTESGTTALWMSRIRSGIPIYALTRHPETQGRVTLYRGVYPIAFDPTQGDADSVRQRLVQTLREKRLVTEEDHLVLTFGSRMGVAGGTNTMKVVKVGDLLNGTGH

SEQ ID NO: 8609 - DNA, 1425 bp, Hyphomonas neptunium ATCC 15444
  CDS (1)..(1425): transl_table=11
atgatcaaatcccatctgcagggcgagaatgccaagattgtcgccacgctggggccaggcagccgttcgcctagggaagtgcgtgcactggcggaggcgggcgtcgatgtgttccgcctgaatttcagccatggcgaacacgcggcccatcttgaagccctgaaggcggtgcgcgccgcagaagccgctgtcggctggccgctcgcgacgcttgcagatcttcagggacctaaggtgcgtgttggcaagttcgacggtggttcgctgaagctgggctttcgcaaggaataccgcatcattgttggcgaaacggcaccggacccggaaacgatcccggtaccccatgccgagattgttgccatccttgaggagggcgacacgatcctggccgatgacggcaagctgatcttcaccgtgatcagtggcggcagcgagccgcgcgtacgcgctgaagtccccggcaagctgggcgacaagaagggctttaccgttcggggcaaggcgctgccggtccgtgcactgacggagaaggaccgcgctgacctggacttcgcgctggaaatcggcgtggacattgtcgcgctgtccttcgttcaaacggttgaggatgttgaggaggtcaaggcgatcattgccggtcgcgcgcctctggtggcaaagctcgagaagcctgccgcgatcattcatctggaagcaattgtcgcggcggctgacgcggtaatggtggcgcgaggcgatctgggcgttgagtttgcacccgaggaggtcccggtcattcagcgtcgcatcgtgcgcgtagcgcgtgctctggggcggccggtaatcgtggcgacgcagatgctggaatcgatgatcgagaattctgcgcccacgcgggctgaagcctcggacgtggcgacggcgatctatcagggcgcggacgctgtcatgctgtccgccgagacggctgtggggcgccatccggcaacggcggtggcgatcatgtcccgcatcatacgggccacggaaggcgcggatgactatcgccgctcgcttgccgagttctgcggagaggctcaggccgaaaatgcgatcgacattgttgcgcaggctgcgctcacgatggcggaagcggaaggcgctgccgcgcttgccctgcgcaccggcgcattcgagcggctggcgcggttcgcccgtgtgcgcgggtgcgtaccgattctttacggatcgctcgacgatcagcggcttcgccaggcgtgtcttctctggggcgttcacccccaaaggctgaatgcaggcacggagaactggtatcgcgacctgatgaaggcagctggcctggaaggccgtgtcacctacgcacgctggtcaggagatgaggaacgcttcgcctgggaaatcggggtgggccgcggcgcggacggcaagccgattactggcgtatga

SEQ ID NO: 8610 - protein, 474 aa, Hyphomonas neptunium ATCC 15444
MIKSHLQGENAKIVATLGPGSRSPREVRALAEAGVDVFRLNFSHGEHAAHLEALKAVRAAEAAVGWPLATLADLQGPKVRVGKFDGGSLKLGFRKEYRIIVGETAPDPETIPVPHAEIVAILEEGDTILADDGKLIFTVISGGSEPRVRAEVPGKLGDKKGFTVRGKALPVRALTEKDRADLDFALEIGVDIVALSFVQTVEDVEEVKAIIAGRAPLVAKLEKPAAIIHLEAIVAAADAVMVARGDLGVEFAPEEVPVIQRRIVRVARALGRPVIVATQMLESMIENSAPTRAEASDVATAIYQGADAVMLSAETAVGRHPATAVAIMSRIIRATEGADDYRRSLAEFCGEAQAENAIDIVAQAALTMAEAEGAAALALRTGAFERLARFARVRGCVPILYGSLDDQRLRQACLLWGVHPQRLNAGTENWYRDLMKAAGLEGRVTYARWSGDEERFAWEIGVGRGADGKPITGV

SEQ ID NO: 8611 - DNA, 1440 bp, Rhizobium leguminosarum bv. viciae 3841
  CDS (1)..(1440): transl_table=11
atgaagcgtaatcgcaaagttaaaatcctcgccaccctcgggccagcctcctccgaggaatcgatgatcgagaagctgcaccaggccggtgccgatgtcttccgcatcaatatgagccatgcgagccacgacatgatgcgtatgctcatccagcgcatccgctcggtcgaggcgcgctccggccggccgatcggcattctcgccgacctgcagggaccgaaactgcgtgtcggcaagttcgtcgacggcaaggtggatctgaggcccggccagaccttcacgctcgacaacaacgaagcgctcggcgatcagagccgcgtctatctgccgcaccccgagatcctggagtcggtgcagcccggccaccgtctgctgatcgacgacggcaagctcgccctgcgcgcagaaaaatgcgacggcaagagcatcgtcacgactgttatttcgggcacgcgcatctccgaccgcaagggcgtcagccttcccgacacgctgctcggcgtcggcgcgctgacggacaaggaccgcgccgatctcgacgcagtgcttgccaccgacgatgtcgactgggtggcgctttccttcgtccagcgtcccgacgaccttgccgaagtgcgcaagatcgcccgcggccgcgtcggcctgatgtcgaagatcgaaaagccgcaggctcttgagcgcatcgaggaaatcatcgaactgtcagacgcattgatggtcgcccgcggcgatctcggcgtcgaaatgccgctcgaatcggttcccggcatccagaagcagctgatccgtgcctgccgccgttcgggcaagccggtggtcgttgccacgcagatgctggaatcgatgatctccgcgccggtgccgacacgcgccgaagtttccgacgtcgcgaccgccgttttcgaaggtgctgatgccgtcatgctctcggccgaatcggcctcgggcgactatcccgtcgaagctgtgacgacgatggcgtcgattgccaccgccatcgagcgcgagccgcattatcctggcatcatctatgcccagcgtgcccagccggaagcgaccggcgccgatgcgatttcgctggccgcccgtcagatcgccgaaacgctgaagctgtcggcgatcgtctgttatacctcgtcgggcacgacaggccttcgcgcttcgcgcgagcgtccgcaggtgccgatcctggcgctgtcgccgatcatcaagacggcgcgccgtcttgccgtcgtctggggcctgcattgcgtcgtcacccatgacgcgaccgatctcgacgacatggtcaaccgcgcctgccgcattgtcgcggacgaaggcttcggcaagccgggcgatcgcatcatcatctcggccggtgtgccgctcggcacgcccggcgccaccaacatgatccgcatcgcctatatcggctccgacggccagagcggcgtctga

SEQ ID NO: 8612 - protein, 479 aa, Rhizobium leguminosarum bv. viciae 3841
MKRNRKVKILATLGPASSEESMIEKLHQAGADVFRINMSHASHDMMRMLIQRIRSVEARSGRPIGILADLQGPKLRVGKFVDGKVDLRPGQTFTLDNNEALGDQSRVYLPHPEILESVQPGHRLLIDDGKLALRAEKCDGKSIVTTVISGTRISDRKGVSLPDTLLGVGALTDKDRADLDAVLATDDVDWVALSFVQRPDDLAEVRKIARGRVGLMSKIEKPQALERIEEIIELSDALMVARGDLGVEMPLESVPGIQKQLIRACRRSGKPVVVATQMLESMISAPVPTRAEVSDVATAVFEGADAVMLSAESASGDYPVEAVTTMASIATAIEREPHYPGIIYAQRAQPEATGADAISLAARQIAETLKLSAIVCYTSSGTTGLRASRERPQVPILALSPIIKTARRLAVVWGLHCVVTHDATDLDDMVNRACRIVADEGFGKPGDRIIISAGVPLGTPGATNMIRIAYIGSDGQSGV

SEQ ID NO: 8613 - DNA, 1452 bp, Pseudomonas aeruginosa UCBPP-PA14
  CDS (1)..(1452): transl_table=11
atgtccgttcgccgcaccaaaatcgtcgccaccctcggcccagccagcaattccccggaagtgctggagcaactgatcctggccgggatcgacgtcgcccgcctcaacttctcccacggcacccccgatgaacaccgcgcccgcgccaggctggtgcgcgaactggcggccaagcacggccgcttcgtcgccctgctcggcgacctgcaaggaccgaagatccgcatcgccaagttcgccaacaagcgcatcgaattgcaggtcggcgacaagttccgcttctccaccagccacgcccgcgacgccggtacccaggaagtggtcggcatcgactacccggacctggtgaaggactgcggggtcggcgatgaactgctgctggacgacggcagggtggtgatggtggtcgaggaagtcgccgccgacgaactgcgctgccgggtgctgatcggcggcccgctgtccgaccacaagggcatcaaccgccgcggcggcggtctcaccgcgccggcgctgaccgacaaggacaaggccgacatcaagctggccgcggacatggacctggactacgtggccgtttccttcccgcgcgacgccaaggacatggaatacgcccgccgcctgctcaccgaggccggaggcaaggcctggctggtagccaagatcgagcgcgccgaggcggtcgccgacgacgacgccctcgacggcctgattcgtgccagcgacgcggtgatggtggcccgtggcgacctcggcgtggaaatcggcgatgccgagctggtcggcatccagaagaagatcatcctgcacgcccgccgcaacaataaagtggtgatcaccgcgacccagatgatggagtcgatgatccacagcccgatgccgacccgcgcggaagtctccgacgtggccaacgccgtgctcgactacaccgacgcggtgatgctctcggcggaaagcgccgccggcgagtacccggtggaagcggtgcaagccatggcccgcgtctgccagggcgccgagaagcacccgaccagccagaaatccagccaccgcctcggccagactttcgaccgctgcgacgagagcatcgccctggcgtcgatgtacacggccaaccacttcccggggatcaaggcgatcatctgcctgaccgaaagcggcttcaccccgctgatcatgtcgcgcatccgctcgtcggtaccgatctacgcctactccccgcaccgcgagacccaggctcgcgtggcgatgttccgcggcgtggaaaccatccccttcgacccggcggcgctgccggcggagaaggtcagccaggccgcggtcgacgagttgctcaagcgcggcgtggtgaccaagggcgactgggtgatcctgaccaagggcgacagctacaccgcccagggcggcaccaacaccatgaaggtgctgcacgtcggcgacctgctggtataa

SEQ ID NO: 8614 - protein, 483 aa, Pseudomonas aeruginosa UCBPP-PA14
MSVRRTKIVATLGPASNSPEVLEQLILAGIDVARLNFSHGTPDEHRARARLVRELAAKHGRFVALLGDLQGPKIRIAKFANKRIELQVGDKFRFSTSHARDAGTQEVVGIDYPDLVKDCGVGDELLLDDGRVVMVVEEVAADELRCRVLIGGPLSDHKGINRRGGGLTAPALTDKDKADIKLAADMDLDYVAVSFPRDAKDMEYARRLLTEAGGKAWLVAKIERAEAVADDDALDGLIRASDAVMVARGDLGVEIGDAELVGIQKKIILHARRNNKVVITATQMMESMIHSPMPTRAEVSDVANAVLDYTDAVMLSAESAAGEYPVEAVQAMARVCQGAEKHPTSQKSSHRLGQTFDRCDESIALASMYTANHFPGIKAIICLTESGFTPLIMSRIRSSVPIYAYSPHRETQARVAMFRGVETIPFDPAALPAEKVSQAAVDELLKRGVVTKGDWVILTKGDSYTAQGGTNTMKVLHVGDLLV

SEQ ID NO: 8615 - DNA, 1764 bp, Pediococcus pentosaceus ATCC 25745
  CDS (1)..(1764): transl_table=11
atgaagaaaaccaaaatcgtttcaacacttggtcctgcaagtacttctgttgacacaattgttaaattaattgaagccggtgctaatgtattccgctttaacttttcacatggtgaccatgaagaacatctaggtcgttataacatggttaaagaagcagaaaagattactggcaagtcagtaggtattttgcttgatacaaagggtgctgaaatccgtacaactccacaaaaagatggtaaccaagaatatcacacaaatgataaggttcgcatctcaatggatgacactttggaaacaacaaaagaaaagattgctgttacatatgatggactttttgatgacgttcatgttggtggacacgttctttttgatgatggacttcttgattttaagattgacgaaaaagatgaagaaaaccgcgaattagttgctcatgcaactaacaatggtgttcttggatcacgtaagggtacaaatgctcctggtgtttcaattaacttacctggtattactgaaaaagatgctgatgatattcgttttggtcttgaatcaatgaacatcaacttcatcgctgcaagtttcgtacgtaagccacaagacgttcttgaaattcgtgaattgttggaagaaaagaacatggaagatgttcaaattttccctaagatcgaatcacaagaaggtattgacaacacagacgaaatcttgaaagtttcagatggtattatgattgctcgtggtgacatgggtgttgaaattccagctgaaaatgttcctttggtacaaaagacattgatcaagaagtgtaatgcagttggtttgcctgttatcacagcaactcaaatgcttgactcaatgatcgaaaacccacgtccaacacgtgctgaagcttctgacgttgctaatgctgtttgggatggtacagatgctactatgctttctggtgaaagtgctaatggtgactaccctgttgaagctgttgctacaatggctaagattgacgaaaaagctgaaaatgctatggctgaagacggaaatcttcaaatcaacacatttgatcaaagtgatgttacagaaacaattagtgctgctgttgctcgtgctgctaagaaccttggtgttaagactatcgttgctgcaacacaatcaggttacacagctcgtatgatttctaagtatcgtccagatgctgacattcttgcaatcacatttgacgaacgtgttcgtcgcggtttgatggttaactggggtgtacacccaatcatcgctgaccgtccatcaacaactgatgaaatgtttgaactagctgctaacaaagctgtagatcttggtcttgctaaagaaggagacttgattcttgttgttgctggtgttccagttggcgaaagtggaacaacaaacatcatgaagttacaactaattggttcaaagcttgcttctggtcaaggtgttggtgatgaaacagttattggtaaagcagttgttgctacatcagctgatgaagctaacaaaaaagctgttgaaggcggagtacttgttacaaagacaactgacaaagactatctaccagcaattgaaaaatcaagtgctttagtagttgaaaatggtggtttgacatcacacgctgcagtagttggtatttcaatgggaattcctgttattgttggtgtacaaaacgcaacttcaatcctttcagatgatgaattgattacagttgactcacgtcgtggtattatctaccatggtgcatcaaactcactataa

SEQ ID NO: 8616 - protein, 587 aa, Pediococcus pentosaceus ATCC 25745
MKKTKIVSTLGPASTSVDTIVKLIEAGANVFRFNFSHGDHEEHLGRYNMVKEAEKITGKSVGILLDTKGAEIRTTPQKDGNQEYHTNDKVRISMDDTLETTKEKIAVTYDGLFDDVHVGGHVLFDDGLLDFKIDEKDEENRELVAHATNNGVLGSRKGTNAPGVSINLPGITEKDADDIRFGLESMNINFIAASFVRKPQDVLEIRELLEEKNMEDVQIFPKIESQEGIDNTDEILKVSDGIMIARGDMGVEIPAENVPLVQKTLIKKCNAVGLPVITATQMLDSMIENPRPTRAEASDVANAVWDGTDATMLSGESANGDYPVEAVATMAKIDEKAENAMAEDGNLQINTFDQSDVTETISAAVARAAKNLGVKTIVAATQSGYTARMISKYRPDADILAITFDERVRRGLMVNWGVHPIIADRPSTTDEMFELAANKAVDLGLAKEGDLILVVAGVPVGESGTTNIMKLQLIGSKLASGQGVGDETVIGKAVVATSADEANKKAVEGGVLVTKTTDKDYLPAIEKSSALVVENGGLTSHAAVVGISMGIPVIVGVQNATSILSDDELITVDSRRGIIYHGASNSL

SEQ ID NO: 8617 - DNA, 1434 bp, Oenococcus oeni PSU-1
  CDS (1)..(1434): transl_table=11
atgaaaaagacaaagattgtttctactttaggtcccgcatccaacgatctaaagattatttccgcattgataaataatgggattaatgttgcccgttttaatttcagtcacggtgaccatgatgagcatgctgctcgtatggccctagtccatgatgctgaaaaaaagaccggcaagttgatcggatttatgcttgatacgaaaggtgcagagattcgtacaactgttcaagatacaccgaacggtaagattgaattcaagaaaggtgacaggcttcgcatttcgatgaatgaaaagattaagggcacaaaagagaaaattgctgtgacctataagggactttatgacgacgtaaaagtcggtggtaaagttttgttcgatgatggcattatcgaaatgaccgttatcagtaaagattccgaaaaaaaagaactgcttgtccaagttgataacgatggagtgctgggcggaagaaaaggcgttaacgctcctggtgttgcaattaaccttcctggaattactaagaaggataaatcagatatcgagttcggtttggaacagggaattgacttcatcgctgcttcctttgttcgtaaggctcaggatgttcttgacatccgtaagttgttgaaaaagcatcatcaagaaaatcatgtcatgatttttcctaagattgaatctcaagaaggaattgataacttcgaatcaatcattgccgtttccgatggtttgatggtaccgcgtggtgatatgggagtcgagattccttatgaagaagtacctgtgattcaaaaaatgatgattcgttacatgaaccgtcttggaaagccggtcattactgctacccaaatgcttgattcgatgattgaaaatcctcgtgcaactcgtgccgaaattaacgatgtcgaaaatgctgtttgggatggcactgatgcgacgatgctttctggtgaatctgccaatggtagttggcctgttgaagctgttaagacgatgtctacatctgatgaatacgctgaaaatcatgttcacgacgacggcaataggatcgatttgagaaacgaaccaaagtcaagtgacacagaagttttggctcaggccgccgttgacgcagcacgcgaggctggtgctaaagcaattgttgcttctacagcatctggctacactgctcgcttaatttccaaatatcgacctgatatgccaattttggcaatcacttacgatgaaaaagttgctaggtctttgactgttaattatgctgtttatccggtcgttaaagatgctccggaaacaacagatgatctgattgaattggccaagaaaactgttcatgatgaaaaattggctaagagagacgacacaatcgttgttactgctggccttccaatcaaaaagcccggcacaaccaatttaattcatgttgtaaagctttaa

SEQ ID NO: 8618 - protein, 477 aa, Oenococcus oeni PSU-1
MKKTKIVSTLGPASNDLKIISALINNGINVARFNFSHGDHDEHAARMALVHDAEKKTGKLIGFMLDTKGAEIRTTVQDTPNGKIEFKKGDRLRISMNEKIKGTKEKIAVTYKGLYDDVKVGGKVLFDDGIIEMTVISKDSEKKELLVQVDNDGVLGGRKGVNAPGVAINLPGITKKDKSDIEFGLEQGIDFIAASFVRKAQDVLDIRKLLKKHHQENHVMIFPKIESQEGIDNFESIIAVSDGLMVPRGDMGVEIPYEEVPVIQKMMIRYMNRLGKPVITATQMLDSMIENPRATRAEINDVENAVWDGTDATMLSGESANGSWPVEAVKTMSTSDEYAENHVHDDGNRIDLRNEPKSSDTEVLAQAAVDAAREAGAKAIVASTASGYTARLISKYRPDMPILAITYDEKVARSLTVNYAVYPVVKDAPETTDDLIELAKKTVHDEKLAKRDDTIVVTAGLPIKKPGTTNLIHVVKL

SEQ ID NO: 8619 - DNA, 1413 bp, Solibacter usitatus Ellin6076
  CDS (1)..(1413): transl_table=11
atgccaaatacaaaaattgtagccacacttgggccggccacagatgcgcccggtgtcttgcgtcaactgctcgccgcaggcgtcgatgtttttcgactgaatgcatcgcacggagcacaggatgcgcatgccgcgcggatcgacgcggtgcgagctgcggcgcgcgaggcgcacgttcacgccgggattctgctggatttgcaggggccgaagatccggctcgggcgctttgaaaatggcggagtgacgctggtgaccgacgccatatttacgatcacgacagagcaggtgatgggcacctccgagcgcgcatcgacgggctattcgcggttcgcgaaggacgtgaaggcgggcgatcgcattctgctcgccgatggcatcatcgaactgatcgcgctcgaatcggacggtgtcagtgtgcaaacccgtatcgtgaacggcggtccgatcggcgaccacaaggggatcaatcttccgggggtgcaggtgagcattccctctctgaccgagaaggacctggccgatctgcattttggattgaacgccggagtcgatatcgtggcgctttcgtttgtgcgcacggcggacgatgtgcggcagttgcgcgaccggctcggggggcggccggtctcgattgtcgccaagatcgaaaagccggagggctacgagaatatcgagccgattctggatgtgacggatggcgtgatggtggcgcgcggggacctgggcgtagagatttcgctggagcgtgtgccgcgaattcagaaatcgatcatccggcgcgcgcggcgcaagggtcggttcgtgattacggcgacgcagatgctggaatccatgatcgagaatccacggcccacacgggccgaggtgagcgatgtcgccaatgcgatttacgatggcacggacgcggtgatgctgtcggcggagacgtcggtcggcaagtatccggtggaagccgtgcgctacatggcgaagatcgcggcggagagcgaggattcgattcgcaagaagggatatatcgacccgcctcaccaaccgcagccatcgaacgcggagatcctggcggatgcggcgcatcacgccgcgcgcgattcgggggcggcggcgatcgtggtgttcagttcgcgcggatctagtgcgcggctggtatcgcggtaccgtccgccggtaggggtgttcgcgatcacgccgcacgatactacggcgcggcaactctccgtcagttacggcgtgaccccgctgctggcgccggatgtctcgagcacggatgaaatgttgagccagatggaccgcgtgctcattgaaggcgggtatctgcagaaggggcagctggtggtgtttgtcgcaggtcagccggtggggcggcccggaacgacgaacctgatgaagctgcatcgcgtgggtctgggatag

SEQ ID NO: 8620 - protein, 470 aa, Solibacter usitatus Ellin6076
MPNTKIVATLGPATDAPGVLRQLLAAGVDVFRLNASHGAQDAHAARIDAVRAAAREAHVHAGILLDLQGPKIRLGRFENGGVTLVTDAIFTITTEQVMGTSERASTGYSRFAKDVKAGDRILLADGIIELIALESDGVSVQTRIVNGGPIGDHKGINLPGVQVSIPSLTEKDLADLHFGLNAGVDIVALSFVRTADDVRQLRDRLGGRPVSIVAKIEKPEGYENIEPILDVTDGVMVARGDLGVEISLERVPRIQKSIIRRARRKGRFVITATQMLESMIENPRPTRAEVSDVANAIYDGTDAVMLSAETSVGKYPVEAVRYMAKIAAESEDSIRKKGYIDPPHQPQPSNAEILADAAHHAARDSGAAAIVVFSSRGSSARLVSRYRPPVGVFAITPHDTTARQLSVSYGVTPLLAPDVSSTDEMLSQMDRVLIEGGYLQKGQLVVFVAGQPVGRPGTTNLMKLHRVGLG

SEQ ID NO: 8621 - DNA, 1452 bp, Magnetococcus sp. MC-1
  CDS (1)..(1452): transl_table=11
atgaaatcaatacgtcgtacaaaaattatcgccacacttggccctaacgcttcaagtcgcgattttatcaaacatttagcgctgaccggcgtggacaccttccgcctaaacttcagccatggttcccatgaagatcatcgtcgtcggcatggttggatccgctctgtcgaagaagagttaggccgccccttgggcattatgatggatctacaaggtcctaaattgcgcatcggtacctttgaaaattctgaagtggagcttgttcggggccaaaagtttgccctctataaagaggagcgcacgggggatatcaacggtgttaccctgccccataatgagctgtttcaggtgatgcgtcccggtttggagttgctgctcaacgatgggcgcatcaatctaagggtcatggaggttgaggattttggggtctgctgtgaggttcgtgtggggggtattctctcagatcgcaagggcttgaatgtacctgccgccatgctgccggtaaaagccctaaccgacaaggatctagaagatctggaatttgggttggaattgggcattgactggtgcgcactaagctttgtacagcgtcctgaggatttacgggaagcccgtaagctgatccatggtcgtgccgccctattggccaagattgaaaagccccaggctgttgataatttggaggagattgttaaagtcgccgatggggtgatggtggcccgtggggatctgggtgttgagtacactcccgagcgtgttccagcggtacaaaagcggcttattcgcatgtgccgagagcagtgcaaaccggttattgtagcgacgcagatgttggagtcgatgattgacgcccccatccccacccgtgccgaggcctcggacgtggccaacgccatctatgacggggccgacgcggtgatgctctctgcggagacagcggtggggtcttatgcgtgtaatgcggtttctgtgatggaccgtattgcccgggtcacagaggcggatcctgactgtctacagcgtaatttgcacacccccttaacatttgacaatagcgacaatgacgccataagcaaggccgcgcgggatgttgccatgagccgtggttgccaagccattgtggcgtttaccaagacgggctcaacggccttacgggtctcgcgtacccgcgcttcggtgcccattttgggtttgacaccggatatacgggtagcccgccgtttaaccatggtgtggggcgtgcacagtgttaataccagtgatgtgagcaactttgctgagatggtgggcaaggctacacgtatctgtcgccgtgaggagttagccaacaccgatgaccgtattgtggtgattgcgggtgtgccgtttggtcaggagggcaccaccaacattctccgcattgcccgcattggtgaggctgagcgtccccttgacgacggcccgctggattaa

SEQ ID NO: 8622 - protein, 483 aa, Magnetococcus sp. MC-1
MKSIRRTKIIATLGPNASSRDFIKHLALTGVDTFRLNFSHGSHEDHRRRHGWIRSVEEELGRPLGIMMDLQGPKLRIGTFENSEVELVRGQKFALYKEERTGDINGVTLPHNELFQVMRPGLELLLNDGRINLRVMEVEDFGVCCEVRVGGILSDRKGLNVPAAMLPVKALTDKDLEDLEFGLELGIDWCALSFVQRPEDLREARKLIHGRAALLAKIEKPQAVDNLEEIVKVADGVMVARGDLGVEYTPERVPAVQKRLIRMCREQCKPVIVATQMLESMIDAPIPTRAEASDVANAIYDGADAVMLSAETAVGSYACNAVSVMDRIARVTEADPDCLQRNLHTPLTFDNSDNDAISKAARDVAMSRGCQAIVAFTKTGSTALRVSRTRASVPILGLTPDIRVARRLTMVWGVHSVNTSDVSNFAEMVGKATRICRREELANTDDRIVVIAGVPFGQEGTTNILRIARIGEAERPLDDGPLD

SEQ ID NO: 8623 - DNA, 1434 bp, Mycobacterium smegmatis str. MC2 155
  CDS (1)..(1434): transl_table=11
atggcgaatcgccgcgcaaagatcgtctgcacgttgggcccggccacggccacgtcgtcggtactgaccgaactcgtcgacgccggaatggatgtcgcccggctgaacttcagccacagcacccacgccgagcactcggcgctgtacggcatggtccgggagatcgccgcccagcgtggccgcgtggtcggcgtcctcgcggacctgcaggggcccaagatccggctggggtgtttcgccgacggtcccgtcgtatgggcgacgggcgagcacgtcacgatcaccacggaggactgcccgggtgaccacgaccgggtctccacgacctacgcgggcctgtcacaggacgtgcgcgcgggtgaccggctgttggtcgacgacgggcgcgtggatctgcgcgtggtggccgtcgacggtcccgacatccggtgcgaggtcgtcgacggcgggccggtcagcgaccacaaggggatatcgctgcccaacatcccggtgagcgttccgccgttgtcggacaaggacatcgaggatctcaagttcgcgctggagctcggcgcggacatgatcgcgatgtcgttcgtgcgcgcacccgaggaggtcgagctcgcgcacaagatcatggacgaggtgggacgccgggtcccggtcatcgcgaaactggagaagcctgaggcggtttcggacctacccgcgatcgtcgaggcgttcgacggtctcatggtcgcgcgcggcgatctcggcgtggagatgcccctggagcagatcccgctggtgcagcgccgcgcgatcgccctgtgccgtcaggcggccaaacccgtgatcgtggcgacgcagatgctcgattcgatggtgtcggaccgccgcccgacacgtgccgaggtgtccgacgtcgccaacgcggtgttcgacagggccgatgcggtgatgctctcggccgagacgagtgtgggcgcggatccggcgcacgccgtcgccaccatggcacgcatcgtcgtcgccgccgagagcggttctggccggggcgagacgcccgaatcggcgctcgtggaggccgtgaacggcacggacgcggtgttcggtgacgcgatcgcggtggcggcctgcgaggtgggacgccggctgggcgccgcggccctgtgctgcttcacgcgcaccggtgacacggcgctgcggttggcccggcagcggtcaccgctgccgctgctggccttcgcgcacgacgacgaggtgcgggggcgcctgacgttctcgtggggtgtcgagtcggcggtgctggcaccgacggagctggccgaatccatgccgggcgaggtgtcgcgtgcgttgctgagcatgggcgcgtgccaccccggcgatgtcgtggtggtcgtctccggaagccgaagcggtgtcgcggggtacaccgattcggtccgggtgctccgtgtcgagtga

SEQ ID NO: 8624 - protein, 477 aa, Mycobacterium smegmatis str. MC2 155
MANRRAKIVCTLGPATATSSVLTELVDAGMDVARLNFSHSTHAEHSALYGMVREIAAQRGRVVGVLADLQGPKIRLGCFADGPVVWATGEHVTITTEDCPGDHDRVSTTYAGLSQDVRAGDRLLVDDGRVDLRVVAVDGPDIRCEVVDGGPVSDHKGISLPNIPVSVPPLSDKDIEDLKFALELGADMIAMSFVRAPEEVELAHKIMDEVGRRVPVIAKLEKPEAVSDLPAIVEAFDGLMVARGDLGVEMPLEQIPLVQRRAIALCRQAAKPVIVATQMLDSMVSDRRPTRAEVSDVANAVFDRADAVMLSAETSVGADPAHAVATMARIVVAAESGSGRGETPESALVEAVNGTDAVFGDAIAVAACEVGRRLGAAALCCFTRTGDTALRLARQRSPLPLLAFAHDDEVRGRLTFSWGVESAVLAPTELAESMPGEVSRALLSMGACHPGDVVVVVSGSRSGVAGYTDSVRVLRVE

SEQ ID NO: 8625 - DNA, 1443 bp, Azoarcus sp. BH72
  CDS (1)..(1443): transl_table=11
atgccccgccacaccaagatcgtcgccaccctcggcccggcctcctccgacccgcaggtactcgaacgcatggtccacgccggcgtggacgtggtgcggatgaacttctcccacggcaaggcggaagaccatgtcgcccgcgccgcggcgatccgcgaggcgtcggcgcgtgccggacggccggtcggcatcctcgccgacctgcaggggccgaagatccgcgtcggcaagttcgagaacggccgggtgacgctgacccgcgacgccgagttcatcctcgacgcccactgcaacctcggcaacggccagcgcgtggggctggactacaaggacctgcccaaggacgtgcgcgccggcgacatcctgctgctcgacgacggccgcctcaagctgcaggtggagcgcgtgctcggcgccgagatccacacccgggtacgggtcggaggcgagttgtccaacaacaagggcatcaaccgccagggcggcggcctcaccgcgccggcgctcaccgccaaggacatggacgacatcaagaccgcagcgcagatcggcgtcgatttcctcgcggtgtccttccccaagagcgcggccgacatgtacatggcccgccagctgatgcgcgcggccggcggcgacgcgctgctgatcgcgaagatcgagcgcaccgaggcggtggcgaacctggaggaaatcctcgccgcctccgacggcatcatggtggcgcgcggcgacctcgcggtggaggtgggcgacgccgcggtgccggcgctgcagaagaagatgatccgcgccgcgcgcgaccacaacaagctgacgatcaccgcgacccagatgatggagtcgatgatcaccagcccggtgccgacccgcgccgaggtgtcggacgtcgccaacgcggtgctcgacggcaccgatgcggtgatgctgtcggccgagaccgccgccggcagctttccggtggaagtcgtcgaggcgatgagccgcgtctgcctggaagccgagaagtcggccgaggtcagcctcgaccgcgaggtgctcgaccgggtgttcacccgcatcgaccagtcgatcgcgatggcagcgatctggaccgcctggcacctgaaggtgaaggcggtcgcctcgctcacccagaccggctccaccgcgctgtggatgagccggctcaactgcggcgtgccgatctacgcgctgacgcccgaaatcggcgcgcgcaaccagatgacgctctaccgcgaggtctatccgctgctgatgagccagacccacttcgaccgcgacgtgctgctgtgggaagccgagcaggtgctgctcgaccagggcgtggtggaatacggcgacctcatcgtgctcaccatcggcgagccgatcggcgcctcgggcggcaccaacaccctcaagatcgtgcgcgtgggcgaacacaaggcacccggcgtgcagtaa

SEQ ID NO: 8626 - protein, 480 aa, Azoarcus sp. BH72
MPRHTKIVATLGPASSDPQVLERMVHAGVDVVRMNFSHGKAEDHVARAAAIREASARAGRPVGILADLQGPKIRVGKFENGRVTLTRDAEFILDAHCNLGNGQRVGLDYKDLPKDVRAGDILLLDDGRLKLQVERVLGAEIHTRVRVGGELSNNKGINRQGGGLTAPALTAKDMDDIKTAAQIGVDFLAVSFPKSAADMYMARQLMRAAGGDALLIAKIERTEAVANLEEILAASDGIMVARGDLAVEVGDAAVPALQKKMIRAARDHNKLTITATQMMESMITSPVPTRAEVSDVANAVLDGTDAVMLSAETAAGSFPVEVVEAMSRVCLEAEKSAEVSLDREVLDRVFTRIDQSIAMAAIWTAWHLKVKAVASLTQTGSTALWMSRLNCGVPIYALTPEIGARNQMTLYREVYPLLMSQTHFDRDVLLWEAEQVLLDQGVVEYGDLIVLTIGEPIGASGGTNTLKIVRVGEHKAPGVQ

SEQ ID NO: 8627 - DNA, 1437 bp, Acidovorax sp. JS42
  CDS (1)..(1437): transl_table=11
atgcagatccgccgcgccaccaagatcgttgccaccctgggccccgcctccagcgacccgcaactgctggagcagatgatcgcggcgggcgtgaacgtggtgcgcctgaacttcagccacggcaaggcgcaggaccatgtggagcgcgccgccatggtgcgcgaggccgcccagcgcgccgggcgcgaggtcgccatcatggccgacctgcaggggccgaagattcgcgtgggcaagtttgccgaaggacgggtgatgctggagccgggccagcctttcgtgctggacgcgtcgcgcagcgagcccggcgacctgcagggcgtgggcctggactacaaggaacttccccgcgacgtgaagcccggcgacgtgctgctgctgaacgacggcctcatcgtgctgcaggtggatgccgtgcgcggcgaggcggtgtacaccaccgtgaagatcggcggcgagctgtccaacaacaagggcatcaacaagcaggggggaggcctcacggcgcccgccctcacggccaaggacatggaggacatcaagaccgccatgagcttccaggccgactatgtggccgtgagcttccccaagaacgccaccgacatggagatggcgcgccagctgtgcaacgttgccgcggccgagttccgccacaagcccggcctgatcgcgaagatcgagcgtgcagaggccgtgccgctgctggaggagatcctgcgcgtgtccgacggcatcatggtggcgcgcggcgacctggccgtggaggtgggcaacgccgcggtgcccgcgctgcagaaaaagatgatccgcatggcgcgcgacatgaacaaggtggtgatcaccgcgacccagatgatggagagcatgatcgccaaccccgtgcccacgcgcgccgaagtgagcgacgtggccaacgccgtgctggacggcaccgacgccgtgatgctcagcgccgagacggcggccggcaagtacccgctggacacggtgcgggagatggccgctatctgcgccgccgcggaagcggccgaagacctggagcgcgactccgacttcatcggccagaccctgggccgcatcgaccagtccatcgccatgggtgcgctgttcacggcgcaccacctgggtgccaaggccatcgtggcgatgaccgacagcggttccacggcactgtggatgagccgccaccgcatccacattcccatctatgcattgacgccgaaggtggccacgcagcggcgcatggcgatgttccgcaacgtgtgcccgttgctcatggacaccagcgccgaccgcgacactgcactggaccaggccgagagccacctgaagatgcgcaacatcgtgcaacagggcgacctgtacgtgatcacctgcggcgagcccatgggtgcgcccggcggcacgaacatgctcaagatctgccgcgcacgatga

SEQ ID NO: 8628 - protein, 478 aa, Acidovorax sp. JS42
MQIRRATKIVATLGPASSDPQLLEQMIAAGVNVVRLNFSHGKAQDHVERAAMVREAAQRAGREVAIMADLQGPKIRVGKFAEGRVMLEPGQPFVLDASRSEPGDLQGVGLDYKELPRDVKPGDVLLLNDGLIVLQVDAVRGEAVYTTVKIGGELSNNKGINKQGGGLTAPALTAKDMEDIKTAMSFQADYVAVSFPKNATDMEMARQLCNVAAAEFRHKPGLIAKIERAEAVPLLEEILRVSDGIMVARGDLAVEVGNAAVPALQKKMIRMARDMNKVVITATQMMESMIANPVPTRAEVSDVANAVLDGTDAVMLSAETAAGKYPLDTVREMAAICAAAEAAEDLERDSDFIGQTLGRIDQSIAMGALFTAHHLGAKAIVAMTDSGSTALWMSRHRIHIPIYALTPKVATQRRMAMFRNVCPLLMDTSADRDTALDQAESHLKMRNIVQQGDLYVITCGEPMGAPGGTNMLKICRAR

SEQ ID NO: 8629 - DNA, 1401 bp, Actinobacillus pleuropneumoniae serovar 1 str. 4074
  CDS (1)..(1401): transl_table=11
atgggtccagctaccgatcgtggtaataatttagaaaaagttatcgctgcaggtgcgaatatggttcgtatgaacttctcgcacggtgtgccggaagatcacatcgaacgtgcaaataaagtgcgtgaaattgcagctagattaggtaaaaccgtagcgattttaggcgatttacaggggcctaaaattcgtgtttctacattcaaagacggtaaaattttcttaaatatcggtgacaaattcactttagatgcggatttaccgcgtggtgaaggtcatcaagatgcggtcggcttagactataaaaacttaccgaacgatgtcgtaccgggtgatattcttttattagatgacggtaacgtacaattaaaagttctttcggttgaaggcgtgaaagtgcatacggaagtgactgtcggtggcccgttatcgaataacaaaggtatcaataagttaggcggcggtttatctgcaccggcattaacggaaaaagataaagaagacattaaacttgcggctaaaatcggtgtagattacttagcggtatcattccctcaatcaagtgcggatttagactatgcgcgtcaattggcacgtgaagcgggattagaagcgaaaatcgtggcgaaagtggaacgtgcggaaaccgttgcaaccgaagaagcgatggatgacattattttaggttctgacgtggtaatggttgcacgtggcgacttaggtgttgaaatcggtgatgcggcgttagtcggcgtacaaaaacgtttaattcgtcgtgctcgtaaattaaaccgcgtagtcattaccgctacccaaatgatggaatcgatgatcaaaaaaccgatgccgacacgtgccgaagttatggacgtagcgaatgcggtattagacggtacggatgcggtaatgctttccggtgaaacggcaaacggcgattatccggttgaaacggttaaatcaatggcggaagtctgtttaggtgcggaaacgatgccgagcatcaacatctctcgtcaccgtatggaaggtacattcgcaacgattgatgaagcggttgctatgtctgcgatgtacaccgctaaccacttggaaggcgtatctgcgcttatcgctttaacccactcgggcgaaacggcgaaattaatgagtcgtatcagttcaggtttaccgatttatgcgttatctcgtaatcaacaagcattaaatcgtaccgcgctttatcgcggcgtaacaccggtattctatgatgaagaaagccgtactttcgaaggtgcgaaaaaagctatcgctctattaaaagagaaaggctatttaatgtccggcgatttagtattattaactcaaggtgacgagttaaaagaaggcggtacgaacaccagccgtttattaaaagttgaataa

SEQ ID NO: 8630 - protein, 466 aa, Actinobacillus pleuropneumoniae serovar 1 str. 4074
MGPATDRGNNLEKVIAAGANMVRMNFSHGVPEDHIERANKVREIAARLGKTVAILGDLQGPKIRVSTFKDGKIFLNIGDKFTLDADLPRGEGHQDAVGLDYKNLPNDVVPGDILLLDDGNVQLKVLSVEGVKVHTEVTVGGPLSNNKGINKLGGGLSAPALTEKDKEDIKLAAKIGVDYLAVSFPQSSADLDYARQLAREAGLEAKIVAKVERAETVATEEAMDDIILGSDVVMVARGDLGVEIGDAALVGVQKRLIRRARKLNRVVITATQMMESMIKKPMPTRAEVMDVANAVLDGTDAVMLSGETANGDYPVETVKSMAEVCLGAETMPSINISRHRMEGTFATIDEAVAMSAMYTANHLEGVSALIALTHSGETAKLMSRISSGLPIYALSRNQQALNRTALYRGVTPVFYDEESRTFEGAKKAIALLKEKGYLMSGDLVLLTQGDELKEGGTNTSRLLKVE

SEQ ID NO: 8631 - DNA, 1776 bp, Crocosphaera watsonii WH 8501
  CDS (1)..(1776): transl_table=11
atgacatcctcttctatatcccgtcgcacaaaaatcgtggcaaccatcggtccagctactcaaaacaaagaaattttaaggcaattgatcttagcaggggcaaccacgttacgactcaatttttctcataatgatcatgactatcatcaaaatagtattcgcctgattcgtcaaacggcttttgaattaaatcaaccagtggctattttacaggacttacaggggccaaaaattcgtctgggtcaatttgccaacggaccaattaccgttcaaccaggggatgtttttatcttgaccagtcgtgaagttgaatgcaatcaaactatcagttatgtctcctatgagcatctggccgatgaagtgcctgagaaggcgagaattttaatggatgatggcaaagtagaaatgctagtggagaaagtggataaggagaataaggatcttcattgtcgggttgtggttgggggtgtgttgtccgatcgcaaaggggtaaattttccaggggtttatttatccgtgaaggctttaacggagaaagataaacgggatttgatgtttggtttagatcaaggagtagactgggtggccttgagttttgtgagaaaccctcaagatattctcgaaattaagggattgattgctagtgccggcaaaaatgttcctgtcattgccaaaattgaaaaacacgaggccatcgaggatatggaagaaattctctccttgtgtaatggggtaatggtggcacggggagatttaggggtagagttacccccagaggatgttcctatcctccaaaaacgcctaatttctacggctaatcgtttgggtattccggtgattactgctactcaaatgttagatagtatggccagtaaccctcgtcccacccgtgcagaagtgtccgatgtggctaacgctattttggatggtactgatgcggtaatgttatccaacgagactgctgtaggtaaatatcccgtggaagcagtggcaactatggccactattgcggaaaggatcgaacgagaaccaactatccctaaagtcctctcagaaaagaagcagtcagtcactaattccatttcctcagcggttagtcacattgctcaagaattgaatgcggcggccattatgtctttgacaaaaacgggatcaacggcccgtaatgtttctaagtttcgccctcaaatacccattgtagcggttactccccatgtggatgtggctaggcagttacagttagtctggggggttaaacctttgctggtgcttgatttagcttcacctaatcaaacctttcaatctgcggttaatgtggcccaagaaaataattggctcaaggatggggatctagtggtgatgacggccggaacccttcaaggggtggcaggatctacggatttgattaaggtagaaatggtcaaggcggttttgggcaaaggtgtgggtattggtcagggagcagccagtggacgggcaagaattgctcataacgccagggaattgggcaattttgaacctggggacattttggtggttccgggaaccaatgcggagtttgtggaaatgatgcgtaaagcttcgggtattattaccgaagaagcaagtttaactagccatgcggcagttattggactaaggttgggtgttcctgtaattattgattttaaggaggcaacggctaatattagagaaggggcaattattacggttgatgctgaaaaaggccaggtttattcgggtctggttacgagtaataataacggcaataagtga

SEQ ID NO: 8632 - protein, 591 aa, Crocosphaera watsonii WH 8501
MTSSSISRRTKIVATIGPATQNKEILRQLILAGATTLRLNFSHNDHDYHQNSIRLIRQTAFELNQPVAILQDLQGPKIRLGQFANGPITVQPGDVFILTSREVECNQTISYVSYEHLADEVPEKARILMDDGKVEMLVEKVDKENKDLHCRVVVGGVLSDRKGVNFPGVYLSVKALTEKDKRDLMFGLDQGVDWVALSFVRNPQDILEIKGLIASAGKNVPVIAKIEKHEAIEDMEEILSLCNGVMVARGDLGVELPPEDVPILQKRLISTANRLGIPVITATQMLDSMASNPRPTRAEVSDVANAILDGTDAVMLSNETAVGKYPVEAVATMATIAERIEREPTIPKVLSEKKQSVTNSISSAVSHIAQELNAAAIMSLTKTGSTARNVSKFRPQIPIVAVTPHVDVARQLQLVWGVKPLLVLDLASPNQTFQSAVNVAQENNWLKDGDLVVMTAGTLQGVAGSTDLIKVEMVKAVLGKGVGIGQGAASGRARIAHNARELGNFEPGDILVVPGTNAEFVEMMRKASGIITEEASLTSHAAVIGLRLGVPVIIDFKEATANIREGAIITVDAEKGQVYSGLVTSNNNGNK

SEQ ID NO: 8633 - DNA, 1569 bp, Kineococcus radiotolerans SRS30216
  CDS (1)..(1569): transl_table=11
atgacgtgggcgcccggcctcggcacgccgggccgcgcaggtgccgggcgggtggcggtgcggtggacgtcgcggtcgtggcgcgccccacccgccggtcccggggcggggcccaataggctcggggtcatgcgcagagcgaagatcgtctgcaccctcgggcccgcggtcgcgggtcacgacgggttgcggtcactggtggacgccgggatggacgtcgcccgactgaacttgagccacggctcccacgacgaccaccgcgcgaacttcgagggggtgcgggcggcggcggccgccaccggacggtcggtggcgatcctcgcggacctgcagggccccaagatccgcctcgggaggttcgccgacgggccccacgacctcgcggtcggtgacgtgttcacgatcaccaccgaggacgtggtggggacccgggagatctgctccacgacctacgccggcctgccgggggacgtgtcggtgggtgacgcgatcctcatcgacgacggcaaggtgggtctcgtggtcaccgccgtcgagggcccgcgggtcaccacgctggtgaccgtccccggcccggtcagcaacaacaagggcatcaacctgcccggggtcgcggtgagcgtcccggcgctgtcggagaaggacgtcgaggacctccgcttcgccctccggctcggcgtcgacatggtcgcgctgtcgttcgtccgctccgccgcggacgccgacgacgtgcacaaggtcatggacgaggaggggatcaccgtccccgtcatcgccaaggtcgagaagccgcaggccgtgcagaacctgcgcgaggtcgtcgccgccttcgacggcatcatggtcgcccgcggcgacctcggcgtcgagctgccgctggaggaggtgccgctggtccagaagctggccatcgagctggcccgccgccaggccaagccggtcatcgtcgccacccagatgctcgagtcgatgatcaccgctccgcgcccgacccgcgcggaggcctccgactgcgccaacgccgtcctcgacggcgccgacgcgctcatgctctccggcgagaccagcgtgggggcgttcccctacgaggccgtccggacgatggcccgcatcatcgagaacaccgagacccacggcgccgagcggatcgccgccctgggcaccgtgccgcacaccaagggcggggccatcaccctggccgccgccgaggtcggcaagcagctcgacgccaagctgctggtgacgttcacccagtccggcgactccgcgcgccggctgtcccggctgcgctcgggcatcccgctgctggccttcacccccgacgaggcgacccgccggcgcctggccctgtcctggggcatcgagccggagttcgcggccttcatctccaccaccgacgagatggtcaaggaggtggaccgccgcctgcaggagatgggccgctgcgccgtcggcgacctcgtcgtcatcgtggccggtgcccccccggggatcgtcggctccaccaacgccctgcgcgtgcaccgcatcggcgacgcgacgtcggggatgtcggcggcctacgcctga

SEQ ID NO: 8634 - protein, 522 aa, Kineococcus radiotolerans SRS30216
MTWAPGLGTPGRAGAGRVAVRWTSRSWRAPPAGPGAGPNRLGVMRRAKIVCTLGPAVAGHDGLRSLVDAGMDVARLNLSHGSHDDHRANFEGVRAAAAATGRSVAILADLQGPKIRLGRFADGPHDLAVGDVFTITTEDVVGTREICSTTYAGLPGDVSVGDAILIDDGKVGLVVTAVEGPRVTTLVTVPGPVSNNKGINLPGVAVSVPALSEKDVEDLRFALRLGVDMVALSFVRSAADADDVHKVMDEEGITVPVIAKVEKPQAVQNLREVVAAFDGIMVARGDLGVELPLEEVPLVQKLAIELARRQAKPVIVATQMLESMITAPRPTRAEASDCANAVLDGADALMLSGETSVGAFPYEAVRTMARIIENTETHGAERIAALGTVPHTKGGAITLAAAEVGKQLDAKLLVTFTQSGDSARRLSRLRSGIPLLAFTPDEATRRRLALSWGIEPEFAAFISTTDEMVKEVDRRLQEMGRCAVGDLVVIVAGAPPGIVGSTNALRVHRIGDATSGMSAAYA

SEQ ID NO: 8635 - DNA, 1431 bp, Croceibacter atlanticus HTCC2559
  CDS (1)..(1431): transl_table=11
atgcctaatagaaagaaaaccaaaattgtagcaaccttaggaccatcaacgtctactaaaacggtcttaaaacaaatgcttgaagcaggtgccaatgtatttagaattaatttttctcatgctaattatgatgatgtaaagaaacgcatctcaatgattagagagcttaatgaaaagtatggatttaacgcatctatccttggagatttacaaggccctaaattacgtgtaggtgtaatgaaaggtgaagttattgtaagtaaaggcgataaattatccttttgtaccggcgaagaatttgaaggaacagcagatcgtgtgtatatgaactacgacaccttcccaagagatgtaaaggcaggcgagcgtattcttcttgatgatggtaaactaatctttgaagttttagaaacaaataaaaaagatgaagtaaaagccaaagttatacaaggtggtcctttacgttctagaaaaggagtaaacctacctaataccaacatttctttacctgcattaacagaaaaagatgttaaagatgccatttttgcttgtgaacaaggagtagattggatggcattatcttttgtacgtcacgcagaagacctgcaagaattacaagaactcattaaaaaacatagcgagcacaaaattccaataatagccaagatagaaaagccagaaggcgttgagaacatagataagatagttgcttactgtgatggtttaatggttgcgcgtggagatttaggtgttgaaattccagcacaagaagtacctttaatacaaaagcaattagtactaaaagcaaagcaagcaagaatacctgtaattattgctacacagatgatggaaacaatgattactagccttacgccaacacgtgcagaggttaatgatgtagcaaactctgtgatggatggtgcagatgcagtaatgttaagtggagaaacctctgtaggacaatatccagttcaggtaattcaaaaaatgtgtcagattcttaaaactgtggaagactctccattaattcacgtaccagaagagccaccacatattcgtactaagcgatacataacaaaatcaatatgttatcatgcagcacatatggctaatgaaattaaggctaaagctatttgtacactaacaaatagtggttatacagcatttcaaatttctgcttggagacctagtgcacatatattagcatttacatcaaacaaacgcatacttacacaattaagcttactttggggtgtgcatgcgtactactatgacaagtttactagtacagacgatactgtagaagatgttaacggtattgcaaaacaaatgaagtatgttaaaaaatctgaatttgttataaacctagcagcaatgccaatttcagataaaggtatggtaaacacattaagagtttcagagattaaataa

SEQ ID NO: 8636 - protein, 476 aa, Croceibacter atlanticus HTCC2559
MPNRKKTKIVATLGPSTSTKTVLKQMLEAGANVFRINFSHANYDDVKKRISMIRELNEKYGFNASILGDLQGPKLRVGVMKGEVIVSKGDKLSFCTGEEFEGTADRVYMNYDTFPRDVKAGERILLDDGKLIFEVLETNKKDEVKAKVIQGGPLRSRKGVNLPNTNISLPALTEKDVKDAIFACEQGVDWMALSFVRHAEDLQELQELIKKHSEHKIPIIAKIEKPEGVENIDKIVAYCDGLMVARGDLGVEIPAQEVPLIQKQLVLKAKQARIPVIIATQMMETMITSLTPTRAEVNDVANSVMDGADAVMLSGETSVGQYPVQVIQKMCQILKTVEDSPLIHVPEEPPHIRTKRYITKSICYHAAHMANEIKAKAICTLTNSGYTAFQISAWRPSAHILAFTSNKRILTQLSLLWGVHAYYYDKFTSTDDTVEDVNGIAKQMKYVKKSEFVINLAAMPISDKGMVNTLRVSEIK

SEQ ID NO: 8637 - DNA, 1446 bp, Roseovarius nubinhibens ISM
  CDS (1)..(1446): transl_table=11
atgagacgacaccgcaatgtcaagatcgtggccacgcttggccccgcctccgagacctatgaaaccatccgcgccctgcatgaggcgggggcggatgtgttccggctcaacatgagccatggcgaccacgctggcatccgcgagaaacaccgtattatccgcgaggtcgagcgcgatctcaacagcccgattgccattctggccgatcttcaggggccaaagctccgggttgggacctttggcaacgggccggaggagttggcgcaaggcgcgacgttccggctcgatctcgataaggcagagggcgatggcagccgggtctgcctgccgcatcccgagattttcgcggcgctgcagccgggggcgcatcttttggtcaatgacggcaagatccgtttgcgggtgcgcgagtgcggcgcggatttcgccgaatgcgaggtggtcatcggcggggtgatttcggaccgcaagggcgtcaacgtgcccgatgtcgagctgccgcttgcggcgctgtcagaaaaggaccgcaaggatctcgaatttgtctgtcagctcggggtggattggctcgcgctcagcttcgtgcagcggcccgaggatgtgaccgaggcgcgcgagcttgccaatgggcgggcggcgattctgtcgaagattgaaaagccctcggcggtggagcggttcagcggtatcctcgccgcatcggacgggatcatggtggcgcgcggcgatctcggggtcgagcttccggttcagaatgtgccgccgatccagaaacggctcgtccgggcgtgccgggcagcggcgaaaccggtcatcgtggcgacccagatgctcgagtcgatgatcgagagcccaatgccgacccgcgctgaggtgagcgatgtggccacggcgatctatgaaggggcggatgcgatcatgctctcggcagaaagtgcggcgggcagctatccggtcgaggcggtgcgcaccatggacaatgtggcgcgcgaggtcgagggcgacccgacctatacacagatcatcgaggcgtcgcgcaaggcgcagcgcaacacggtggccgatggcatcgtggcggcggcgcgtgagattgccgagacggcagatatcaaggtcatctgctgtttcacccaatcggggacgaccgcgctcttgaccgcgcgggaacggccgcgggtgccgatcatggcgctcacctcgctgcgcggcacggcgcggcggctggcgctgagctggggggtgaactgcgtgatgaccgaagagctcacccggttcaagctggcggtggtgaatgcggcgcgggcggcacgggccgagggctatgccgaggcgctcgatcagatcgtggtgaccgccggggtgccgttcaacgtgccgggaacgacgaatatcctgcgcgtggcaccttgtcaggaaagtttgatctattcgaccgatccgggttaa

SEQ ID NO: 8638 - protein, 481 aa, Roseovarius nubinhibens ISM
MRRHRNVKIVATLGPASETYETIRALHEAGADVFRLNMSHGDHAGIREKHRIIREVERDLNSPIAILADLQGPKLRVGTFGNGPEELAQGATFRLDLDKAEGDGSRVCLPHPEIFAALQPGAHLLVNDGKIRLRVRECGADFAECEVVIGGVISDRKGVNVPDVELPLAALSEKDRKDLEFVCQLGVDWLALSFVQRPEDVTEARELANGRAAILSKIEKPSAVERFSGILAASDGIMVARGDLGVELPVQNVPPIQKRLVRACRAAAKPVIVATQMLESMIESPMPTRAEVSDVATAIYEGADAIMLSAESAAGSYPVEAVRTMDNVAREVEGDPTYTQIIEASRKAQRNTVADGIVAAAREIAETADIKVICCFTQSGTTALLTARERPRVPIMALTSLRGTARRLALSWGVNCVMTEELTRFKLAVVNAARAARAEGYAEALDQIVVTAGVPFNVPGTTNILRVAPCQESLIYSTDPG

SEQ ID NO: 8639 - DNA, 1446 bp, Oceanicola batsensis HTCC2597
  CDS (1)..(1446): transl_table=11
atgagacggcagcgcagcaccaagatcgtggcgaccctgggtccctcgtcttcggattacgagatgatccgccggcttcacgaaagcggcgcggatgtctttcggctgaacatgagccacggcagccatgacgagatccgcgaacgacaccgcatcatccgcgaggtcgagcgcgatctcgacagcaccatcggcatccttgcggacctgcaggggcccaagctgcgcgtcggtgtcttcgcccgcggcgaggaggacctggccgaaggggcacggttccggctcgacctgaaggatgcggagggggatgcgacacgggtgacgctgccgcatcccgagatcttcgaggtgctggaggcgggggcggagctgctggtcaatgacggcaagatccggctgaaggtggtggaatgcggcgccgatttcgcggattgcgaggtgatggccggcggcacgatctcgaaccggaagggggtgaacgtgccggacgtggtgctgccgctcgccgcgctttcggagaaggaccgctcggacctggagttcgtctgccaactgggcgtcgactggctggcgctgagcttcgtccagcggcccgaggacgtgaccgaggcgcgggaactcgcggcgggacgcgcggcgatcctgtcgaagatcgagaaaccggcggcggtgaaggccttcgatgcgatcctggacgtgtccgacgggatcatggtggcgcgcggcgatctgggggtggagctgccggtgcagaacgtgccgccgatccagaaacggctggtgcgccgctgccgggcggtggccaaacccgtgatcgtggcgacgcagatgctggaaagcatgatcgagagcccgatgccgacccgggccgaggtctcggacgtggcggcggcgatctacgaggggacggacgccgtcatgctctcggcggaatcggctgccggccagtacccggccgaggcggtgacgaccatggaccgcgtcgcccgagaggtggaaagcgatcccacctaccgcgagatcatcgaggcgtcgcgccggaccgtgcgcggctcggtcgcggacgggatcgtcgtcgcggcccgcgagatcgccgagacgaccgacatccgcgtgatctgctgtttcacccatggcggaaccacggcgctgctgacggcgcgggagcgtccgcatgtgccgatcctcgcgctcacgccgcttcgggggaccgctcgcaagctgacgctgagctggggggtcaactgcgtcatgaccaacgagttgagccgcttcaaacaggcggtggtcaacggggcccgggccgcgcgaagccggggcttcgccaccgaggccgaccagatcgtggtgaccgccggtgtccccttcaaccagccggggacgacgaacatcctgcgggtcgccccctgcgaagaacgtctgatcttcgcctcggacccggaatag

SEQ ID NO: 8640 - protein, 481 aa, Oceanicola batsensis HTCC2597
MRRQRSTKIVATLGPSSSDYEMIRRLHESGADVFRLNMSHGSHDEIRERHRIIREVERDLDSTIGILADLQGPKLRVGVFARGEEDLAEGARFRLDLKDAEGDATRVTLPHPEIFEVLEAGAELLVNDGKIRLKVVECGADFADCEVMAGGTISNRKGVNVPDVVLPLAALSEKDRSDLEFVCQLGVDWLALSFVQRPEDVTEARELAAGRAAILSKIEKPAAVKAFDAILDVSDGIMVARGDLGVELPVQNVPPIQKRLVRRCRAVAKPVIVATQMLESMIESPMPTRAEVSDVAAAIYEGTDAVMLSAESAAGQYPAEAVTTMDRVAREVESDPTYREIIEASRRTVRGSVADGIVVAAREIAETTDIRVICCFTHGGTTALLTARERPHVPILALTPLRGTARKLTLSWGVNCVMTNELSRFKQAVVNGARAARSRGFATEADQIVVTAGVPFNQPGTTNILRVAPCEERLIFASDPE

SEQ ID NO: 8641 - DNA, 1488 bp, Erythrobacter sp. NAP1
  CDS (1)..(1488): transl_table=11
atgtcaaaacgcgataacactcggatcgacccgcgcggtcgcaaggtcaagattctggcgacgatcggcccggccagccgctcacccgaaatgctgcgcaagctgttcaaggccggcgccgacgcgttccgagtgaacatgagccacggcgagcatgccgatcatgcaaaggccattgcctctattcgcgcgctggaaaaggaattcgctcgccccatcgcgatcctcgccgacctccaagggcccaaactgcgcgtcgggccgttcaaggatggtcaggcagtgctgcgccattcagggcacttcacgctcgaccgcgacgatacgccgggcgacgagacccgtgtctgcctgccccatgccgagctgttcggcatccttgagcgtgggcagcgtctgctcatcaatgacggcaagatccgtctcttggtgaaggaagcagacgaggacaagatcttctgcaccgccgaggttggcggggtgatttcggaccgcaaaggcgtgaatgtacccgatgccgaggttccgatcccggcgctgacggacaaggacaagaaagacctcgccttcgcggtcgaacagggtgtcgactggattgctctgagcttcgtccagcgccccgccgacctcgctgaagcacgcaaactgatcgcgtcgcacgcagccggaggccattgccctgccctgtgcgcaaagatcgaaaagccgcaggcggtcggacggctcgaagagatcatcgaattgtccgatgcgatcatggtcgcgcgcggcgaccttggcgtcgaacttgagccgcacgaagtcccgccgctgcaaaagcgcatcgtcgctgcgagccgtagtgcaggcaaaccggtgatcgtggcgacgcagatgctcgaaagcatgatcgaaagcccgatgccgacccgcgccgaagtctcagacgtagccaacgcggtctatgacggcgcggacgccgtgatgctgagcgcggaaagcgcagccggagactggcccgaggaatcggtcactatgatgcacaagatcgcagctcaggtggagcgcgacgagggctatcgcgagcgcatccgcatgctcgacacgccgcccgatgcaacgacttcggacgcgctggcgcattcgtgcatgactatcgccgacaccgtcccgatcagcgcgatcacagtcttcacctcttcaggttccactgcacgccgcgtcgcacgcgagcggcccggcacgccgatgctggtcctcaccccgagtatgcgcacagcccgccgggtggcgctcctgtggggcgcacatgcggtggtcacccgcgatatcggcagctttgaagagatgattgccaagggcaagcgcatggcgctgcgtcacgggtttgggaccgctggatcaaagcaggtggtgcttgcaggcgtccccttcggcacgccgggggcgaccaacctgcttcacgtcgtcacgcttgccggtgacgaactcgagaagcaccggaagtaa

SEQ ID NO: 8642 - protein, 495 aa, Erythrobacter sp. NAP1
MSKRDNTRIDPRGRKVKILATIGPASRSPEMLRKLFKAGADAFRVNMSHGEHADHAKAIASIRALEKEFARPIAILADLQGPKLRVGPFKDGQAVLRHSGHFTLDRDDTPGDETRVCLPHAELFGILERGQRLLINDGKIRLLVKEADEDKIFCTAEVGGVISDRKGVNVPDAEVPIPALTDKDKKDLAFAVEQGVDWIALSFVQRPADLAEARKLIASHAAGGHCPALCAKIEKPQAVGRLEEIIELSDAIMVARGDLGVELEPHEVPPLQKRIVAASRSAGKPVIVATQMLESMIESPMPTRAEVSDVANAVYDGADAVMLSAESAAGDWPEESVTMMHKIAAQVERDEGYRERIRMLDTPPDATTSDALAHSCMTIADTVPISAITVFTSSGSTARRVARERPGTPMLVLTPSMRTARRVALLWGAHAVVTRDIGSFEEMIAKGKRMALRHGFGTAGSKQVVLAGVPFGTPGATNLLHVVTLAGDELEKHRK

SEQ ID NO: 8643 - DNA, 1767 bp, Synechococcus sp. RS9917
  CDS (1)..(1767): transl_table=11
atggccctcatcgatctgacacgccgtaccaagatcgtggccaccatcggccccgccaccgaaagccccgagcggatccgcgagctgatccaggctggagccaccacctttcgactgaatttttcccacggcgatcacagcgagcacgccacccgcatcgccaccattcgtcaggtcgccagcgaactgagccagcacatcggcatccttcaggatttacaagggccgaaaattcgtctggggcgcttcgcccttggccccatcaccctggccaagggtgatgccttcgcgctcacatcacgatccgtaagctgcgatcagcagatcgccacggtgacctacgacaagctggccgcagaagtgagtgccggcagccggattcttctcgacgacggtcgggtggagatgaaggtggagcgcgtcgatcaggccgagcagaccctgcactgcaccgtgaccgttggcggcgtgctctccaacaacaagggggtcaatttccccgatgttcagctctcggtgcgggctctcaccgaaaaagatcggatcgatctcgccttcggtctgcagcaaggggtcgactgggtggcgctcagcttcgttcgcaatccctccgacatgcaggagattcgcgaactgatccgccagcacggcttctccactccagtggtggccaagatcgaaaaatttgaggcgattgatcagattgatgcgatcctgccgctctgcgacggcgtgatggtggcccggggggatctgggcgtggaaatgcccgctgaggaggtgccgctcctgcagaaggaactgattcagaaagccaacagcctcggcatcccgatcatcaccgccacccagatgctcgattcgatggcctccagtccgaggcccacccgcgccgaagtaagcgacgtggccaacgccattctcgatggcaccgatgcggtgatgctctccaacgaaaccgcagtgggggattacccgattgaagcggtggaaacgatggcgacgatcgcccggcgcatcgagcgggattatccgcagcgcagcatcgacagccatctgccgagcacgatccccaatgcgatcagcagcgcggtgagcaccatcgccagccagttgaatgcggcggcgattctgccgctcaccaaaagtggtgccacggcccacaacgtgagcaaattccgccctgccgcaccgatcctggcgatcaccagtgaagtggccgtggcccgaaaactgcagttggtgtggggcgtgaccccgctggtgatcgcccagcagagcaccacctcaggcacattcaccaccgccatggccgccgcccaggacaaaggcctgctgaaggaaggggacctggtgattcaaaccgccggtaccctggcaggcgtcgccggctccactgacctggtcaaggtgggcatcgtcagtgccgtgctcggccagggcacgggggtgggtcagggcacggtgagcggccgggtccgcctcgcccagtgcccgggcgatgcctgcaagatcgaacggggggagatcctcgtggtgcatgacaccactgccgatgatgtcgacgcgatccgcgacgcagccgccgtgattaccgaagtgccggctgcaacctcccatgcggccctgatcgcccagcgactcggcacccccctgattgccggcgtggcccatgccacccgtcacctgctggaaggggaagtggtgaccctgcagatcaaggacgggcttgtgcatcgcggcaccagcatcaacacagccctctga

SEQ ID NO: 8644 - protein, 588 aa, Synechococcus sp. RS9917
MALIDLTRRTKIVATIGPATESPERIRELIQAGATTFRLNFSHGDHSEHATRIATIRQVASELSQHIGILQDLQGPKIRLGRFALGPITLAKGDAFALTSRSVSCDQQIATVTYDKLAAEVSAGSRILLDDGRVEMKVERVDQAEQTLHCTVTVGGVLSNNKGVNFPDVQLSVRALTEKDRIDLAFGLQQGVDWVALSFVRNPSDMQEIRELIRQHGFSTPVVAKIEKFEAIDQIDAILPLCDGVMVARGDLGVEMPAEEVPLLQKELIQKANSLGIPIITATQMLDSMASSPRPTRAEVSDVANAILDGTDAVMLSNETAVGDYPIEAVETMATIARRIERDYPQRSIDSHLPSTIPNAISSAVSTIASQLNAAAILPLTKSGATAHNVSKFRPAAPILAITSEVAVARKLQLVWGVTPLVIAQQSTTSGTFTTAMAAAQDKGLLKEGDLVIQTAGTLAGVAGSTDLVKVGIVSAVLGQGTGVGQGTVSGRVRLAQCPGDACKIERGEILVVHDTTADDVDAIRDAAAVITEVPAATSHAALIAQRLGTPLIAGVAHATRHLLEGEVVTLQIKDGLVHRGTSINTAL

SEQ ID NO: 8645 - DNA, 1437 bp, Pseudoalteromonas tunicata D2
  CDS (1)..(1437): transl_table=11
atggctagacgtactaaaatcgtcgctacacttggaccggctacagatagagataataatttagaaaaaatcatagaagctggcgtcaatgttgttcgtttaaacttttctcatggtgttgcacaagaccataaagaccgcgcggcaaaagtacgtgaaatcgcggcaaaattaggcaagcacattgcaattttagccgatttacaaggccctaaaatccgtgtttcaaccttccaagatggcaaagtaaccttagtagaaggtgctaaatttatccttgatgcccaaatggctaaaggcgaaggtaacattaatgcggttggtattgattataaagaattaccacaagacgtatcatctggtgacttattattacttaatgatggtttaattcaacttacagttgatagcgttcaaggccaacaagtgcattgtatcgtcacaattggtggtgtgttatcaaataataaagggattaaccgtttaggcggtggattaacagcccctgctttcacagaaaaagatgaacaagatttaattaccgcctctgaaattggtgttgactatatcgcagtgtctttccctcgtagtggtgatgatatgcgtcatgttcgtgctctagcagaaaaagccggcagtaatgcgcaactactagctaaaattgaacgtgctgaagctgtgtgctctgttgccgctatcgatgatatcgttctagcatctgatgctgtgatggtagctcgtggtgatttaggcgttgaaattggtgatgctgaattagtcggtaaacaaaaactgataattagtcgtgctcgttcattaaatcgtgttgtgatcactgcaactcaaatgatggaatcaatgattgataacccaatgccaacacgcgctgaagtaatggatgttgctaatgcggtgattgatggtacagatgccgtgatgctttctgctgaaactgctgcaggtgactacccggtagaaaccgtcaaagcaatggcgcgtgtttgtgttggtgcagaatctcaacctgaaacaaacgtttcaaaacatcgtttagacagcatgtttgcagatacatctgaaacattagcgctttcggctatgtatgctgccaatcacttaagcagtgtaaaagcgattgttgctttaacagaatcaggtaatactgcaaaattaatgtcacgtattagttctggtttacccatttattcattgtcgcgccatgcatcaacacttggccaaacagcactttatcgtggcgtttaccctgtttactttgattcaaccgcatgcagtaaagatgcgatggtcactgaagcagtgaaagcgcttgttgccaaaggcgtacttgttgcaggcgaccaagttattttaactcatggcgattcaatggaaactgttggtgcaactaatacaatgaagattgtaacagtccaataa

SEQ ID NO: 8646 - protein, 478 aa, Pseudoalteromonas tunicata D2
MARRTKIVATLGPATDRDNNLEKIIEAGVNVVRLNFSHGVAQDHKDRAAKVREIAAKLGKHIAILADLQGPKIRVSTFQDGKVTLVEGAKFILDAQMAKGEGNINAVGIDYKELPQDVSSGDLLLLNDGLIQLTVDSVQGQQVHCIVTIGGVLSNNKGINRLGGGLTAPAFTEKDEQDLITASEIGVDYIAVSFPRSGDDMRHVRALAEKAGSNAQLLAKIERAEAVCSVAAIDDIVLASDAVMVARGDLGVEIGDAELVGKQKLIISRARSLNRVVITATQMMESMIDNPMPTRAEVMDVANAVIDGTDAVMLSAETAAGDYPVETVKAMARVCVGAESQPETNVSKHRLDSMFADTSETLALSAMYAANHLSSVKAIVALTESGNTAKLMSRISSGLPIYSLSRHASTLGQTALYRGVYPVYFDSTACSKDAMVTEAVKALVAKGVLVAGDQVILTHGDSMETVGATNTMKIVTVQ

SEQ ID NO: 8647 - DNA, 1446 bp, Photobacterium sp. SKA34
  CDS (1)..(1446): transl_table=11
atgactgaacgcctaagacgtacgaaaattgtaactactttaggtcctgcgactgatcgcgataataaccttgaaaaaatcattgcagcgggtgccaatgttgttcgtatgaatttttctcacggcagcccagaagatcatattcaacggactaagcaagtacgtgaaattgcagctaaacttggtaaaaacgtagcaattctgggtgacttacaaggccctaaaattcgtgtgtccacgtttaaagaagataaaatccagctcactattggtgataaattcacccttgatagtgatctacctaaaggcgaaggcgatcagtttgctgtcggtttagactacaaagaattgcctaaagatgtggcaacgggtgacatccttttattagatgatggtcgcgtacaattaaaagtaacgtctgttgaaggtaataaagtacacactgaagtgaccgttgctggcccattatcaaataataaaggcatcaacaaaaaaggtggcggtctttcagctgaagccctaactgataaagataaagctgacattttaacagctgctgcaatgagcgttgattaccttgccgtatcattcccacgtaatggcgaagacatgaaatatgcacgccgattagcaactgaagctggcctaaatgcaaaattagtcgctaaagttgaacgtgcagaagcagtagcaacaaccgaagcaatggacgatattatccttgcgtctgatgttgttatggtagctcgtggtgatcttggtgttgaaatcggtgatcctgagctagttggtgttcaaaagaaacttattcgtcgtgctcgtagcttaaaccgtacggttattactgcaacacaaatgatggaatcaatgatcactagtccaatgccaacacgcgcagaggttatggatgttgctaacgctgtactagatggtactgatgcagtaatgctttcagcggaaacggctgcgggacaatttcctgaagaaaccgtaaaagcaatggcaagtgtttgtctaggtgcagaaaaagaacctagtattaacgtgtctaaccaccgcttagatcgattcttctcatctcctgaagaaacgattgcaatgtcaactatgtatgctgcaaaccacatggaaggcgtaaaagcgatggttgctatgactgaatctggtcgaacaccattaatgatgtctcgcatttcatcaggtttacctattttcgcgctatctcgcaacgaaaataccctaaaccaagcttcattataccgtggtgtaacacctgtatttttcaatcgtgatagtgatgctggtttagaagcggcaaaacatgcgttagatgtacttcgtgatgctggatttgtgaatgtgggcgatcttgtgatcatcactcaaggtgatgtaatggataccgttggttcaacaaacaatatgcgtattctaactgtcgagtaa

SEQ ID NO: 8648 - protein, 481 aa, Photobacterium sp. SKA34
MTERLRRTKIVTTLGPATDRDNNLEKIIAAGANVVRMNFSHGSPEDHIQRTKQVREIAAKLGKNVAILGDLQGPKIRVSTFKEDKIQLTIGDKFTLDSDLPKGEGDQFAVGLDYKELPKDVATGDILLLDDGRVQLKVTSVEGNKVHTEVTVAGPLSNNKGINKKGGGLSAEALTDKDKADILTAAAMSVDYLAVSFPRNGEDMKYARRLATEAGLNAKLVAKVERAEAVATTEAMDDIILASDVVMVARGDLGVEIGDPELVGVQKKLIRRARSLNRTVITATQMMESMITSPMPTRAEVMDVANAVLDGTDAVMLSAETAAGQFPEETVKAMASVCLGAEKEPSINVSNHRLDRFFSSPEETIAMSTMYAANHMEGVKAMVAMTESGRTPLMMSRISSGLPIFALSRNENTLNQASLYRGVTPVFFNRDSDAGLEAAKHALDVLRDAGFVNVGDLVIITQGDVMDTVGSTNNMRILTVE

SEQ ID NO: 8649 - DNA, 1437 bp, Oceanospirillum sp. MED92
  CDS (1)..(1437): transl_table=11
atgctgaagcgaaccaaaatagttgcaaccctgggcccatcaacagatcagccgggtgttcttgaagatattctacgtaatggcgtgaataccgttcggttgaatttctctcatggtagcgcggatgatcataagcgcagagccgaagaagtcaggcaagcgtcgcgaaagcttggcctgtctatagctgtattaggtgatcttcaggggcctaaaatccgtatcgctcgcttcaaagaggatcgtatccaacttgccgttggtgatagatttgctctggatgccgatctcgggaataacgatggcgatcaaagccaggtagggatcgattacaaagcccttccggcagactcttcccccggtgacatcctcttactggatgatggtcgcgttcagttaaaagttgttgaagtgcaaggtaaccgcatcgataccgaagtgatcatcggcggccctctatccaacaataaaggcattaaccgccagggcggcggattatcggctgcggctctaacggagaaagatcgcagagacattaaagtcgccgctgaaatcgatatggattatatcgctgtatctttcccgcgctgcgcagctgacctgttagaggcccgtgaactgctcaatgctgcaggctctcgcgctgaaattgtcgctaaagttgaacgcgctgaaacggtcgctagcaccgaagcccttgatgagatcattctggcttgcgacggcatcatggtggcgcgaggcgatctgggtgtagagatcggcgatgcagaattaatcggtgtacagaaacaccttattcagcgttctcgtgaactgaaccgctttgtcattacggcaacccagatgatggagacaatgatcgagaatccgatgcccacccgtgctgaggtatttgacgtcgctaatgccattcttgatggtacggatgcagtcatgctttcggcagagactgcggcgggtaaacatccggttgaagttgttaaatccatgacatcgatttgccagggcgctgaaaagcaccagctttcccgccctgcgccaaccaatatttcgcagaaacttgaacgctttgatgaaaccattgcccgctctgcaatgtatacagcaaataatctggcgggagttaaagcaattatctgtttaactgaatcaggctctacgcctttatggatgtcacgaattcgttccgggctaccgatctatgccttaacccgcaacgaacgcacaatgcgccgtaccgcactatatcgcggcgtggaacctatcttctttgactcgacccgcattgataaagacaagttaaatgaagaggttctggccggactcaaagcacgtaatttattgcagaccggtgatctggtgattctgactcgcggcgcatcactgggtgaagatggcggtacgaactccatgcaggttctcgcagtacaataa

SEQ ID NO: 8650 - protein, 478 aa, Oceanospirillum sp. MED92
MLKRTKIVATLGPSTDQPGVLEDILRNGVNTVRLNFSHGSADDHKRRAEEVRQASRKLGLSIAVLGDLQGPKIRIARFKEDRIQLAVGDRFALDADLGNNDGDQSQVGIDYKALPADSSPGDILLLDDGRVQLKVVEVQGNRIDTEVIIGGPLSNNKGINRQGGGLSAAALTEKDRRDIKVAAEIDMDYIAVSFPRCAADLLEARELLNAAGSRAEIVAKVERAETVASTEALDEIILACDGIMVARGDLGVEIGDAELIGVQKHLIQRSRELNRFVITATQMMETMIENPMPTRAEVFDVANAILDGTDAVMLSAETAAGKHPVEVVKSMTSICQGAEKHQLSRPAPTNISQKLERFDETIARSAMYTANNLAGVKAIICLTESGSTPLWMSRIRSGLPIYALTRNERTMRRTALYRGVEPIFFDSTRIDKDKLNEEVLAGLKARNLLQTGDLVILTRGASLGEDGGTNSMQVLAVQ

SEQ ID NO: 8651 - DNA, 1557 bp, Xanthobacter autotrophicus Py2
  CDS (1)..(1557): transl_table=11
atgcccacgaagcgccagcagcccctgaagcgccagcgtgccaccaagatcgtcgccaccgtcggccccgcatccaacagcgaggagaagctgaaggcgctgttcctcgccggcgtggacgtgttccggctcaacttctcccatggcacgcaggaaaaccatggcgaggtgctggcccgcatccgccggctggaaaaggagatgaaccggcccatcggcgtcatcgccgacatgcagggccccaagctgcgcatcggccgcttcaaggacggcgccattgccatcaaggctggcgacatcctgcatttcgatgccgacgtggaccggccgggcgacgagacccgcgtgccgatcccgcaccccgatatcctcgccgcgctgaacgtgggctccaccgtgctgtgcgacgacggcaaggtgcgcctgaaggtggtcaagaagggcgagggcttcctggaggcccaggtggtggcaggcacccgtctgtccaacaacaagggcttcaacatccccgacgtggtgctgccgctgtcgccgctcaccgacaaggatcgcctggacctggagtttgcctgcgaggcgggggtggagtggatcgccctctccttcgtgcagcggccggaggacatccacgaggcccgcgcgctcatcaaggaccgcgcggcggtgatgctgaagatggagaagccgtcggcggtggactatctcaccgagctggtggagctgtccgattccatcatggtggcgcgcggtgacctcggcgtggaaatctcgctggccgaggtgccggcgctgcagaagcgcatgatcgccgaggcccgcaagttcggccgtccggtcatcgtcgccacccaaatgctggaatccatgatcaccgccccggtgcccacccgtgccgaggtgtcggacgtggccaccgccgtctatgagggtgccgactgcgtgatgctttccgcggagacggcggccggccagttcccggtggaggccgtcaccttcatggacgacatcatccgccacgtggagtgcgatcccggctaccgacaggcgctggacgccacccaggcggaatggggcaagaccatcggcgacgcggtcaccaaggccacctaccaggccgccatcgcggtggatgcctcggcgctggtggccttcaccctctcgggcaccacgggcctgcgggccgcgcgcgagcgcccggccatcccgatcctcggcctcaccccgaagatggagacggcgcgtcgtctcgcgttgtcctatggcgtgcacgccgtgcacatgaaggaggacatccactccttcggcgacatggtggacacggcggtgcgcaccgccgtggagcacggcctgggcaagcccggggaccgcctggccatcaccgccggcgtgcccttcgccaagcccggcaccaccaacatcatgcgcatcaccaccatcggcgccgacagcccgccctcccgccacgacgccgacacgcccgcggtgcgctcgaccaaggctcatgagagcaaggggcaggagaagaaggcgcacggcagcaaggtgcacgcctga

SEQ ID NO: 8652 - protein, 518 aa, Xanthobacter autotrophicus Py2
MPTKRQQPLKRQRATKIVATVGPASNSEEKLKALFLAGVDVFRLNFSHGTQENHGEVLARIRRLEKEMNRPIGVIADMQGPKLRIGRFKDGAIAIKAGDILHFDADVDRPGDETRVPIPHPDILAALNVGSTVLCDDGKVRLKVVKKGEGFLEAQVVAGTRLSNNKGFNIPDVVLPLSPLTDKDRLDLEFACEAGVEWIALSFVQRPEDIHEARALIKDRAAVMLKMEKPSAVDYLTELVELSDSIMVARGDLGVEISLAEVPALQKRMIAEARKFGRPVIVATQMLESMITAPVPTRAEVSDVATAVYEGADCVMLSAETAAGQFPVEAVTFMDDIIRHVECDPGYRQALDATQAEWGKTIGDAVTKATYQAAIAVDASALVAFTLSGTTGLRAARERPAIPILGLTPKMETARRLALSYGVHAVHMKEDIHSFGDMVDTAVRTAVEHGLGKPGDRLAITAGVPFAKPGTTNIMRITTIGADSPPSRHDADTPAVRSTKAHESKGQEKKAHGSKVHA

SEQ ID NO: 8653 - DNA, 1431 bp, Flavobacteria bacterium BBFL7
  CDS (1)..(1431): transl_table=11
atgccaaaaacaaaaaagactaaaatcgtagctacattaggacctgcaacttcttcaaaagaagtgttgttaggtatgatgaaggctggcgtgaatgtatttagaattaatttttcacatgcagatcatgaggatgtaaaagaacgtgttcaaatgatacgtgaccttaatgaagaacacggatttgcaacaggtatattaggagatttacaaggtcctaaactacgtgttggtgtcatgaaagaagaagtggttgtaaatcctggcgatattattactatttctactggagagccatttaaaggtactgcagaacgtgtatacatgaattacgagcatttccctagagatgtaaaagctggggaacgtattttactagatgatggtaaattaatgtttgaagtagtttctactgatggtgttaaagatgtagttactaaagtgattcaaggtggaccactacgttctaaaaaaggagtcaatctaccgcaaacagatatttctttaccagcccttactgaaaaagatgtggtagacgccatatttgcatgcgagttacaagtagactggatggcactttcatttgtacgtcatagtcgtgatttgatggaattacaagatttaattaaggaacactcagagcataaaattcctattatcgctaaaatagaaaagcctgaagcagtcactaacatcgataaaattgtagcttattgtgacggtttaatggtggctcgtggtgatttaggtgtagaggtgcctgcacatgaagtacctcttattcaaaaacaattagttcttaaggcaaaacaagcgcgtattcctgttatcatcgctacacaaatgatggaaacaatgattactagccttacacctacacgtgctgaggttaatgatgtggcaaactctgtaatggatggtgcagatgctgtaatgttatctggtgaaacatcagtaggtcagtatcctattcaagtaatagaaaaaatgaccagcatttgtttatctgttgaaaacagtgacttgattaacgtaccacatagtgcgccgcatattaaaacaaagagatatatcactaaatcgatatgttatcatgctgcaaaaatggctgacgagattgatgcaaaagccatcacgacaatgaccaatagtggttatacagcgtttcaaataagcgcctggagaccagatgcacatatcttaacttttactagtaataagcgtatccttactcaattaagtctcttatggggcgttaaagcctttttatacgaccgttttgtaagtactgatgaaactattgaagatgtgaatcagtttgcaaaagacaagaaattcgttagaaaaggagatttcttaatcaatcttgcagcaatgccagttaccgataaaggaatggtaaatacactaagagttactgagatagaatag

SEQ ID NO: 8654 - protein, 476 aa, Flavobacteria bacterium BBFL7
MPKTKKTKIVATLGPATSSKEVLLGMMKAGVNVFRINFSHADHEDVKERVQMIRDLNEEHGFATGILGDLQGPKLRVGVMKEEVVVNPGDIITISTGEPFKGTAERVYMNYEHFPRDVKAGERILLDDGKLMFEVVSTDGVKDVVTKVIQGGPLRSKKGVNLPQTDISLPALTEKDVVDAIFACELQVDWMALSFVRHSRDLMELQDLIKEHSEHKIPIIAKIEKPEAVTNIDKIVAYCDGLMVARGDLGVEVPAHEVPLIQKQLVLKAKQARIPVIIATQMMETMITSLTPTRAEVNDVANSVMDGADAVMLSGETSVGQYPIQVIEKMTSICLSVENSDLINVPHSAPHIKTKRYITKSICYHAAKMADEIDAKAITTMTNSGYTAFQISAWRPDAHILTFTSNKRILTQLSLLWGVKAFLYDRFVSTDETIEDVNQFAKDKKFVRKGDFLINLAAMPVTDKGMVNTLRVTEIE

SEQ ID NO: 8655 - DNA, 1446 bp, marine gamma proteobacterium HTCC2207
  CDS (1)..(1446): transl_table=11
atgccgcgtagaaccaaaattctcgccacactcggccccgctactcaccatgaacagggtattcgcgggctgatccttgctggcgtcaatgtttttcgtttgaacttctctcacggcagcgctgaagagcattccatgcgcgccgccatgattcgggaaatcgctctcgaacttgaaaccccagtgggtattctctgcgatatgcagggccctaaaattcgtatcggtagctttaccaacgatatgaagatcgatttagccgaaaacgatagctttgtcctcaacagccaaattggtgttgatgcgggagaccaaaatggtgtgcatatcgacagcgatctgcttaacgatatagatgccggcgatacattattgctcgacgatggtcgcatgacctttatagttgaatcgcgtaactcccactcagtgacctgccgtgtggctcaaggcggtgtgctatccagcaaaaaaggcgtgaacaaattcggtggcggactctcagctccggcgctcaccgagaaggacaaggcggatattaaaacggctgcgtctctaaagactgattatctggccatctcatttgtacgctcgaaagacgatattgaagagactcgcgaactgctggttgcagcaggtagcggcgcccacattatcgccaagatcgaacgtgctgaagccattaccggcgagtttttgcccggtattatcgccagcgccgatggcgttatggttgcccgtggcgacctcggcgttgagattggcgacgccaacctagtagcagtgcagaagcagcttattgaagcggccaatgccgccaacaaagtcgtgatcacggccactcagatgatggagtcaatgattactgcttctacgcctacccgcgcagaggtattcgatgtggccaatgccgtgctcgacggcaccgatgcagtgatgctgtcggcagagaccgctgtgggcatgtaccctgcagagactgtcaaagcgatggtgcgcattattgaaggggccgaattacaccctcttgcccaacggtccaagcacagaattgatcagacattttcaagcatagatgaatcccttgccctagcagctatgtatgtagccaaccatctggaaggggttaaagcggttatctgtatgacagcaaccggctttgcgccactgattatgtcaagaatcacctcgtcactgcctatttatgccatggcagagaagcacggcacctgcgagataaccgctctctataagggcgtggtacctgtgccatttcatgcttcagcgttagatccctctgaggttaatcaccgcgctgtagaaactctgcgcgcgcacaatgctgtagctgatggcgaccttgtgctgattaccaaaggggattttgtcaatgtgcacggcggcacaaacacattaaaaattgttcgagttggcgacgttattcagtag

SEQ ID NO: 8656 - protein, 481 aa, marine gamma proteobacterium HTCC2207
MPRRTKILATLGPATHHEQGIRGLILAGVNVFRLNFSHGSAEEHSMRAAMIREIALELETPVGILCDMQGPKIRIGSFTNDMKIDLAENDSFVLNSQIGVDAGDQNGVHIDSDLLNDIDAGDTLLLDDGRMTFIVESRNSHSVTCRVAQGGVLSSKKGVNKFGGGLSAPALTEKDKADIKTAASLKTDYLAISFVRSKDDIEETRELLVAAGSGAHIIAKIERAEAITGEFLPGIIASADGVMVARGDLGVEIGDANLVAVQKQLIEAANAANKVVITATQMMESMITASTPTRAEVFDVANAVLDGTDAVMLSAETAVGMYPAETVKAMVRIIEGAELHPLAQRSKHRIDQTFSSIDESLALAAMYVANHLEGVKAVICMTATGFAPLIMSRITSSLPIYAMAEKHGTCEITALYKGVVPVPFHASALDPSEVNHRAVETLRAHNAVADGDLVLITKGDFVNVHGGTNTLKIVRVGDVIQ

SEQ ID NO: 8657 - DNA, 1431 bp, Rickettsiella grylli
  CDS (1)..(1431): transl_table=11
atgaaacggtttaaacgaacgaagattgtcgctacattgggtcctgctaccgatagcgtagcggttttgcaaaagatgattgcggccggtttagatgttgttcgattaaatttttctcatggtaaagcagacgatcatataaaacgtgctgattatgttcgcaaatacgcaaaagctgcgaatcgagaaattgctattatggcggatttacaaggacctaaaattcgtatttcgtgttttaaaaaaggcgctatttttttaaaaaaaaatgctttatttattttggatgctgatttagacgaagaggaaggcgatgaatgtgtcgtcggtatcgattataaagaattaccacgcgatgtgcattctggagattcattattgcttgacgatggacgtattgtattaaaagttaaaaaaattcagaaaaataaaatattctgtagggttgaggtcgggggaaaactttctgataataaaggaattaatcgcaaagggggaggactttcagcgatagcattaactgagaaggataaaaaagatttaaaaatcgcagttaaattggatgcagattatattgctatttctttcccacgcagtgcagcggatataaatttagcacgaagtttattaaaaaaagcgaaaggtcatgcgggtttaattgcaaaaatagaacggagtgatgctattcctgttattgacgagattattcgcgcttctgatgcggttatggtcgctcgtggtgatttaggcgtggaaatcggcgatgcagaattgcctgcggtccaaaaacacattatccaacgggcacgctcattagataaggccgtgataaccgccacacagatgatggaatcaatgattcatagcgcaattccaacccgagccgaagtttttgatgttgcaaatgcggtgttagatggtacagatgcggtgatgctctctgcagaaacagccattggtgaccatccggctttagtcgttgaagcaatggcgcgtatttgcttaggtgcagaaaagcaagcaaaaacacgcatatcccgacatcgtgtagaatgccaattttcccgtcccgatgaggccattgcgatggcggccatgtataccgccaatcattatgatattaaagcgattattgccttaactgagtcaggcgcgactcctttatggatgtctcgaattcgttctggattacctatctatgggttggcgcataacttaaaaacgacgcgccgattagcgttgtatcgcggcgtatatcccttgtattttaatattgatgaactgtgcccagaaaatattgctcatttagcgattaaagaattaaaaaaacacaaaattttaaaaaagggagaacacgtgttaattacgtacggtgatttgttaaaaacaacaggcggcactaatacgttaaaaattttagaagtggattaa

SEQ ID NO: 8658 - protein, 476 aa, Rickettsiella grylli
MKRFKRTKIVATLGPATDSVAVLQKMIAAGLDVVRLNFSHGKADDHIKRADYVRKYAKAANREIAIMADLQGPKIRISCFKKGAIFLKKNALFILDADLDEEEGDECVVGIDYKELPRDVHSGDSLLLDDGRIVLKVKKIQKNKIFCRVEVGGKLSDNKGINRKGGGLSAIALTEKDKKDLKIAVKLDADYIAISFPRSAADINLARSLLKKAKGHAGLIAKIERSDAIPVIDEIIRASDAVMVARGDLGVEIGDAELPAVQKHIIQRARSLDKAVITATQMMESMIHSAIPTRAEVFDVANAVLDGTDAVMLSAETAIGDHPALVVEAMARICLGAEKQAKTRISRHRVECQFSRPDEAIAMAAMYTANHYDIKAIIALTESGATPLWMSRIRSGLPIYGLAHNLKTTRRLALYRGVYPLYFNIDELCPENIAHLAIKELKKHKILKKGEHVLITYGDLLKTTGGTNTLKILEVD

SEQ ID NO: 8659 - DNA, 1470 bp, Synechococcus sp. RS9916
  CDS (1)..(1470): transl_table=11
atggcgcaaatcgatctttcccgtcgtaccaagatcgtggccaccatcggcccagcaaccgaaagccctgaacggctcaggcagttgatcgaagctggtgccaccaccttccgcctgaatttttcccacggcgatcacagcgagcatgcagcccgcatcgccaccatccgccgagtctcggctgagatgggagttcacatcggcatccttcaggatcttcaggggccaaaaatccgtctcggccgcttcgccgatgggccgatcaccctcgccaacggtgatcccttcacgctcacatcccgtcccgtcagctgcaatcaggagatcgccacggtcacctacgacaagctggctgacgaagtcactgctggcagccgcatccttctcgatgacggccgggtcgagatgaaggtcgagcgggtcgacaaggcagaacagaacctccactgcacggtcaccgtcggcggagtcctctccaacaacaagggcgtcaacttcccggacgtacaactatctgttcgcgccctcactgagaaggacaaaacagacctggccttcggtcttggtcaaggggtggactgggtggccctgagctttgtgcgtaatccttccgacatggaggagattcgaggtctgatccgccagcacggccacaccactccggtggtggccaagatcgagaaattcgaagccattgatcagatcgatgccattctcccgctctgtgatggcgtgatggtggccaggggcgatctgggcgttgagatgcccgccgaggaggtcccccttctccagaaagagttgatccagaaggccaacagccttggcattccgatcatcacggccactcagatgctcgattcgatggcttcaagcccacgacccacgcgagccgaagtcagcgacgtggccaacgccatccttgatggcacggacgctgtgatgttgtccaacgagacagccgtgggtgatttccctgtggaggccgtggaaaccatggccaccatcgcgcgccgcattgagaaggattacccccagcgccgcatcgacagccatctgccatgcaccatccccaacgccatcagcagcgcagtgagcacgattgcaagccagctgaatgcggctgcgatcttgccactcaccaaaactggtgccacagctcataacgtgagcaagttccgtccagctgctccgattcttgcgatcaccagcgaaccatgggtggcatgcaaactccaattggtctggggagtcactccattggtgaccgaaccacaggagcgcacctcatccacattcgcgacagcaaccaacatctgtcgtgagcggggctggttgaagcaaggcgatctggtggtccaaacagcaggcacccagcctgaagtctctggctccaccgatctggtcaaagtgggaatcgttggtagcgacggactgctcgacagcactcaccacaacgccaccatctaa

SEQ ID NO: 8660 - protein, 489 aa, Synechococcus sp. RS9916
MAQIDLSRRTKIVATIGPATESPERLRQLIEAGATTFRLNFSHGDHSEHAARIATIRRVSAEMGVHIGILQDLQGPKIRLGRFADGPITLANGDPFTLTSRPVSCNQEIATVTYDKLADEVTAGSRILLDDGRVEMKVERVDKAEQNLHCTVTVGGVLSNNKGVNFPDVQLSVRALTEKDKTDLAFGLGQGVDWVALSFVRNPSDMEEIRGLIRQHGHTTPVVAKIEKFEAIDQIDAILPLCDGVMVARGDLGVEMPAEEVPLLQKELIQKANSLGIPIITATQMLDSMASSPRPTRAEVSDVANAILDGTDAVMLSNETAVGDFPVEAVETMATIARRIEKDYPQRRIDSHLPCTIPNAISSAVSTIASQLNAAAILPLTKTGATAHNVSKFRPAAPILAITSEPWVACKLQLVWGVTPLVTEPQERTSSTFATATNICRERGWLKQGDLVVQTAGTQPEVSGSTDLVKVGIVGSDGLLDSTHHNATI

SEQ ID NO: 8661 - DNA, 1437 bp, Alteromonadales bacterium TW-7
  CDS (1)..(1437): transl_table=11
atgctaagacgcacaaaaatagtcgctacccttgggcccgctaccgatagagataacaacttagaaaaaattattcgcgcaggcgcaaacgtagtacgtttaaacttctcacacggtgtggctcaagatcataaagaccgtgcacaagcagttcgtgatattgcaaaacgattgaacaaacatattgctattcttgccgaccttcaaggtcctaaaatccgtgtatcaacgtttaaagaaggcaaagtaaccctagaagtgggcgctaagtttattcttgatgcaaaaatggaaaaagggcaaggcgatgtaaacgctgtaggcatcgattataaagagcttccgcaagacgtatctcctaacgatttacttcttttaaatgatggtttaattcaacttacagttgataaagtagttgatcatctagttcactgtaccgttacagtgggaggtgttttatcaaataataaagggattaaccgtttgggcggtggattaactgcccctgcgtttactgataaagacaaagaagatttaattacagcagcagaaatcgatgtagattatattgcggtatctttcccacgtagtggtgatgatatgcgttacgttcgttctttagcagaagcagctggctctaaagcgcaacttcttgcaaaaattgaacgtgctgaagctgtagaaacgcaagaagcgattgatgacattgtacttgcatcagatgctgttatggttgcacgtggtgacttaggtgtagaaattggcgatgctgcgttaatgggcaagcaaaaacttattattcgtcgtgctcgttcattgaaccgtactgttgttacagcaacacaaatgatggaatcgatgatcgataacccaatgccaacacgtgctgaagtaatggatgttgcaaacgcagtgcttgatggtaccgacgctgtaatgctttctgcagaaaccgcagcgggtgattaccctgaagaaactgtagcgactatggcgcgagtttgtttaggtgctgagtcacaaaaagaaacacacgtatctaagcaccgtttagatagccgcttttctaataatgcagaatcaattgcattatctgctatgtatgcagcaaaccatttagactctgttaaagctattgtaacgcttactgaatcaggtagcacagcaaaactaatgtcacgtattagttcgggtttaccaatctactcactatctcgtcatgctagtacgcttggtcaaaccgcactttatcgtggtgtttaccctgtgttttttgattcaacacaaacagaaaaagatgcaatggttaaagcagctttagatacgcttgttgcccaaggatcattagcgtcaggtgatacagtgattttaacgcatggtgattcaatggaaacggttggcgcaacaaatacaatgaaaattgttactgttgagtaa

SEQ ID NO: 8662 - protein, 478 aa, Alteromonadales bacterium TW-7
MLRRTKIVATLGPATDRDNNLEKIIRAGANVVRLNFSHGVAQDHKDRAQAVRDIAKRLNKHIAILADLQGPKIRVSTFKEGKVTLEVGAKFILDAKMEKGQGDVNAVGIDYKELPQDVSPNDLLLLNDGLIQLTVDKVVDHLVHCTVTVGGVLSNNKGINRLGGGLTAPAFTDKDKEDLITAAEIDVDYIAVSFPRSGDDMRYVRSLAEAAGSKAQLLAKIERAEAVETQEAIDDIVLASDAVMVARGDLGVEIGDAALMGKQKLIIRRARSLNRTVVTATQMMESMIDNPMPTRAEVMDVANAVLDGTDAVMLSAETAAGDYPEETVATMARVCLGAESQKETHVSKHRLDSRFSNNAESIALSAMYAANHLDSVKAIVTLTESGSTAKLMSRISSGLPIYSLSRHASTLGQTALYRGVYPVFFDSTQTEKDAMVKAALDTLVAQGSLASGDTVILTHGDSMETVGATNTMKIVTVE

SEQ ID NO: 8663 - DNA, 1437 bp, marine gamma proteobacterium HTCC2143
  CDS (1)..(1437): transl_table=11
atgataagacggacaaaaattgtcgccactattggccccgcttcgggtcattcggaaatgattgcaaagttattagacgcgggagttaacgtttttcggttgaacttttctcatggcacagcggatgggcatcggcagcaggtagctatcattcggcaagtctgcgcgagtaaaaaggtacatgcggcgattttgggagacctgcagggaccgaagatacgaattggtgacctgcgcaacgatgctgtcacgcttgttaatggtgaagaaataatcctcacgatagaccaaagtcgtggtgaagatgacgaccgtataccggtgggctacaaggcgctgcctcaatctgttgctactggagacacgctgctgctcgatgatggattgatagagctatcggtttcgctgattgttgggggtgatgttcattgtagtgttcaagttggcggcgagctgaaatcgagaaagggcctaaatcgactgggtggcggtttatcggcgccagcaattacagagaaagatttacaggatattgatttggcagctgaactctcggtggattatcttgccgtttcctttccctgttgtgcttcggatcttgacccggttaaacgtcgattggacgatctcggggcacgtattggtatcattgcgaaaattgaacgtgcagaggcggttgccaacgaacagacattaaatgagctgattttggcagcggacggtgtgatggtcgcgcggggagatctgggtgtcgaagtgggaaattcccagctcattggtctacaaaagcgaattatcaggcaggcacgacgatcaaatcgtccggttattacagcaacgcagatgatggagtctatgattagttcaccggtgcctactcgcgccgaagtatttgatgtggcgaatgccgtattggacggtactgatgcggtgatgctctccgccgaaacagccactggaaaatacccagtgaaggtagtgatggcaatggctgacgcctgtgtgggggccgaacaacaaccggatacacgaatttcgggtcaccgagttgatgaccgggttgaaaatattagtgaatccatcgcgctttccgccatttacgccgccaatcatttagataacgtgaaggccagtctgtgcctgacagaatccggggcaacggctttaattatgtcgcgattgagttcgagcttgccaatctatggtgtatcacggcatcccgagacatgccgaagaatgactctgtatcgaggcgttattcccatccactgtgatattactaccaacgatgaggaaggttatcagcaggccttactgtctgttacaagcaccggggcgattgggcttggtgatcgggtaattgtaaccagtggtgatatcaccggcactggcgggatgaccaataccctgaaaattttgcaagttaaaggagcctaa

SEQ ID NO: 8664 - protein, 478 aa, marine gamma proteobacterium HTCC2143
MIRRTKIVATIGPASGHSEMIAKLLDAGVNVFRLNFSHGTADGHRQQVAIIRQVCASKKVHAAILGDLQGPKIRIGDLRNDAVTLVNGEEIILTIDQSRGEDDDRIPVGYKALPQSVATGDTLLLDDGLIELSVSLIVGGDVHCSVQVGGELKSRKGLNRLGGGLSAPAITEKDLQDIDLAAELSVDYLAVSFPCCASDLDPVKRRLDDLGARIGIIAKIERAEAVANEQTLNELILAADGVMVARGDLGVEVGNSQLIGLQKRIIRQARRSNRPVITATQMMESMISSPVPTRAEVFDVANAVLDGTDAVMLSAETATGKYPVKVVMAMADACVGAEQQPDTRISGHRVDDRVENISESIALSAIYAANHLDNVKASLCLTESGATALIMSRLSSSLPIYGVSRHPETCRRMTLYRGVIPIHCDITTNDEEGYQQALLSVTSTGAIGLGDRVIVTSGDITGTGGMTNTLKILQVKGA

SEQ ID NO: 8665 - DNA, 1455 bp, marine gamma proteobacterium HTCC2080
  CDS (1)..(1455): transl_table=11
ttgaatcaggggccaaaaactcacaggcgcacaaaaatcgttgctaccgtcggtcctggcagtgacagcgaagacatgcttaaccgattaattgccgctggggtagacgtgtttcgtctcaactttagtcatggctcggcggagcaccatgctgaggttgccgcacgtataagacgtcaggccggctatgctggacgttatattggcgttcttgctgatttacaggggccgaagattagaatcagcggttttgctgccggctctgttgaaatcacagccggcgatccgttttgcttggacctcgatacggcacatgatgccggcgatcaacggcgtgtcggtattgagtaccgagcattgcctgaacaggttgtgatcgatgacatactgttgctcgacgatggcaaacttcgcctgcgcgttgacgacgtcagcgagagagcggtcgactgtacggttctcataggcggccagttatcatcacgcaaaggggtgaacaaacttggaggagggctcgccgcacctgcgctgaccgagaaagaccgatcagacattgcagggatggcgggagttgatccggacttcgtggccgtttcattcgtgtccagcagcgaagatattaacttagctcgcacactacttgccgatgttggtgttagccccgccattattgcaaaaattgaacgcgcggaagtcgtggcggattacgatttgctcgacagcattattgagacggccgaaggggtcatggttgctcggggtgaccttggcgtagaagttggggatgcgcagctcatcggcatccaaaaagaccttatcaagcgcacccgccgactggaccgactagttatcacagccacgcagatgatggaatcgatgatcagcaatagcatgccaacccgggcagaggtttttgacgtcgccaatgccgtgctagacggcaccgatgcggtcatgctctccgcggagactgctgttggacaatttcccattgaggtggtgaccgccatgtcagaagcagccctcggcgcagaaactcacccggtcgcgcgcacttcgcgttaccgtctagaccgagaattttccagcccacaagaggctattgccctctctgccatgtacggagctaaccattttgcggaagttcgcggtattgcgactcttacagagcgaggtgtcacgcccacaacaatgtctcgattatcttcaggattgccgatttttggtctgagccgtcagcacaaaacgttacaaaaattagcgttatgccgaggggtgattcctctctatttcgatgctacagcgtttgcagctgaagatattgaggggcgggttatggagtttttactcgatggcgggtatttaagtcgtggcgatttcatcctgttgaccatgggcagcactatgggcaaaaccggtacaaccgacctgctcaagtttctacccgtcgaataa

SEQ ID NO: 8666 - protein, 484 aa, marine gamma proteobacterium HTCC2080
MNQGPKTHRRTKIVATVGPGSDSEDMLNRLIAAGVDVFRLNFSHGSAEHHAEVAARIRRQAGYAGRYIGVLADLQGPKIRISGFAAGSVEITAGDPFCLDLDTAHDAGDQRRVGIEYRALPEQVVIDDILLLDDGKLRLRVDDVSERAVDCTVLIGGQLSSRKGVNKLGGGLAAPALTEKDRSDIAGMAGVDPDFVAVSFVSSSEDINLARTLLADVGVSPAIIAKIERAEVVADYDLLDSIIETAEGVMVARGDLGVEVGDAQLIGIQKDLIKRTRRLDRLVITATQMMESMISNSMPTRAEVFDVANAVLDGTDAVMLSAETAVGQFPIEVVTAMSEAALGAETHPVARTSRYRLDREFSSPQEAIALSAMYGANHFAEVRGIATLTERGVTPTTMSRLSSGLPIFGLSRQHKTLQKLALCRGVIPLYFDATAFAAEDIEGRVMEFLLDGGYLSRGDFILLTMGSTMGKTGTTDLLKFLPVE

SEQ ID NO: 8667 - DNA, 1416 bp, Pseudomonas putida GB-1
  CDS (1)..(1416): transl_table=11
atgacgcctgataaaaaagtaaagatcctcgccacccttggccctgcgatcaacggcatcgacgacatccgccagctggtcgaagccggggtgaacatcttccgcctcaacttcagccacggcgaacacgctgaccacgccctgcgttatcagtggatccgcgaagtcgagcagcaactgaactacccgctgggcatcctcatggacctgcaagggccaaagctgcgcgtgggccgcttcgctgagggcaaggtacagttgcaacgcggccaggccctgcgcctggacctggacaaaacccccggcgacaaccgccgggtcaacctgccgcaccccgaaatcatcgctgccctcgaacccggcatggacctgctgctggacgacggcaagctgcgcctgcgcgtcaccgccaagcacagcgatgccatcgacaccgaagtgctgaacggtggcgagctgtccgaccgcaaaggcgtcaacgtaccgcaagcggtgctcgacctctctccgctcaccgaaaaggaccgccgcgacctggccttcggcctggagttgggcgtggactgggtggccctgtcgttcgtccagcgccctgaagacatcgtcgaagcgcgccagcttatcggcgaccgcgcctacctgatggccaagatcgaaaaaccctcggcggtcgagcagctgcaagccatcgccgaactggcagacgcgatcatggtggcccgtggtgacctgggcgtggaagtgccggccgaaagcgtgccgcagatccagaagcgcatcatcggcacttgccgccaactgggcaaaccggtggtggtggccacgcagatgctcgaatccatgcgtttctcgccagcgcctacccgtgccgaagtcaccgacgtggccaatgccgtggccgaaggtgccgacgcggtgatgctgtcggccgagaccgcttcgggtgattacccgctggaagcggtgcagatgatgagcaagatcatccgccaggtggaaaacggcccggactaccaggcccagctcgacgttggccggccaaaagccgaagccaccgtgtcggatgccatcagctgcgctatccgccgtatcagcggcatcctgccggtggcggtgctggtcaactacagcgagtcgggcgcctcgaccctacgcgcggcgcgcgagcggccacgggcaccgatcctcaacctgacaccgaacctgaacaccgcacgccgcctgagcgtggcgtggggcgtgcactcggtggtcaacgaccgcctgcgccaggtcgacgaggtggtgtctacggcgctggaaattgcccaggcgcaaggtatggccagccgtggcgacacactgctgatcaccgccggtgtgcctttcggcaagccggggtcgactaacacgctgcggatcgagactttgatctga

SEQ ID NO: 8668 - protein, 471 aa, Pseudomonas putida GB-1
MTPDKKVKILATLGPAINGIDDIRQLVEAGVNIFRLNFSHGEHADHALRYQWIREVEQQLNYPLGILMDLQGPKLRVGRFAEGKVQLQRGQALRLDLDKTPGDNRRVNLPHPEIIAALEPGMDLLLDDGKLRLRVTAKHSDAIDTEVLNGGELSDRKGVNVPQAVLDLSPLTEKDRRDLAFGLELGVDWVALSFVQRPEDIVEARQLIGDRAYLMAKIEKPSAVEQLQAIAELADAIMVARGDLGVEVPAESVPQIQKRIIGTCRQLGKPVVVATQMLESMRFSPAPTRAEVTDVANAVAEGADAVMLSAETASGDYPLEAVQMMSKIIRQVENGPDYQAQLDVGRPKAEATVSDAISCAIRRISGILPVAVLVNYSESGASTLRAARERPRAPILNLTPNLNTARRLSVAWGVHSVVNDRLRQVDEVVSTALEIAQAQGMASRGDTLLITAGVPFGKPGSTNTLRIETLI

SEQ ID NO: 8669 - DNA, 1455 bp, Pseudomonas putida GB-1
  CDS (1)..(1455): transl_table=11
atgagcatccgccgtaccaaaatcgtcgccacccttggccccgccagcaactcgccggaagtgatcgaacagctgatccttgccggcctggacgtggcacgcctgaacttctcccacggcacgccggacgagcacaaggcccgtgcgcgcctgatccgtgacatcgccgccaagaacggccgccatgttgcattgctgggcgacctgcagggtccgaagatccgcatcgccaagttcgccaacaagcgcatcgaattgaagatcggtgacaagttcaccttctccaccgcccacccgctgaccgaaggcaaccaggacatcgtcggtatcgactaccccgacctggtcaaggactgcggcgttggtgacgagctgctgctcgacgatggtcgcgtggtcatgcgcgtcgaaaccgccactgcagacgccctgcactgcgtggtgatcatcggtggcccgctgtcagaccacaaaggcatcaaccgtaaaggtggcggcctgaccgcaccggccctgaccgaaaaagacaaggccgacatcaagctggccgcggaaatggacctggactatctggccgtatccttcccacgtgacgccagcgacatggaatacgcgcgcaagctgcgtgacgagtccggcggcagcgcctggctggtggccaagatcgaacgcgccgaagcggttgccgacgacgagaccctcgacaagctgatcgccgcctccgacgcagtgatggttgcccgtggcgacctgggcgtggaaatcggcgacgccgagctgatcgccatccagaagaagatcatccagcacgcccgccgcaacaacaaggcggtgatcgtggcgacccagatgatggagtcgatgatccagaacccgatgccgacccgtgccgaagtgtccgacgtggccaatgccgtgctggacaacaccgacgcggtgatgctgtcggccgaaagcgccgcaggttcctacccgatcgaagccgtccaggccatggcccgcatctgcctgggtgccgaaaagcacccgaccagccagaagtccagccaccgcctgcacaccaccttcgagcgctgcgacgaaagcatcgccttggcggccatgtacaccgccaaccacttcccgggcgtgaaggcgatcatcgccctgaccgaaagcggctacaccccgctgatcatgtcgcgcctgcgttcgcacgtgccgatcttcgccctgtcgccgcaccgcgctacccaggcgcgcgccaacatgttccgtggcgtgtacccgattgccttcgacccggcttcgctgccggccgacaaggtgagccaggcagccgtggacgagctgctcaagcgtggcctggtgcagcaaggtgactgggtgatcctgaccaagggtgacagctaccacaccatcggtggcaccaacggcatgaagatcctgcatgtcggtgacccgctggtcggttga

SEQ ID NO: 8670 - protein, 484 aa, Pseudomonas putida GB-1
MSIRRTKIVATLGPASNSPEVIEQLILAGLDVARLNFSHGTPDEHKARARLIRDIAAKNGRHVALLGDLQGPKIRIAKFANKRIELKIGDKFTFSTAHPLTEGNQDIVGIDYPDLVKDCGVGDELLLDDGRVVMRVETATADALHCVVIIGGPLSDHKGINRKGGGLTAPALTEKDKADIKLAAEMDLDYLAVSFPRDASDMEYARKLRDESGGSAWLVAKIERAEAVADDETLDKLIAASDAVMVARGDLGVEIGDAELIAIQKKIIQHARRNNKAVIVATQMMESMIQNPMPTRAEVSDVANAVLDNTDAVMLSAESAAGSYPIEAVQAMARICLGAEKHPTSQKSSHRLHTTFERCDESIALAAMYTANHFPGVKAIIALTESGYTPLIMSRLRSHVPIFALSPHRATQARANMFRGVYPIAFDPASLPADKVSQAAVDELLKRGLVQQGDWVILTKGDSYHTIGGTNGMKILHVGDPLVG

SEQ ID NO: 8671 - DNA, 1449 bp, Marinobacter sp. ELB17
  CDS (1)..(1449): transl_table=11
atgctccggcgtacaaagattgttgccacccttggtcccgctaccgacagccccgaatctttgggcgctattattgctgcgggtgtcgacgttacccgtctgaatttttcccacggcactgcggaagatcacgaaaagcgcgcgcgcctggtacgcgacaccgccaaggcacagggccgttttgtcgctattatggccgacctgcaagggccaaaattgcgcattgcccgctttcgcgacaataaagtcaccctgaccgccggccaaacctttgtgctggatgccaccatggacaaagaaagtggcacctccgattgcgtaggcatcgattacgaacagctgatccgcgatgtaaaacccggcgacattctggtgttggacgacggtcgcatcgaaatgcagatagacgcggtagacgatcacagcatcacctccacggttctgatcggtggacccttgtctaacaacaaaggcctgaacaagcgcggcggtggcctgtcggctgaggcgctgaccgagaaagacaagcaagacattgttactgccgccaagttgggcgcggattatgtggccgtttctttcgttcgcaacgccgaagacatgcacacagctcgtcgtttgctgaaagaagccggctctgaagcggggctggtcgcaaaaattgaacgcgccgagctggcccacgatgacgccgcactggatgcggtcatcgaagcgtctgacgtggtcatggttgcccgcggcgatctggcagtggaaatcggcgatgccgaactggtcggtgtgcaaaagcacattattcagcgcgctcgaattctcaaccgcgcggtgattactgccacccagatgatggaatcgatgatcaccaaccctatgcccacccgcgccgaagtgtcggatgtggctaacgcggtgatggattacacggacgcagtgatgctgtcggcagaaaccgctgttggtgattatccggtggaagcggtaaccgccatggtgcgaatttgcattggtgcggagaaacacccctccatgcaccagtccaaacatcggatgcacgagtccatgggacgggtagatgaagccattgctctgtctaccatgtacgcggccaatcacctgaacggcatagccgctatcatctgcctgaccgaaaccggtgcaaccccgcagctgatgtctcgcatcaagtccagcttgccgatttatgcgttttcacgccatcacaccacccagcaccgggtagtgatgtaccgtggcgtgcaaaccgtaccctttgatgctgcaaactttgcggccgaagacaccaacaccgaggcggtagagcaactggtaaaacaaggcgtagtgaaaaacggcgatctggttatcatcaccaaaggcaattttaccaatgcccaaggcggcaccaattccatgcaaatcctgcgtgtaggtgaacatttgcactaa

SEQ ID NO: 8672 - protein, 482 aa, Marinobacter sp. ELB17
MLRRTKIVATLGPATDSPESLGAIIAAGVDVTRLNFSHGTAEDHEKRARLVRDTAKAQGRFVAIMADLQGPKLRIARFRDNKVTLTAGQTFVLDATMDKESGTSDCVGIDYEQLIRDVKPGDILVLDDGRIEMQIDAVDDHSITSTVLIGGPLSNNKGLNKRGGGLSAEALTEKDKQDIVTAAKLGADYVAVSFVRNAEDMHTARRLLKEAGSEAGLVAKIERAELAHDDAALDAVIEASDVVMVARGDLAVEIGDAELVGVQKHIIQRARILNRAVITATQMMESMITNPMPTRAEVSDVANAVMDYTDAVMLSAETAVGDYPVEAVTAMVRICIGAEKHPSMHQSKHRMHESMGRVDEAIALSTMYAANHLNGIAAIICLTETGATPQLMSRIKSSLPIYAFSRHHTTQHRVVMYRGVQTVPFDAANFAAEDTNTEAVEQLVKQGVVKNGDLVIITKGNFTNAQGGTNSMQILRVGEHLH

SEQ ID NO: 8673 - DNA, 1464 bp, Riemerella anatipestifer
  CDS (1)..(1464): transl_table=11
atgcaaagagcccgccgcgcgcgcatcgtcgcgacactcggacccgccagccgtgcgccgggaacggtcaaggcgctggcgcaggccggggtggacgtctttcgcctgaacttcagccatggctcgcacgacgaccacgccgccgccctcaaggccgtgcgcggggccgaaatggcgctgaagcggccgctgggcgtattggccgacctgcaggggcccaagctgaggttgggccgcttcgctgatgtcgagatcgaggtgaagccgggccaccagatgcgcttcgacctgaacccggcgctgggcgacgagacgcgggtgcagatgccgcatccggaaatcttcaaggcgctgcggccgggcatgctgctgctgctggacgacggccgggtgcgcctgcgcgtgggcgagcgcaccgatgaatggtgcgacgtgacggtcgagagcggctccaagctgtcggaccgcaagggggtggcggtgcccgaggcggtcattccggtctcggccctgacgcccaaggaccgcgaggatctggccttcgcgcttcgcctcggcgtcgactgggtggccctcagtttcgtgcagaaggccgaggacatggccgagctgaagagcatcgtgaacggtcaggccgcctgcctggccaagatcgaaaagcctcaggccctgaacgacctcgagagcatcctcgactactgcgacggcgtcatggtcgcgcgcggcgatctgggggtcgagatggacccggaggaagtgccggtcgcccagaagaagatcctgcgcgccgcccgccagcgcggcgtccccgccatcgtcgcgacgcagatgctggaatcgatgaccagcgccccggccccgacccgcgccgaggcgtccgacgtggccaacgccgtctatgagggcgccgacgccctgatgctgtcggccgagacggcggcgggcgactatccgctggaagccgtcgccatcatgaaccgcatcatggagcgggtggagcgcgaccccctgtggccgggcctgatggacgccgaacacgcgggcatggacatcgacgacgtcgacgccctggtcgcggcggcgaggaaggcggccgaggcgtcctcgaccgcctgcatggtggtgttcaccaccctgggcggcacggcgcggcggatgtcgcgcgagcggccgctgcagccggtcctggcgctgacgcccaagcccgagacggcgcgtcgcctggccctggtctgggggctggagccgcgtctgggcgaacagccgacctcgctggaaggcctgaccgacgatgcggtcgaggcggccatgctttacggcctggccgagccggggcagcgcatcctgatcctggccggaacgcccttcggcgcgccgggggccgcgaatctgttgcgtctggcccatgctccggcccatgctgccccccggcaacacggggcgaagcgcgcccgcaaaacctga

SEQ ID NO: 8674 - protein, 487 aa, Riemerella anatipestifer
MQRARRARIVATLGPASRAPGTVKALAQAGVDVFRLNFSHGSHDDHAAALKAVRGAEMALKRPLGVLADLQGPKLRLGRFADVEIEVKPGHQMRFDLNPALGDETRVQMPHPEIFKALRPGMLLLLDDGRVRLRVGERTDEWCDVTVESGSKLSDRKGVAVPEAVIPVSALTPKDREDLAFALRLGVDWVALSFVQKAEDMAELKSIVNGQAACLAKIEKPQALNDLESILDYCDGVMVARGDLGVEMDPEEVPVAQKKILRAARQRGVPAIVATQMLESMTSAPAPTRAEASDVANAVYEGADALMLSAETAAGDYPLEAVAIMNRIMERVERDPLWPGLMDAEHAGMDIDDVDALVAAARKAAEASSTACMVVFTTLGGTARRMSRERPLQPVLALTPKPETARRLALVWGLEPRLGEQPTSLEGLTDDAVEAAMLYGLAEPGQRILILAGTPFGAPGAANLLRLAHAPAHAAPRQHGAKRARKT

SEQ ID NO: 8675 - DNA, 1500 bp, Oryza sativa subsp
  CDS (1)..(1500)
atgaccaagatcgtggggacgctgggtcccaagtcgcgcgccgtcgacaccatctcctcctgcctcaaggccggcatgtcggttgccaggttcgatttctcgtggggagacgctgagtaccaccaggaaaccctcgaaaacctcaagctcgccatcaagtccaccaagaagctctgtgctgtcatgctcgacactgtcggcccggagttgcaggtggtgaacaagagtgaggctgcaatctcccttgaagcgaatggcactgttgttctcacccctgaccaggggcaggaggcctcctccgaattgctgcccatcaacttctccgggcttgctaaggctctgaaaccaggtgctacaatttttgtggggcaatacttgttcactggcagtgagactacttcagtttggttagaggtttctgaagttaaaggagatgatgtggtttgtgtgataaaaaattcggctactctggctggttcactgttcaccctgcattgttctcagattcatatcgacttacctacactgtctgatgaggacaaggaggttatcagaagatggggagctccaaacaagattgacttcctctctctgtcttatacaagacacgcggaagatgtgcgacaggcacgtgagttcctctcaaagttaggcgaccttagccaaactcagatttttgccaaaattgagaatgttgagggtttgaatcattttgatgaaatcctgcaagaggcggatggtatcattctgtcaagaggaaaccttggaattgatcttccacctgaaaaggtgtttttgtttcaaaagtctgctctgcacaagtgcaacatggctggaaagcctgctgttgttactcgtgttgtggacagtatgactgacaacctcaggcctactcgtgcggaggctactgatgtggcaaatgctgtacttgacgggagtgatgccattctccttggtgctgagactctccgtggtctgtacccagttgagactatctcaattgtgggcaaaatttgcgctgaggcagagaaggtattcaaccaagatttatacttcaagcggactgtgaaatatgttggggagcccatgacccacttggagtctatcgcttcttctgcggtgcgagctgctatcaaagtgaaggcttctgtcattatttgcttcacatcatctggacgcgctgcaagactaattgccaagtacaggcccaccatgcctgttctatctgttgtcattcctcgtctgaaaacaaaccaactgaggtggagtttcactggcgcatttgaagcaagacaatcactcatagttagaggtctctttccgatgcttgctgatcctcgccatccagctgaatcgaccagcgctaccaatgagtcagttttgaaggttgctcttgaccatggcaaagcttccggtgtgatcaagtcgcatgatcgcgttgttgtctgccagaaagtgggtgattcctcggttgtgaagatcattgagctggacgattag

SEQ ID NO: 8676 - protein, 499 aa, Oryza sativa subsp
MTKIVGTLGPKSRAVDTISSCLKAGMSVARFDFSWGDAEYHQETLENLKLAIKSTKKLCAVMLDTVGPELQVVNKSEAAISLEANGTVVLTPDQGQEASSELLPINFSGLAKALKPGATIFVGQYLFTGSETTSVWLEVSEVKGDDVVCVIKNSATLAGSLFTLHCSQIHIDLPTLSDEDKEVIRRWGAPNKIDFLSLSYTRHAEDVRQAREFLSKLGDLSQTQIFAKIENVEGLNHFDEILQEADGIILSRGNLGIDLPPEKVFLFQKSALHKCNMAGKPAVVTRVVDSMTDNLRPTRAEATDVANAVLDGSDAILLGAETLRGLYPVETISIVGKICAEAEKVFNQDLYFKRTVKYVGEPMTHLESIASSAVRAAIKVKASVIICFTSSGRAARLIAKYRPTMPVLSVVIPRLKTNQLRWSFTGAFEARQSLIVRGLFPMLADPRHPAESTSATNESVLKVALDHGKASGVIKSHDRVVVCQKVGDSSVVKIIELDD

SEQ ID NO: 8677 - DNA, 1500 bp, Oryza sativa subsp
  CDS (1)..(1500)
atgaccaagatcgtggggacgctggggccaaagtcgcgctccgtcgacaccatctcctcctgcctcaaggccggcatgtcggtggcccgatttgatttctcgtggggagacgccgagtaccaccaggaaacccttgagaacctcaaggtcgccatcaagtccaccaagaagctctgcgcggtcatgcttgacacggtcggcccagagttgcaggtggtgaacaagagcgaagcctccatctccctcgaggagaacggcactgttattctcacccctgaccaggggcaggaggcctcctcacaagtgctgccaattaacttcgctgggcttgctaaggctgtgaagccaggtgacacaatatttgttgggcaatacttgttcacaggcagtgagactacttcagtttggttagaggtttctcaaattaaaggagatgatgtggtctgtgtgataaaaaacacagcaactctggctgggtcgctcttcacattgcattgctcgcagattcacatcgacttacctaccctatctgatgaggacaaggaggttatcagaaaatggggtgccccaaacaagattgacttcctctctctttcttatacaagacatgtagaagatgtgcgacaggcacgtgaattcctctcaaagttaggtgaccttagccagacccagatttttgcaaaaatcgagaatgtggaggggttgaataattttgatgaaatcctccaagaagctgatggtatcatcctgtcaagaggaaaccttggaattgatcttccacctgaaaaggtgtttttatttcaaaagtctgctctgcacaagtgcaacatggctggaaagcctgctgttgttactcgtgttgtagacagtatgactgacaacctcaggcctactcgtgcagaggctacggatgtggcaaatgcagtgcttgacgggagtgatgccattctccttggtgctgagactctgcgtggtttatacccagttgagactatttcaatagtgggtaaaatttgtgctgaggctgagaaggtcttcaaccaagatttatacttcaagagaactgtgaaacatgtgggggagcccatgacccacttggagtctattgcttcctctgcggtgcgagctgctattaaagtgaaggcgtctgtcataatttgcttcacatcatctggacgtgctgcaaggctaattgccaagtataggccaaccatgcctgttctatctgttgtcattcctcgtctaaaaacaaatcaactgaggtggagtttcactggcgcatttgaagcaagacaatcgctcatagttagaggcctctttccgatgcttgctgatccgaggcatccagctgaatcaaccaacgctacaaatgaatccgttttgaaggttgctcttgaccacggtaaagtttctggtgtgataaagtcgcatgatcgcgttgttgtctgccagaaggtgggagattcctcggttgtgaagatcattgagctggacgattag

SEQ ID NO: 8678 - protein, 499 aa, Oryza sativa subsp
MTKIVGTLGPKSRSVDTISSCLKAGMSVARFDFSWGDAEYHQETLENLKVAIKSTKKLCAVMLDTVGPELQVVNKSEASISLEENGTVILTPDQGQEASSQVLPINFAGLAKAVKPGDTIFVGQYLFTGSETTSVWLEVSQIKGDDVVCVIKNTATLAGSLFTLHCSQIHIDLPTLSDEDKEVIRKWGAPNKIDFLSLSYTRHVEDVRQAREFLSKLGDLSQTQIFAKIENVEGLNNFDEILQEADGIILSRGNLGIDLPPEKVFLFQKSALHKCNMAGKPAVVTRVVDSMTDNLRPTRAEATDVANAVLDGSDAILLGAETLRGLYPVETISIVGKICAEAEKVFNQDLYFKRTVKHVGEPMTHLESIASSAVRAAIKVKASVIICFTSSGRAARLIAKYRPTMPVLSVVIPRLKTNQLRWSFTGAFEARQSLIVRGLFPMLADPRHPAESTNATNESVLKVALDHGKVSGVIKSHDRVVVCQKVGDSSVVKIIELDD

SEQ ID NO: 8679 - DNA, 1446 bp, Magnetospirillum gryphiswaldense
  CDS (1)..(1446): transl_table=11
atgcgtagaacaagaaaagccaagatcatcgccaccctgggcccggcgtcgtcgacgccgcaggccattgaaagcctgttccgggccggggctgacgttttccgcctgaatttcagccacggcagccatgccgaccatcaggcccgctacgacaccatccgcgcgctggaacaaaagatcggacgtcccatcggcgtgctggccgatctgcaaggccccaagctgcgggtcggcaagttcgccgatggcaagatcaagctggagaccggcgccaccttccgcctggatctgtcaccggaactgggcactggcgtgcgcgcgccgctcttgcacccggaagtgttcgccgccatgaacgtgggcaccgagttgctgctggatgacggcaagctgcggctgcgggtcgaacagcacggtggagatttcgccgagacgcgggtgatcgtcggcggtgaattgtccaaccacaagggcgtcaacgtccccaacgtggtgctgcccatctcgcccttgaccgacaaggacaaggccgatctggatttcgccgtcgacatgggggcggactggatcgcgctgtccttcgtccagcgtcccggcgacgtcctggaagcgcgcaagctgatcgcccgcaaggtgggcagccgcgtgcgcctgttgtccaagctggaaaagccctcggccatcgattacctggaagaaatcgtcgaattgtccgacgcggtgatggtggcacgcggcgatctgggggtggaatgcccgccggaatcggtgccgatcctgcaaaagcgcatcatcaagtgctgccgctccgccggcaagccggtggtggtggcgacccagatgctggattccatggtccattcgccgtcgccgacccgagccgaggcctcggacgtggccaccgccatctatgacggcgccgacgcggtgatgctgtcggcggaaaccgcctcgggcgattatccggtggacgcggtgaccatgatggaccgcatcatcaatcgggtggaagaagacgaccagtacacggtgatcaccgacgcctcgcgctcgcagccggaaaacaccacccgcgacgccatttccgccgccgcccggcaggtcgcccatacgctgaaggccgccgccgtggtcaccttcacctcgtcgggctcgactaccttgcgcgctgcccgcgaacgaccgcagcagccgatcatctcgctgacctcgggcatcgaggtggcgcgccagttggccctggtgtggggggcgcattgcgtgccgacccaggaagtgcgcagcttcgccgaaatggtgcagacggcggccaaggcggcgcaggatgaatccttcgcccatcccggcgaccgcatcgtcatcaccgccggcgtgccgtttggctgttccggcaccaccaacatcctgcgggtggcggaaatcgaggaaagcggcgaagtcctgtaa

SEQ ID NO: 8680 - protein, 481 aa, Magnetospirillum gryphiswaldense
MRRTRKAKIIATLGPASSTPQAIESLFRAGADVFRLNFSHGSHADHQARYDTIRALEQKIGRPIGVLADLQGPKLRVGKFADGKIKLETGATFRLDLSPELGTGVRAPLLHPEVFAAMNVGTELLLDDGKLRLRVEQHGGDFAETRVIVGGELSNHKGVNVPNVVLPISPLTDKDKADLDFAVDMGADWIALSFVQRPGDVLEARKLIARKVGSRVRLLSKLEKPSAIDYLEEIVELSDAVMVARGDLGVECPPESVPILQKRIIKCCRSAGKPVVVATQMLDSMVHSPSPTRAEASDVATAIYDGADAVMLSAETASGDYPVDAVTMMDRIINRVEEDDQYTVITDASRSQPENTTRDAISAAARQVAHTLKAAAVVTFTSSGSTTLRAARERPQQPIISLTSGIEVARQLALVWGAHCVPTQEVRSFAEMVQTAAKAAQDESFAHPGDRIVITAGVPFGCSGTTNILRVAEIEESGEVL

SEQ ID NO: 8681 - DNA, 1755 bp, Bacillus subtilis
  CDS (1)..(1755): transl_table=11
atgagaaaaactaaaattgtttgtaccatcggtccggcaagtgaaagtattgaaatgcttacgaaattaatggagtcaggaatgaacgtggctcgattaaacttttctcacggagattttcaggagcacggtgcaagaattaaaaatatccgcgaggcagctgaaaaacttggcaagaacgttggaattctgcttgatacaaagggtcctgaaatccgcacacatacaatggaaaacggttccatagagctgaacgcaggaagcaaactcgtaataagcatgacggaggtgataggaacaccagataaaatttcagtgacatatgaaggtttagtccatgacgttaacaaaggttcaacgattctgttagatgacggccttatcggtcttgaggtacttgatgtagatgccgtaaaacgcgaaatcaaaacaaaagtattaaacaacggaacactcaaaaataaaaaaggtgttaacgtacccgggcgtaagtgtcaatcttccgggattactgaaaaggatgcgcgagacatcgttttcggtattgagcaaggagtagacttcatcgcaccatctttcattcgacgttctacggatgtgctcgaaatccgtgagcttcttgaagagcacaacgctcaggatattcaaatcatccctaaaatcgaaaaccaagagggcgttgacaacatcgatgcgattctcgaagtgtctgacggcttaatggttgcacgcggagacttaggtgtggaaattccagctgaagaagtgccgcttgtgcaaaaagaactgatcaaaaaatgcaacgcgctgggcaaacctgttattacagcgacacaaatgcttgacagcatgcagcgcaacccgcgtccgactcgtgcggaagcaagtgacgttgcaaacgcgatcttcgacggaacagatgcgatcatgctatctggtgaaactgctgccggaagctatccggttgaagcagttcaaacaatgcataacatcgcgtcccgttctgaagaagctttaaattataaagaaattctctcaaaacgcagagatcaagtgggcatgacaattacagacgcaattggacaatctgtcgcgcatacggcgattaacctgaatgctgcgatcgtaacgccgacagaaagcggccatacagcacgtatgattgcaaaataccgtccgcaggctccgattgttgcggttactgtaaatgactctatttccagaaagcttgccctcgtatctggcgtattcgcggaaagcggccaaaatgcgagctcaacagatgagatgcttgaggatgctgtccaaaaatcattgaacagcggaattgtaaaacacggcgatcttatcgttattacagcaggcactgtcggtgagtccggcactacgaatttgatgaaggttcatactgtcggtgatatcatcgctaaaggccaaggcattggacgcaaatcagcttacggtccggtcgtcgttgcacaaaatgcaaaagaagctgagcaaaaaatgactgacggtgcggtacttgttaccaaaagcactgaccgtgatatgattacatcccttgaaaaagcgtctgctcttattacagaagaaggcggtttgactagccatgcggcggtagtcggattaagccttggcatcccggttatcgtgggtctggaaaatgcgacatctattttgacagatggccaggatattacagttgacgcttccagaggtgcagtctatcaaggccgtgcgagcgttctttaa

SEQ ID NO: 8682 - protein, 584 aa, Bacillus subtilis
MRKTKIVCTIGPASESIEMLTKLMESGMNVARLNFSHGDFQEHGARIKNIREAAEKLGKNVGILLDTKGPEIRTHTMENGSIELNAGSKLVISMTEVIGTPDKISVTYEGLVHDVNKGSTILLDDGLIGLEVLDVDAVKREIKTKVLNNGTLKNKKGVNVPGRKCQSSGITEKDARDIVFGIEQGVDFIAPSFIRRSTDVLEIRELLEEHNAQDIQIIPKIENQEGVDNIDAILEVSDGLMVARGDLGVEIPAEEVPLVQKELIKKCNALGKPVITATQMLDSMQRNPRPTRAEASDVANAIFDGTDAIMLSGETAAGSYPVEAVQTMHNIASRSEEALNYKEILSKRRDQVGMTITDAIGQSVAHTAINLNAAIVTPTESGHTARMIAKYRPQAPIVAVTVNDSISRKLALVSGVFAESGQNASSTDEMLEDAVQKSLNSGIVKHGDLIVITAGTVGESGTTNLMKVHTVGDIIAKGQGIGRKSAYGPVVVAQNAKEAEQKMTDGAVLVTKSTDRDMITSLEKASALITEEGGLTSHAAVVGLSLGIPVIVGLENATSILTDGQDITVDASRGAVYQGRASVL

SEQ ID NO: 8683 - DNA, 1428 bp, Zymomonas mobilis
  CDS (1)..(1428): transl_table=11
ttgactgaaggacttttcccacgcggccgcaaggtacgtgttgtttctacgctgggtcctgccagctcgacggcagaacagattcgtgatcgtttcttggctggtgcggatgtattccgtatcaacatgagccatggtacccatgacgaaaagaaggtcatcgttgacaacattcgtgcgcttgaaaaagaattcaaccgcccgaccacgatccttttcgatcttcagggtccgaagctccgcgttggtgacttcaaagaaggcaaggttcagttgaaagaaggccagaccttcactttcgatcaggacccaactctcggtgacgaaacccgcgtcaacctgccgcatcctgaaatcttcaaggctttagacaaaggtcatcgcctgcttttggatgatggtaagatcgttgttcgttgcgtcgaatcttccccgaccaaaatcgttacccgcgtcgaagttccgggtccgctttccgaccataaaggtttcaacgttcctgacgttgtgattccgctggccgctctgaccccgaaagatcgcaaagatctcgactttgctcttaaggaaaaagctgactgggttgctcttagctttgtgcagcgcgtcgaagacgtcatcgaagccaaagaactcatcaaaggtcgcgcaccgcttctcgttaaactcgaaaagccagctgccattgaaaacctcgaatccatcttggctgcaaccgatgctgtcatggttgctcgtggtgacctcggtgttgaatgcttgccggaatccgttcccccgacgcagaagcgtatcgttgaacgctcccgccagctgggtaagccggttgttgttgcaaccgctatgctcgaatccatgatcaaagctccggctccgacccgcgctgaagtaagtgacgttgcaaacgccatttacgaaggtgctgatggtatcatgctttctgcagaatccgccgccggtgattggccgcatgaagctgtcaacatgatgcatcgtattgcttcttatgttgaaaatgctccgggttacatcgaacgcgttcgcttcaccccgactccggcagaaccgacgacggttgacgctctggctgaaaacgccagcaaaaccgctgaaacggttggcgcaaaagcgatcatcgtcttcaccgaaaccggtaagaccgcacagcgcgtttcccgcgcccgtccggttgctccgatcctgtctctgaccccggatgccgaagttgctcgtcgtcttggtttggtctggggcgcacagccggttcaggtttccacggttaagaccctcgacgaagccaagaagctggctgctgaaaccgctaaaaaatacggtttcgccaaagccggtgacaagctggttgttgttgcaggtgaacctttcggtaaagctggaaccaccaacattgttgatgttatcgaagcctaa

SEQ ID NO: 8684 - protein, 475 aa, Zymomonas mobilis
MTEGLFPRGRKVRVVSTLGPASSTAEQIRDRFLAGADVFRINMSHGTHDEKKVIVDNIRALEKEFNRPTTILFDLQGPKLRVGDFKEGKVQLKEGQTFTFDQDPTLGDETRVNLPHPEIFKALDKGHRLLLDDGKIVVRCVESSPTKIVTRVEVPGPLSDHKGFNVPDVVIPLAALTPKDRKDLDFALKEKADWVALSFVQRVEDVIEAKELIKGRAPLLVKLEKPAAIENLESILAATDAVMVARGDLGVECLPESVPPTQKRIVERSRQLGKPVVVATAMLESMIKAPAPTRAEVSDVANAIYEGADGIMLSAESAAGDWPHEAVNMMHRIASYVENAPGYIERVRFTPTPAEPTTVDALAENASKTAETVGAKAIIVFTETGKTAQRVSRARPVAPILSLTPDAEVARRLGLVWGAQPVQVSTVKTLDEAKKLAAETAKKYGFAKAGDKLVVVAGEPFGKAGTTNIVDVIEA

SEQ ID NO: 8685 - DNA, 2100 bp, Ostreococcus tauri
  CDS (1)..(2100)
atgagcgggttgagctcgaacacggcgctgagcgcgttattaggctcgcgagggcacgggacggcgcaacacattctggagaatgggcacgtgcgggcgctgagtgagagcgcggaggggatgtttcgcgagcgggatagtcacaggattgggttcaagtcgaagatcatctgcacgctcggaccggtttcgaggacggtggagattttggagaagatgttgcgagccggaatgtccatcgcgcgattcaacttctctcacggctcgcacgagtaccaccaggagactttggataatctcagacttgcgtgcgcgaatactggagtggattgtgcgattttactcgacacgaagggaccggagattcgcaccggtatgctcgacggcggcggccccatcatgttggaagtcggcaacgagatcacgttgaccacggattacgacttcaagggtagcgcggagaagatcgcggtatcgtacccggatttggcgaaggatgtcaagcctggatcgaagattttgtgcgccgacggctcggtgacgttcaccgtgctcgagtgcgacgtcgccaagggcgaggtgcgatgtaagctcgaaaacagcgccaagctcggcgagcgcaagaacatgaacttaccgggcgtcgtcgtgaacttgccgacgatcaccgagaaggatcgccatgacttgatcgagtggggcgtgaagaaccaagtcgatttcatcgccgcctccttcgttcgcaagggcagcgacgtggagtacattcgcagcgtcttgggcgactttgcgagcaaggtgtccatcatctccaaggttgaaaacatggagggtctggacaactttgaagacatcgtggaagcctccgacggtgtcatggtcgctcgcggtgatttgggcatggagatccgcatggaacagattttcttggctcaaaagcgcatgattaagcgatgtaatctggcgggcaaacccgtcgtgacggctacgcaaatgttggagtccatgactggcgctccgcgaccgactcgcgctgaggcgacggacgtcgcgaacgccattctcgatggcaccgacgccgtgatgctttcgggcgaaaccgcagcgggctcgtaccctctggatgcggtgaagtgcatggcgtccatctgccgcgaagccgaggcgtacgtcaacgatgtcgccgactacttccaaatcctcgagcaacaaatggtcccgctcggggtgacggaggccatggcatcctcggcggtgcgtacggcgcaaaaggtcaacgcctcgctcatcattaccctctcacgcaccggtcacacggctcagatgatcgcaaagtaccgtcccgctatgcgcatcattaacgtgtgcatggacgacgctgggtttccgggtcgcgccctggaagtatctcgtcggtcgctcataacccgcggactcgttcctctgctagaacacccagcatggcgtggcgagagcggccacccgcaagaggtcatgcgcaatgccatcatatactgccgagacgtcctcggcttggtcaaagctggcgacgccgtaatcggagtccacagaatcatgggcgaggcagtcttaaaggtcgtcatccacagcagattagaaggccacaacagtcacagtcatccgcgcgcgaggtctccgcccgagcgtcccaagattcccaaaatctcaaaccgtcagggcaaaaccagactggcgaagtactacgtcccgctcgacgacgacgagaaacgccgagtcgagagcgacgtccatcgattggtcgtcaacagagaccccaagcacaccaacatctgcgagttccgtgggaactcgaagattgtctatcggagatacgccggactattcttctcgttgtgcgtcgacctgaacgataacgagctgacgcacctggagtcgattcacctattcgtggagatgctcgatcacttcttcgcaaacgtgtgcgagttggacttggtgtttaactttcagaaagtgtatctgttggtggatgagttcattctggggggagaagtgcaagatacgagtaagcgggcgatcatggagcgcttggcggagctcgagcggttgaaggattga

SEQ ID NO: 8686 - protein, 699 aa, Ostreococcus tauri
MSGLSSNTALSALLGSRGHGTAQHILENGHVRALSESAEGMFRERDSHRIGFKSKIICTLGPVSRTVEILEKMLRAGMSIARFNFSHGSHEYHQETLDNLRLACANTGVDCAILLDTKGPEIRTGMLDGGGPIMLEVGNEITLTTDYDFKGSAEKIAVSYPDLAKDVKPGSKILCADGSVTFTVLECDVAKGEVRCKLENSAKLGERKNMNLPGVVVNLPTITEKDRHDLIEWGVKNQVDFIAASFVRKGSDVEYIRSVLGDFASKVSIISKVENMEGLDNFEDIVEASDGVMVARGDLGMEIRMEQIFLAQKRMIKRCNLAGKPVVTATQMLESMTGAPRPTRAEATDVANAILDGTDAVMLSGETAAGSYPLDAVKCMASICREAEAYVNDVADYFQILEQQMVPLGVTEAMASSAVRTAQKVNASLIITLSRTGHTAQMIAKYRPAMRIINVCMDDAGFPGRALEVSRRSLITRGLVPLLEHPAWRGESGHPQEVMRNAIIYCRDVLGLVKAGDAVIGVHRIMGEAVLKVVIHSRLEGHNSHSHPRARSPPERPKIPKISNRQGKTRLAKYYVPLDDDEKRRVESDVHRLVVNRDPKHTNICEFRGNSKIVYRRYAGLFFSLCVDLNDNELTHLESIHLFVEMLDHFFANVCELDLVFNFQKVYLLVDEFILGGEVQDTSKRAIMERLAELERLKD

SEQ ID NO: 8687 - DNA, 1584 bp, Phaeosphaeria nodorum
  CDS (1)..(1584)
atggccaacgctctcgaccacctcaatgccggccggaccaggattgagtggctcagccagctcaacaccgagtaccaccctgcgaaggagtaccgccgaacctccatcatcggcaccattggccccaagaccaactctgcggagaagatgaacgctctccgcagggctggcctcaacgtcgtccgcatgaacttctcccacggctcgtacgaataccaccagtccgtcatcgacaacgcgcgcgaagccgagaagcaacagtctggcaggccgctcgccatcgccctcgacaccaagggccccgaaatccgtacaggtaacactgtcggggatgcggacatcccgatcaaggctggcaccgagctcaacatcaccaccgatgatgcctatgccaccaagtgcgacgacaagaacatgtacgtcgactacaagaacatcacaaaggtcattgaggtcggccgcaccatctacgtcgatgacggtgtcctctcattcgaggtcctcgaggttgtcgacgaccagacactgagggtcaagtgcgtgaacaacggcaagatctcctccaagaagggtgttaacctgcccaagaccgacatcgatcttcccccgctgtccgagaaggacaaggccgacttgaagttcggtgtcaagaacaaggtcgacatggtctttgcttcgttcatccgccgcggcagcgacatcactgctatccgtgaggtgctcggcgaggagggcaaggacatccagatcattgccaaggtcgagaaccagcaaggtgtgaacaacttcgacgacatcctcaaggagaccgacggtgtcatggttgcccgtggtgacttgggtatcgagatcccgcccagccaggtcttcattgcgcagaagatgatgatcacaaagtgcaacattgccggaaagcctgtcatttgcgcgacccagatgctcgagtccatgacctacaaccctcgcccaacccgtgccgaagtcagcgatgtcggaaacgctgtccttgacggagccgactgcgtcatgttgtctggcgagactgctaagggagactaccccgtcgaggccgttaccatgatgcacgagacctgcttgctcgcagaggtcgctatcccatacgtaaacgcattcgatgagctgaggaaactggctcctgtcccttgccctaccacagagacctgcgccatggctgccgtcagcgccagtctggagcagaacgctggtgcgatcttggtcttgaccaccagtggtaccaccgcgcgcctcgtttccaagtaccgtcccgtgtgcccgatcatcatggtcacccgtaatgcttcggcttcaaggtactctcacctgtaccgtggtgtataccccttctacttcgcagaggagaagcccgacttcaaggccgcgccatggcaggaggatgttgaccgccgtttgaagtggggcatcatgaatgcgatcaagctcggcgtgctcgagaagggtgctcccgtcatctgcgtccagggctggagaggaggaatgggccacaccaacaccctccgcattgtacctgcgacggaagatcttggtttggaccaggaggcatga

SEQ ID NO: 8688 - protein, 527 aa, Phaeosphaeria nodorum
MANALDHLNAGRTRIEWLSQLNTEYHPAKEYRRTSIIGTIGPKTNSAEKMNALRRAGLNVVRMNFSHGSYEYHQSVIDNAREAEKQQSGRPLAIALDTKGPEIRTGNTVGDADIPIKAGTELNITTDDAYATKCDDKNMYVDYKNITKVIEVGRTIYVDDGVLSFEVLEVVDDQTLRVKCVNNGKISSKKGVNLPKTDIDLPPLSEKDKADLKFGVKNKVDMVFASFIRRGSDITAIREVLGEEGKDIQIIAKVENQQGVNNFDDILKETDGVMVARGDLGIEIPPSQVFIAQKMMITKCNIAGKPVICATQMLESMTYNPRPTRAEVSDVGNAVLDGADCVMLSGETAKGDYPVEAVTMMHETCLLAEVAIPYVNAFDELRKLAPVPCPTTETCAMAAVSASLEQNAGAILVLTTSGTTARLVSKYRPVCPIIMVTRNASASRYSHLYRGVYPFYFAEEKPDFKAAPWQEDVDRRLKWGIMNAIKLGVLEKGAPVICVQGWRGGMGHTNTLRIVPATEDLGLDQEA

SEQ ID NO: 8689 - DNA, 1533 bp, Arabidopsis thaliana
  CDS (1)..(1533)
atgtcgaacatagacatagaaggaatattgaaggagctacctaatgatgggaggactcctaagactaagatcgtttgtacattaggtcctgcgtctaggtctgtgacaatgattgagaagcttcttaaagcaggcatgaatgtagctcgattcaatttctctcacggaagccatgagtaccatcaggagactcttgacaatctccgcaccgctatgcagaataccggcattctcgctgctgttatgcttgatacaaaggggcctgagattcgtaccggtttcttgaaagatgggaaccctatacaactaaaggaaggccaagagatcacaattaccactgattatgacatcaagggcgatgagaaaacgatttccatgagctacaaaaagctcccagtggatgtgaagcccggaaataccatactatgtgcagatggaagcataagtcttgctgtcgtgtcatgtgatccaaacgctgggactgttatatgtcgatgtgaaaatacagccatgctaggtgaaagaaaaaatgtgaatctcccaggtgttgttgttgatctccccacattgactgacaaggatgtagaagatattcttaaatggggtgttccaaacaacatcgatatgattgctctttcatttgttcgcaaaggttcagatcttgttaatgtccggaaagtccttggatcacattccaagagtataatgttgatgtcgaaggttgagaaccaagaaggagtcctgaatttcgatgagattttgcgtgaaactgatgcattcatggttgctcgtggtgatcttgggatggagattccgatagagaagatcttcttggctcagaagattatgatctacaagtgtaaccttgcaggtaaaccggtggtcacagccactcaaatgctcgagtcgatgatcaaatcaccacggccaacacgagcagaagccacagatgtagcaaacgcagttctcgatggcactgactgtgtgatgcttagcggagaaagtgctgcaggagcttaccctgaaatagcagtgaaaacaatggctaaaatctgcatcgaggcggaatcatcgcttgactacaacacaatcttcaaggagatgattagagcaactccacttccaatgagcactcttgagagtcttgcatcatcagctgtacgaacggcaaacaaagccaaagccaaactcatcatcgtgttgaccagaggaggtacaacagctaaactggtggccaagtatagaccggctgttccaattctatcggtggttgttccggtcttcaccagcgatacgtttaactggagttgcagcgatgagtcaccggcgaggcatagtttgatatatagaggtctgataccggttttgggtgaaggatctgcaaaagcaactgatagtgaatccacagaggagattattgaatctgctttgaagtcagcgacagagaaaggactgtgtaaccatggtgatgctgtggtggctctgcaccgtattggagctgcttcggttatcaagatctgtgtggtgaagtga

SEQ ID NO: 8690 - protein, 510 aa, Arabidopsis thaliana
MSNIDIEGILKELPNDGRTPKTKIVCTLGPASRSVTMIEKLLKAGMNVARFNFSHGSHEYHQETLDNLRTAMQNTGILAAVMLDTKGPEIRTGFLKDGNPIQLKEGQEITITTDYDIKGDEKTISMSYKKLPVDVKPGNTILCADGSISLAVVSCDPNAGTVICRCENTAMLGERKNVNLPGVVVDLPTLTDKDVEDILKWGVPNNIDMIALSFVRKGSDLVNVRKVLGSHSKSIMLMSKVENQEGVLNFDEILRETDAFMVARGDLGMEIPIEKIFLAQKIMIYKCNLAGKPVVTATQMLESMIKSPRPTRAEATDVANAVLDGTDCVMLSGESAAGAYPEIAVKTMAKICIEAESSLDYNTIFKEMIRATPLPMSTLESLASSAVRTANKAKAKLIIVLTRGGTTAKLVAKYRPAVPILSVVVPVFTSDTFNWSCSDESPARHSLIYRGLIPVLGEGSAKATDSESTEEIIESALKSATEKGLCNHGDAVVALHRIGAASVIKICVVK

SEQ ID NO: 8691 - DNA, 1536 bp, Capsicum annuum
  CDS (1)..(1536)
atggccaacatagacatagctggaatcatgaaggatctccccaatgatggccgtgtcccaaagaccaagattgtttgcactttagggccatcttctagatcagtgccaatgttagagaagcttcttcgtgctggcatgaatgttgccaggtttaacttttcccatgggacccacgagtaccatcaggagacattgaacaatcttaagattgcaatgcagaatactcagattctatgtgctgtcatgcttgataccaaggggcctgagattcgaactggttttttaaaggatggaaaaccgattcagcttaaggaaggccaagaaatcactgtatccacagactataccataaaaggaaatgtagaaatgatctcaatgagctataagaagttggtagtggacttgaagcctggaaataccatcctgtgtgcagatggtacaattacccttactgttttgtcatgtgatccagcggcgggaacggtgagatgtcgctgcgagaacactgccaccttaggagagaggaagaatgtgaaccttccaggtgtggttgttgaccttccaacacttacggagaaggataaagaagatatactagagtggggtgttcctaacaacatcgatatgattgctctttcatttgtgcgcaagggttcagatcttgtcaatgttcgcaaggttcttggtccacatgccaagcgcattcaactaatgtcaaaggttgagaatcaggagggagttgtcaacttcgatgaaatccttcgtgagacagattctttcatggttgctcgaggtgatctcggaatggagattcctgttgagaagattttcttggcccagaagatgatgatatacaagtgtaatcttgctggtaagcctgtggtaactgctactcagatgcttgaatcaatgatcaagtctccacgacccacccgtgctgaggctactgatgtggctaatgccgtcttggatggcactgactgtgttatgttaagtggggagagtgcagctggagcttatcctgagttggcggtaaaaatcatggcacgaatctgccttgaggcagagtcttcacttgagtacgaggctatcttcaaggaaatgatcaggtgtactccattgccaatgagcccattggatgagtctagcatcatcagctgtccgcacgggctaacaaagctaaagcaaaactccattgttgtccttacacgtggcgggagcacagcaaaactggttgccaagtataggcctgctgttcctattctttcagtagttgtgcctgttttgactacagattctttcgattggtccatcagtgacgagaccccagctagacacagtttggtatataggggcttgattccaattcttggtgaaggttcagcaaaagctactgattctgaatcaactgaggtaatcttggaagcttccttgaaatcagccacagagaaagggctatgccaacccggtgatgctgtcgtggcacttcatcgtattggtgctgcatctgttatcaagatttgcatcgtgaagtaa

SEQ ID NO: 8692 - protein, 511 aa, Capsicum annuum
MANIDIAGIMKDLPNDGRVPKTKIVCTLGPSSRSVPMLEKLLRAGMNVARFNFSHGTHEYHQETLNNLKIAMQNTQILCAVMLDTKGPEIRTGFLKDGKPIQLKEGQEITVSTDYTIKGNVEMISMSYKKLVVDLKPGNTILCADGTITLTVLSCDPAAGTVRCRCENTATLGERKNVNLPGVVVDLPTLTEKDKEDILEWGVPNNIDMIALSFVRKGSDLVNVRKVLGPHAKRIQLMSKVENQEGVVNFDEILRETDSFMVARGDLGMEIPVEKIFLAQKMMIYKCNLAGKPVVTATQMLESMIKSPRPTRAEATDVANAVLDGTDCVMLSGESAAGAYPELAVKIMARICLEAESSLEYEAIFKEMIRCTPLPMSPLDESSIISCPHGLTKLKQNSIVVLTRGGSTAKLVAKYRPAVPILSVVVPVLTTDSFDWSISDETPARHSLVYRGLIPILGEGSAKATDSESTEVILEASLKSATEKGLCQPGDAVVALHRIGAASVIKICIVK

SEQ ID NO: 8693 - DNA, 1419 bp, Candidatus Kuenenia stuttgartiensis
  CDS (1)..(1419): transl_table=11
atgaataattacagaaaaacaaaaatagtatgtaccattgggccggcgagtaattctccggctatgattgaacagttaatatgtgccgggatgaatgtggcacgtcttaatttttcgcatggcgaactatcccaacacaaagagtgtatttcccatattcgcgccatttcggaaaaattaatgcaacccgttgccgtgctccaggatttgtcagggccaaagataagaatcgggatgctttccggcgatgcggttaccttgaagacaaacgatacatttacccttaccaccaggaatatagtggggaatgagcgtgttatatcaatcaattattcagatttacccatgaatgtatctataggcgatacccttctgttaagtgacggagaaatagaagtagaagtcatacaaaaggatgatagaaatattcattgcaaggtaattgtgggaggggtactgacctctcgaaagggaattaatattcctgcacgaagtttgccggtatcctcattaacggaaaaggataaaaaggatctggaatttggaatagagcaaggggttgattacgtagcgatgtcttttgtaaaaaccgctgaggatataacggaattgcgggaccttatacagaagaaaggcaaaactatcccaattatcgcgaaaattgaaaagcacgaggcagtagataatatagaaaaaattgtgaatactgcggatgcaattatggttgcacggggagatcttggggttgaaataccactggagagagttccttccgttcagaaaatgattatccggcttgcaaacagatacggcaaaccagtgattaccgcaacgcaaatgctggcttcaatggtaaataactatcgccccacacgggcagaggtgaccgatgtcgcaaatgcgattcttgacggaagcgatgcggtaatgctctcagaagagtcggcaatagggcgctatcctgccgatgcggtgctaatgctaacgaagattgcgaaacaaattgagcctgatttaacgcaaagcaatacattcgaaaaatttcgcataccggaaaaccgtaccactattcctgacgccataagcatagcaacgtgtcaggtcgcaaatgaattaaacatgaatacgattatcacctgtacccaatcgggaagtacggctcgttttatttcaaagtatcgcccgcggcagaagatccttgcggtaactccttcggtatgcacttacagaaggcttgcattggtgtggggtgttataccgatacttaccgaatcaatggaaaataccgatgatatgatgaaaaagggcatagaagcggcaaaacaagcaggatacattggcgaaaatgaaaccattgcgattaccggaggtgtaccggtagggatacctggttcaacgaatttgttgagggtgtattaa

SEQ ID NO: 8694 - protein, 472 aa, Candidatus Kuenenia stuttgartiensis
MNNYRKTKIVCTIGPASNSPAMIEQLICAGMNVARLNFSHGELSQHKECISHIRAISEKLMQPVAVLQDLSGPKIRIGMLSGDAVTLKTNDTFTLTTRNIVGNERVISINYSDLPMNVSIGDTLLLSDGEIEVEVIQKDDRNIHCKVIVGGVLTSRKGINIPARSLPVSSLTEKDKKDLEFGIEQGVDYVAMSFVKTAEDITELRDLIQKKGKTIPIIAKIEKHEAVDNIEKIVNTADAIMVARGDLGVEIPLERVPSVQKMIIRLANRYGKPVITATQMLASMVNNYRPTRAEVTDVANAILDGSDAVMLSEESAIGRYPADAVLMLTKIAKQIEPDLTQSNTFEKFRIPENRTTIPDAISIATCQVANELNMNTIITCTQSGSTARFISKYRPRQKILAVTPSVCTYRRLALVWGVIPILTESMENTDDMMKKGIEAAKQAGYIGENETIAITGGVPVGIPGSTNLLRVY

SEQ ID NO: 8695 - DNA, 1437 bp, Nitrosovibrio sp
  CDS (1)..(1437)
atgatccgaagaacaaaaatagttgccaccctcggtcctgcatccagcgaccccaagacgctcgagcgcatgatccatgccggagtggatgttgtccgcatcaacttctcccacggcagccgggaagagcatatcgcgctggcggagctgacgcgctcgctggcacgttccgccggccacacggtgggcgtgttggcggacctgcaggggccgaaaatccgcatcggcaggtttgagcacggaaaaatcacgctcaaggccggcgacaagttcgtgctggatgccgaatgcgaactcggcaatcaggagcgggtgggactggattacaaggagctgcctaacgacgtggaaaccggctcgacgctgatgctggacgatggtcgcatcgtgctgggcgttgccaacgtcaaggggcggcaggtgtactgcgtggtggaacagggcggggtcctgtccaacaacaagggcatcaaccgcaaaggcggcgggctgagcgcgcccgcgctcaccaaaaaagacatggacgatatccggacagccgccgtgctcaaggcggattatctggccgtgtcctttccgcgctcgggcgatgacatacgctgggcgcgcgacttgatgcgcgaagccggcggcaaaagcctgctgatggcgaaaattgagcgttccgaggcaatccccgcgctgaatgacatactgcaggcttctgacgcgatcatggtggcgcgcggcgacctggcggtggaagtgggcgatgctgtcgtgccggcgctgcaaaagcagatgatacgcgccgctcgcgccgccaacaaactggtggtgaccgccacgcagatgatggaatcaatgatcaccagcccgattccgacccgggcggaagtgtccgacgtcgccaatgccgtgctggacggaaccgatgcggtcatgctgtcggcggaatccgctgccggccaatacccggtcgagtcggtcgaggcgatggccagggtgtgcctcgaggcggaaaaggaatatctggtgacgcaggagttgcggcgcgtgccggacaccgtgccggaaacgatcgaggaagcgattgcccgggcgaccatgttcaccgccggtagcctgaagatccgcgcgattgccgcgctcactcatagcggcgtgaccgcactgctgatgtcgcgcaggagcaccaacgtgccgatcttcgcgttaagcccgcaggaggacacgcgccgcaagacgacgctgtttcgcggcgtctatccgatgaaattcggcggcggccagagtgatcccgagattatcctgaatcaggctgaagacgaactgctcaagcgcggcgcggtgcacaacggtgatctgatcgtgatgaccatcggcgaaccggtcggcaaggcaggcggcaccaataccatgaagatcgtcaaagtgggggaatacagaaaggcttga

SEQ ID NO: 8696 - protein, 478 aa, Nitrosovibrio sp
MIRRTKIVATLGPASSDPKTLERMIHAGVDVVRINFSHGSREEHIALAELTRSLARSAGHTVGVLADLQGPKIRIGRFEHGKITLKAGDKFVLDAECELGNQERVGLDYKELPNDVETGSTLMLDDGRIVLGVANVKGRQVYCVVEQGGVLSNNKGINRKGGGLSAPALTKKDMDDIRTAAVLKADYLAVSFPRSGDDIRWARDLMREAGGKSLLMAKIERSEAIPALNDILQASDAIMVARGDLAVEVGDAVVPALQKQMIRAARAANKLVVTATQMMESMITSPIPTRAEVSDVANAVLDGTDAVMLSAESAAGQYPVESVEAMARVCLEAEKEYLVTQELRRVPDTVPETIEEAIARATMFTAGSLKIRAIAALTHSGVTALLMSRRSTNVPIFALSPQEDTRRKTTLFRGVYPMKFGGGQSDPEIILNQAEDELLKRGAVHNGDLIVMTIGEPVGKAGGTNTMKIVKVGEYRKA

SEQ ID NO: 8697 - DNA, 1455 bp, Nitrosospira sp
  CDS (1)..(1455)
atgattcgaagaacaaaaattgtggcaacgctcggtccggcatccagagaccccaaggtactcgaacgaatgataaatgccggggtggatgtggtgcggatcaatttttcgcatggcacaagagaagaacatatagaaagcgccgaattggcccgttcgctggcacgtgccgcgggtcatgccgtgggcgttctggcggacttgcaagggccgaagattcgtgtcggcagatttgaaaagggcaataatctcctaaaaattggcgataaattcatacttgacgccgaatgtgaactgggtaaccaggaacgggtgggtctggattacaaagaactgccaaatgacgtggaaacgggctcgacgcttatcctcgacgatggccgcatcgtactgggcgtttccgaggtcaagggaagcaaggtgtactgcgtggttgagcagggcggaatactgtccaataacaaggggatcaaccgcaagggtggcggactcagtgcacccgccttgaccgcaaaggacgtggaagacatcaagactgcggcagcgcttaaagcagactaccttgccgtatccttcccgcgctccggtgatgatatgcgctgggcacgagacgtgatgcgcgatgccggcggcaaaagcctgctaatggcaaagatcgagcgctccgaagcaattctggcgttggatgatattttggaagcctccgatgccatcatggttgcgcgaggtgatcttgcggtagaagtgggcgacgcagtggtgccggctttgcagaaacgaatgatccgcacggcacgcgccaacaacaagctcgtggtgaccgccacgcagatgatggaatccatggtcaacagccctattccaacccgtgcggaagtgtccgatgtcgctaatgcggtgctggatggtaccgatgcggtaatgctgtcggcggaatccgccgcaggacagtatcccgtcgaatcggtcgcagccatggcaagagtctgcctcgaggcagaaaaagagtatctggtgagcagcgaactccgccggcttcagggcggccttccggaaacgatagaggaagcgattgcacgtgcgaccatgttcactgcgggggggttgaaaattcgggccattgccgcgctcacgcagagcggcagaacggtattgttgatgtcgcgcagaagctccaacgtacctatcttcgcgctgagcccccaggaggatacccgccgtaaaatgacgttgtttcgtggcgtctatcccgttaggttcggcggcggatcgaacgatcccgagattatcctgaatcatgccgaaaacgaattgctcaagcgcggcgtcgtgcgcaacggcgatctgattatcatgactattggcgaaccggtaggcaaagccggcgggaccaacacgatgaaaatcgtcaaggtaggcgaacacagaaaacttgaacgaaaaccggggtcctga

SEQ ID NO: 8698 - protein, 484 aa, Nitrosospira sp
MIRRTKIVATLGPASRDPKVLERMINAGVDVVRINFSHGTREEHIESAELARSLARAAGHAVGVLADLQGPKIRVGRFEKGNNLLKIGDKFILDAECELGNQERVGLDYKELPNDVETGSTLILDDGRIVLGVSEVKGSKVYCVVEQGGILSNNKGINRKGGGLSAPALTAKDVEDIKTAAALKADYLAVSFPRSGDDMRWARDVMRDAGGKSLLMAKIERSEAILALDDILEASDAIMVARGDLAVEVGDAVVPALQKRMIRTARANNKLVVTATQMMESMVNSPIPTRAEVSDVANAVLDGTDAVMLSAESAAGQYPVESVAAMARVCLEAEKEYLVSSELRRLQGGLPETIEEAIARATMFTAGGLKIRAIAALTQSGRTVLLMSRRSSNVPIFALSPQEDTRRKMTLFRGVYPVRFGGGSNDPEIILNHAENELLKRGVVRNGDLIIMTIGEPVGKAGGTNTMKIVKVGEHRKLERKPGS

SEQ ID NO: 8699 - DNA, 1620 bp, Phaeodactylum tricornutum
  CDS (1)..(1620)
atgggcacatatcctgccggagtgtgttatgctgtcgtgtatctcaacgggcgttatcgttcgtatctcgtccttaccattacgggcgctcggctcgatcactcactgcttcctactatgttccagggacctgcttgttggagcgaagaaggcctcggccagctcatggacgccggcatgaatgtggctcgcttcaacttttcccacggcgatcacgaaggacacggaaaagtcctcgaacgtttgcgcaaggttgccaaggaaaagaagcgcaacattgcggtgctcttggacaccaagggtccggaaattcgcacgggattctttgccgacggcattgacaagattaacctgtccaagggagacacgatcgtactgaccacggactatgacttcaagggcgatagcaagcgtttggcgtgcagttaccccacgctagccaagtccgttacccagggacaagccattcttattgccgacggatcactcgttttgaccgtcttgagcatcgacacggctaataacgaagtgcagtgtcgcgtcgagaacaacgcttccattggcgaacgcaaaaacatgaatttgcccggagttgtcgtcgatttacccaccttcaccgaacgtgacgtcaacgatatcgtcaattttggtatcaagaacaaggtagactttatcgctgcttcttttgttcgcaagggaagtgacgtgaccaacctgcgcaagctcctcgccgacaatggcggtccacagatcaaaatcatttgtaagattgagaatcaagaaggcctcgagaactacggagacattctggagcacacggatgccatcatggtggcccgcggtgatctcggtatggaaattccttcgtccaaggtatttctggcgcaaaagtacatgattcgcgaagccaacgttgcgggcaagcccgttgtcactgccacgcaaatgctcgaaagtatggtgaccaacccgcgtcctacgcgtgccgaatgttccgacgttgccaacgccgtttacgacggcaccgacgccgttatgctgtcgggagaaaccgccaacggtccacactttgaaaaggccgtgctggtcatggcgcgtacgtgttgcgaagccgagtcgtcccgcaactacaacctgttgttccagtcggtccgcaactcaatcgtcattgcgcgcggtggcttgtctaccggggaatccatggccagcagtgccgtcaagtcggccctcgacattgaagccaagttgattgtggtcatgagtgaaacgggcaagatgggcaactacgtggccaaatttcgtccgggcttgagtgtcctgtgcatgacccccaacgaaacggccgcgcggcaggctagtggattgctgttgggcatgcacacggtcgtggtggattcgttggaaaaatcggaagagttggtggaagaactcaattacgaattagtgcaatccaactttctcaaacccggcgacaagatggttgtcattgccggacgcatggccggcatgaaggaacagttgcgcattgtgacgttggacgaggggaagtcgtatggtcacattgtctccggcacgagcttcttctttgaacgcacacgtctgttggactttaacgactag

SEQ ID NO: 8700 - protein, 539 aa, Phaeodactylum tricornutum
MGTYPAGVCYAVVYLNGRYRSYLVLTITGARLDHSLLPTMFQGPACWSEEGLGQLMDAGMNVARFNFSHGDHEGHGKVLERLRKVAKEKKRNIAVLLDTKGPEIRTGFFADGIDKINLSKGDTIVLTTDYDFKGDSKRLACSYPTLAKSVTQGQAILIADGSLVLTVLSIDTANNEVQCRVENNASIGERKNMNLPGVVVDLPTFTERDVNDIVNFGIKNKVDFIAASFVRKGSDVTNLRKLLADNGGPQIKIICKIENQEGLENYGDILEHTDAIMVARGDLGMEIPSSKVFLAQKYMIREANVAGKPVVTATQMLESMVTNPRPTRAECSDVANAVYDGTDAVMLSGETANGPHFEKAVLVMARTCCEAESSRNYNLLFQSVRNSIVIARGGLSTGESMASSAVKSALDIEAKLIVVMSETGKMGNYVAKFRPGLSVLCMTPNETAARQASGLLLGMHTVVVDSLEKSEELVEELNYELVQSNFLKPGDKMVVIAGRMAGMKEQLRIVTLDEGKSYGHIVSGTSFFFERTRLLDFND

SEQ ID NO: 8701 - DNA, 1632 bp, Phaeodactylum tricornutum
  CDS (1)..(1632)
atgtccttgtcccagagctccgacgtcccaatcctcgcgggaggttttattaccttggataccgtcaagcatcctacaaatactattaaccgtcgtaccaagattgtttgtaccattggacccgcctgctggaatgtcgatcagttggaaatactgattgaatcgggcatgaatgtggcgcgctttaacttttcgcacggtgatcatgcaggccatggcgctgttctcgaacgagtacgtcaggctgcacaaaacaagggccgaaacattgctattctattggataccaagggaccggagattcgtaccggtttttttgccaatggcgcttccaagattgaactggtcaagggcgaaacaatcgtattgacgtcggactataagttcaagggcgaccagcataagctggcttgttcctaccccgccttggcacagtctgtaacacaaggacagcaaattctagtggccgatggatcgctcgtgttaacggttctccaaacggacgaggcagccggtgaagtgtcctgccggatcgacaacaatgcatcgatgggcgaacgcaagaacatgaatttacccggggtcaaggtggacctgcccaccttcaccgaaaaggatgtggacgatatcgtcaatttcggaattaagcacaaggttgactttattgcggcctcgtttgttcgcaagcagtccgatgtggctaacttgcgccagctgctggccgaaaacggtggtcagcaaattaaaatctgttgtaaaattgagaaccaagaaggtctggaaaactacgatgcaattctgcaggcaaccgattccatcatggttgctcgcggtgatttgggtatggaaattcctccagctaaggtcttcttggcccaaaagatgatgattcgtgaagcgaacattgcgggcaagcccgtcattactgccactcaaatgttggaatcaatgattaacaaccctcgtccgactcgtgccgagtgtagtgatgtcgccaacgcagtcttggacggcactgactgtgtaatgctttccggagaaaccgccaacggcccatactttgaagaggctgttaaagtcatggcgcgaacctgctgcgaggccgaaaactcacgcaactacaattcgttgtattctgccgtgcgttcttctgtcatggccaagtacggcagtgtaccacccgaagaatctttggctagttctgccgtcaagacggcgattgatgtcaacgctcgcttgattctagttctctccgaaagcggaatgacggctgggtatgtgagtaaattccgtccgggaagggctattgtttgcttgacaccaagtgatgccgttgctcgtcaaacgggtggaattctgaagggtgtgcactcctatgtcgtggacaacttggataacacggaagagctcatcgcggagactggcgttgaggcggtgaaggcgggcatcgctagcgtgggtgatttgatggttgtagtcagtggaactctttacggcatcggaaagaataatcaggttcgcgttagcgttatcgaggctccggaaggtaccgtgaaggagacgccagctgcaatgaaacgccttgtatcttttgtatacgccgcggacgaaattccaggaaatgccgactag

SEQ ID NO: 8702 - protein, 543 aa, Phaeodactylum tricornutum
MSLSQSSDVPILAGGFITLDTVKHPTNTINRRTKIVCTIGPACWNVDQLEILIESGMNVARFNFSHGDHAGHGAVLERVRQAAQNKGRNIAILLDTKGPEIRTGFFANGASKIELVKGETIVLTSDYKFKGDQHKLACSYPALAQSVTQGQQILVADGSLVLTVLQTDEAAGEVSCRIDNNASMGERKNMNLPGVKVDLPTFTEKDVDDIVNFGIKHKVDFIAASFVRKQSDVANLRQLLAENGGQQIKICCKIENQEGLENYDAILQATDSIMVARGDLGMEIPPAKVFLAQKMMIREANIAGKPVITATQMLESMINNPRPTRAECSDVANAVLDGTDCVMLSGETANGPYFEEAVKVMARTCCEAENSRNYNSLYSAVRSSVMAKYGSVPPEESLASSAVKTAIDVNARLILVLSESGMTAGYVSKFRPGRAIVCLTPSDAVARQTGGILKGVHSYVVDNLDNTEELIAETGVEAVKAGIASVGDLMVVVSGTLYGIGKNNQVRVSVIEAPEGTVKETPAAMKRLVSFVYAADEIPGNAD

SEQ ID NO: 8703 - DNA, 1542 bp, Phaeodactylum tricornutum
  CDS (1)..(1542)
atgacggcgtctcaaaccaaaatcacggcttctggtccggaactccgcggggccaacattacgttggacaccatcatgaagaagacggacgtgtctactcgtcagaccaagatcgtttgtacgctgggtccggcgtgttgggaagtcgagcagttggaatctcttattgacgcgggcctctccattgctcgtttcaacttttctcacggagatcacgaaggacacaaggcttgtttggatcggctgcgtcaggccgcggaccacaagaaaaaacacgttgcggttatgttggacaccaaaggcccagaaattcgttccggattctttgccgatggcgccaagaaaatctccctcgtcaagggtgaaaccatcgtgcttacctcggattattccttcaaaggtgacaagcacaagctcgcctgttcgtaccctgtgttggccaagtctgttacacctggtcagcaaattctggtcgcggacggttcgctcgtcctcaccgtcctgagctgcgacgaagccgccggggaagtatcttgccgcgtcgagaacaatgcgggtattggcgagcgtaaaaatatgaaccttcccggtgttattgtcgaccttccgacattgaccgacaaggatattgacgatattcaaaactgggggattgtgaacgacattgatttcattgcggcctcgtttgttcgcaaagccagtgacgtgcacaagatccgcgaagtcctgggtgagaagggcaaaggaatcaagattatttgcaaaattgaaaaccaagaaggcatggacaattacgacgaaatccttgaagcaaccgacgccatcatggtcgcccgcggtgatctgggtatggaaatcccacccgagaaggtatttttggcacaaaagatgatgatccgacaagccaacattgccggcaagccggtagtaacggccacacagatgcttgagtccatgattaccaatccgcgcccgacccgtgccgagtgtagtgacgtggcgaacgccgtcttggacggcacggactgcgtcatgctctccggagaaaccgcgaacggcgaatacccgaccgcggccgtcaccattatgagcgaaacctgttgcgaagccgaaggggcccaaaataccaacatgctttatcaagccgtccgtaacagtaccctctcacaatatggtatcttgtccacgtccgaatccattgcgtcctccgccgccaagacggccattgatgtcggcgccaaggcaatcattgtctgttccgaatccggtatgactgccacgcaagtagccaagttccgccccggtcgtccgatccacgtgctcacgcatgatgtgcgcgtcgcccgtcagtgcagcggctacctgcgcggagcctcggtagaagtcatttccagtatggatcagatggaccccgccatcgatgcctacattgagcgctgtaaagccaatggcaaggccgttgccggtgacgcctttgtggtcgtgaccggtacggtcgctcagcgtggggccaccaatctcatgcgcgtcatgtatgcctag

SEQ ID NO: 8704 - protein, 513 aa, Phaeodactylum tricornutum
MTASQTKITASGPELRGANITLDTIMKKTDVSTRQTKIVCTLGPACWEVEQLESLIDAGLSIARFNFSHGDHEGHKACLDRLRQAADHKKKHVAVMLDTKGPEIRSGFFADGAKKISLVKGETIVLTSDYSFKGDKHKLACSYPVLAKSVTPGQQILVADGSLVLTVLSCDEAAGEVSCRVENNAGIGERKNMNLPGVIVDLPTLTDKDIDDIQNWGIVNDIDFIAASFVRKASDVHKIREVLGEKGKGIKIICKIENQEGMDNYDEILEATDAIMVARGDLGMEIPPEKVFLAQKMMIRQANIAGKPVVTATQMLESMITNPRPTRAECSDVANAVLDGTDCVMLSGETANGEYPTAAVTIMSETCCEAEGAQNTNMLYQAVRNSTLSQYGILSTSESIASSAAKTAIDVGAKAIIVCSESGMTATQVAKFRPGRPIHVLTHDVRVARQCSGYLRGASVEVISSMDQMDPAIDAYIERCKANGKAVAGDAFVVVTGTVAQRGATNLMRVMYA

SEQ ID NO: 8705 - DNA, 1998 bp, Phaeodactylum tricornutum
  CDS (1)..(1998)
atgggtcgcgatcggcgtttgattacaatttccaggttcttttcctccgggatggactcacgtcaacacgacggaacacgcctccaaccagcacgccatcaagcttttcctctaaaattctccaaattcctttcgacgtcgcctctgtcccaaggagacaaaaaagtatctttgatagttggaattggtaccaactgtgctacaacaaaagcttttacaatcatgaacctttctcttctcgcgttgacgttcgctttaggccatgcgttcgttcctccttccttcttggcgtcgccgtcgtctcgtaaggtactgtcatcctcgcgatcggcgtcggtagcggccaacgctgcggatgtgttggcaaagacaacatcttcttccagcacacccagttctttgatgcccaaggaaacaacagtggcagcggttcccaaggtcgcgcagcgttggcgcaagtcgacgaaacaagtcgtcacgctgggaccggcttcgagcaacaaggaaatgattgaaaagttgtttctcgccggggccgatgtctttcgtctcaacttttcccacggatcgcaagaacaaaagaaagaactcctcatcatgattcgggaagtggaagaaaaatactcccatcctatcggtattttgggagatttgcagggtccgaaattgcgggttggtgaattctccaagccggagggtgagttcttggaactcggtcagagctttcgcctcgatctggacaacgccaagggtgacaacaaacgcgtccagctcccccaccccgaaatcatcaaggcatccgagctcgggcacgccttgctcgtggatgacggtaaggtcaagcttgtcgttacggccaagggcgatgactacctcgaatgccgcgtcgatgtcgccgggatgatcaaagatcgtaagggagtcaacacgcccgattcggtgctcgaaatcagtcctctcacacccaaggatcgcagtgacttggagtacatgcttggtattggcgtcgactgggttgcgctatcttttgtacagactccggcggatatggtggagatccacgccttgatcgacgaaaaactcccttccggacaattcaagcccgccgtcatggccaagattgaaaagcccagttgcttctacgacgacaatctgcaacgcattgtcggactctgcaacggcatcatggttgcccgtggtgatttgggtgtggagtgccctcccgaagacgtgcccttgctacaaaaggaaatcatcgacgaatgccgcaatcaaggacgtcccgtgattgtagctacacaaatgctcgaatccatgattgaagtaccaacaccgacccgtgcggaagccagtgatgtggccacggctatttacgatggcgccgatgcgatcatgctcagtgccgaatccgccgccggaaagttcccggaagaatccgtcgctatgcaacagcgcatcatcaaccgcgtcgagggtgacaagcactaccgttcttacttgaaacaaaacgagcccgatccggagaataccccgaccgatgctattatcacggcggcacgtcaagtcgcgaagactatcggtgccaaatcgattgtctgcttttcactacgaggttcgaccgttctgcgagcctccaaatctcgtccgggtgttccaattctagccctgtgtccgttcaaagaaacttcaagacagctagctctcagctggggcgtttactccgatctacccaaggccggctcgtacggatacaccgtttcggaagaagacatgttcaactacgaccgacccatggtggaaaagagcacggatgacttcgacctggtccttaaaaatgcctgccgtgcggcgttgaagaaaggattggtcagcgatccggacgatctgcttgttgtgacggctggccttcctttcggtaccccgggagcggcaaacatcattcgtgtggtccctgccgccggccccagttgttgggacggcgtttgccgtgtcgattaa

SEQ ID NO: 8706 - protein, 665 aa, Phaeodactylum tricornutum
MGRDRRLITISRFFSSGMDSRQHDGTRLQPARHQAFPLKFSKFLSTSPLSQGDKKVSLIVGIGTNCATTKAFTIMNLSLLALTFALGHAFVPPSFLASPSSRKVLSSSRSASVAANAADVLAKTTSSSSTPSSLMPKETTVAAVPKVAQRWRKSTKQVVTLGPASSNKEMIEKLFLAGADVFRLNFSHGSQEQKKELLIMIREVEEKYSHPIGILGDLQGPKLRVGEFSKPEGEFLELGQSFRLDLDNAKGDNKRVQLPHPEIIKASELGHALLVDDGKVKLVVTAKGDDYLECRVDVAGMIKDRKGVNTPDSVLEISPLTPKDRSDLEYMLGIGVDWVALSFVQTPADMVEIHALIDEKLPSGQFKPAVMAKIEKPSCFYDDNLQRIVGLCNGIMVARGDLGVECPPEDVPLLQKEIIDECRNQGRPVIVATQMLESMIEVPTPTRAEASDVATAIYDGADAIMLSAESAAGKFPEESVAMQQRIINRVEGDKHYRSYLKQNEPDPENTPTDAIITAARQVAKTIGAKSIVCFSLRGSTVLRASKSRPGVPILALCPFKETSRQLALSWGVYSDLPKAGSYGYTVSEEDMFNYDRPMVEKSTDDFDLVLKNACRAALKKGLVSDPDDLLVVTAGLPFGTPGAANIIRVVPAAGPSCWDGVCRVD

SEQ ID NO: 8707 - DNA, 1533 bp, Solanum tuberosum
  CDS (1)..(1533)
atggccaacatagacatagctgggatcatgaaggatctcccaaatgatggccgtattccaaagaccaagattgtttgcacgctagggccatcttctagaacagtaccaatgctggagaagcttctccgtgctggcatgaacgttgccaggtttaacttttctcatgggacccatgagtaccatcaggagacattggacaatcttaagattgctatgcagaatactcagatcctgtgtgctgtcatgcttgacaccaaggggcctgagattcgtactggtttcttaacagatggaaaaccgattcagcttaaggaaggtcaagaaatcactgtatccacagactataccataaaaggaaatgaagaaatgatctcaatgagctataagaagttggtagtggacttgaagcccggcaataccatcttgtgtgcagatggtaccataacccttactgttttgtcatgtgatccaccgtctggaacggtgagatgtcgctgcgagaattctgccaccttaggagagaggaagaatgtaaaccttccaggtgtggttgtggaccttccaacacttacagagaaggataaagaagatatactagagtggggtgttcctaacaacattgatatgatagcgctttcgtttgtgcgtaagggttcagatcttgtcaatgttcgcaaggctcttggtccacatgccaagcgcattcaactaatgtcaaaggttgaaaaccaagaaggggtaatcaactttgacgaaatccttcgtgagacagattcttttatggttgctcgaggtgatctcggaatggaaattccagttgagaagattttcttggctcagaaaatgatgatatacaagtgtaatcttgctggcaaagctgtggtaactgccactcagatgcttgaatcaatgatcaagtctccacgacccacccgtgctgaggctactgatgtggctaatgctgtcttggatggcactgattgtgttatgttaagtggggagagtgcagctggtgcttatcctgagctggcagtaaaaatcatgtcacgaatttgcattgaggcagagtcttcacttgacaatgaggctatcttcaaggaaatgatcaggtgtaccccgctgccaatgagcccattggagagtcttgcatcatctgctgtccgtacagctaacaaagctagagcaaaactcattgttgtcctgacacgtggtgggagtacagcaaagctggttgccaagtataggcctgcagttcctattctgtcagtagtcgtgcctgttttgactacagactcttttgattggtccatcagcgacgagaccccagctagacacagtttagtatataggggcttgattcctcttcttggtgaaggttctgcaaaggccactgattctgaatcaactgaggtaatccttgaagcggccctgaagtctgccgtaacgagagggctatgcaaacctggtgatgctgtcgtggcacttcatcgtattggttctgcatccgttatcaagatttgcgtcttgaagtaa

SEQ ID NO: 8708 - protein, 510 aa, Solanum tuberosum
MANIDIAGIMKDLPNDGRIPKTKIVCTLGPSSRTVPMLEKLLRAGMNVARFNFSHGTHEYHQETLDNLKIAMQNTQILCAVMLDTKGPEIRTGFLTDGKPIQLKEGQEITVSTDYTIKGNEEMISMSYKKLVVDLKPGNTILCADGTITLTVLSCDPPSGTVRCRCENSATLGERKNVNLPGVVVDLPTLTEKDKEDILEWGVPNNIDMIALSFVRKGSDLVNVRKALGPHAKRIQLMSKVENQEGVINFDEILRETDSFMVARGDLGMEIPVEKIFLAQKMMIYKCNLAGKAVVTATQMLESMIKSPRPTRAEATDVANAVLDGTDCVMLSGESAAGAYPELAVKIMSRICIEAESSLDNEAIFKEMIRCTPLPMSPLESLASSAVRTANKARAKLIVVLTRGGSTAKLVAKYRPAVPILSVVVPVLTTDSFDWSISDETPARHSLVYRGLIPLLGEGSAKATDSESTEVILEAALKSAVTRGLCKPGDAVVALHRIGSASVIKICVLK

SEQ ID NO: 8709 - DNA, 1533 bp, Citrus sinensis
  CDS (1)..(1533)
atggcgaacatagatatagagggactcttgagagatgtgccaaatgataagcggttgccgaagacgaagattgtgtgtactttaggtcctgcttcccgttctgtgccgatgcttgagaagcttctgagggctggaatgaatgttgctcgtttcaatttctctcacggtacgcacgagtatcagcaggagactttgaacaatctcagagctgccatgcacaacacccagatcctctgtgctgtcatgctcgataccaagggacccgagattcgaactggtttccttaaggatggaaaacccatacaacttaaagaaggtcaggaaattactgtatctactgattatgacttcaagggaaatgaagaaatgatcaccatgagttacaagaagctgcctgtggatgtgaagcctggaaataccatcttgtgtgcagatggcaccataaccctgactgtcttgtcttgtgatccaaaatctggaactgtcaggtgccgttgtgagaacactgcaatgctaggcgagagaaagaatgtcaatcttcctggtgttgtggtggatctgcccacactgactgaaaaggataaagaggatatcctccgatggggtgttcctaataatatagatatgattgctctttcatttgtgcgcaagggttcagatcttgtcactgtacgtaaggtccttgggcctcatgccaaaaacatacagttaatgtctaaggttgagaaccaggagggagttgtcaacttcgatgatattttgcgtgaaactgattcatttatggttgcccgaggtgaccttggaatggagattccagttgagaagattttccttgcacaaaagatgatgatatacaagtgcaatcttgtgggcaagcctgtggtcaccgcgactcagatgcttgaatcaatgatcaagtctcctcggccaactcgtgctgaagctactgatgttgccaatgctgttcttgacggcactgattgtgtaatgcttagtggtgagagtgcagctggggcctacccggagattgctgttaagatcatgcgacgaatttgcatcgaagctgaatcctcccttgattatagggctgtgtttaaggagatgattagatcaactcctcttcctatgagcccactggagagccttgcttcatcggctgttaggacagctaacaaagctagagctaaactaattgttgttctgacacgtggtgggactacagccaagttggttgccaagtatagaccagctgttccaatcctatctgtagttgtcccagtcctaacgactgattcatttgattggacctgcagtgatgaaaccccagctaggcatagtctgatatacaggggcctgattcctatcctggcagaaggatctgctaaggccacagatgctgaatctacagaggtgatactggagggtgctctgaagtcggcaatagagaagggattgtgcagccccggtgatgctgtggtggcacttcatcgcattggagttgcttctgttatcaagatctgcatagtgaaatga

SEQ ID NO: 8710 - protein, 510 aa, Citrus sinensis
MANIDIEGLLRDVPNDKRLPKTKIVCTLGPASRSVPMLEKLLRAGMNVARFNFSHGTHEYQQETLNNLRAAMHNTQILCAVMLDTKGPEIRTGFLKDGKPIQLKEGQEITVSTDYDFKGNEEMITMSYKKLPVDVKPGNTILCADGTITLTVLSCDPKSGTVRCRCENTAMLGERKNVNLPGVVVDLPTLTEKDKEDILRWGVPNNIDMIALSFVRKGSDLVTVRKVLGPHAKNIQLMSKVENQEGVVNFDDILRETDSFMVARGDLGMEIPVEKIFLAQKMMIYKCNLVGKPVVTATQMLESMIKSPRPTRAEATDVANAVLDGTDCVMLSGESAAGAYPEIAVKIMRRICIEAESSLDYRAVFKEMIRSTPLPMSPLESLASSAVRTANKARAKLIVVLTRGGTTAKLVAKYRPAVPILSVVVPVLTTDSFDWTCSDETPARHSLIYRGLIPILAEGSAKATDAESTEVILEGALKSAIEKGLCSPGDAVVALHRIGVASVIKICIVK

SEQ ID NO: 8711 - DNA, 1740 bp, Arabidopsis thaliana
  CDS (1)..(1740)
atggctcaagtggttgctaccaggtcaattcaaggctcgatgttatctcccaacggtggatctgtgtctacaagatccgagaagctattgaaaccagcgagttttgcagtgaaggttcttggcaacgaagcaaagagaagtggaagagtctctgtaagaagcagaagagtggttgatactactgtgagatccgctcgtgttgagactgaagtcattcctgtttctcctgaagatgtgcctaacagagaggagcagcttgagaggttgttggaaatgcagcagtttggtgatacatcggtagggatgtggtcgaagccgacagtgaggaggaagacaaagattgtttgcaccgttggtccgtcgaccaacacacgagaaatgatatggaaattggctgaagctgggatgaatgttgctaggatgaatatgtctcatggagatcatgcttcacataagaaggttattgatttggttaaagaatacaatgcacaaactaaagacaacactattgctatcatgcttgacaccaagggtccggaagttaggagtggagatttacctcagccaattatgttagatcctggtcaagagtttacctttacaattgagagaggagtcagcacaccaagttgtgtcagtgttaactatgatgatttcgttaatgacgtggaagcgggtgacatgcttcttgttgatggtggtatgatgtcgtttatggtgaagtcaaagaccaaagactctgtcaaatgtgaagttgttgatggtggagaacttaagtcaaggagacacctgaatgtccgaggaaagagtgcaactttaccttcaatcactgagaaggactgggaggatattaaatttggagtggagaacaaagttgacttttatgcagtttcctttgtcaaagatgctcaagttgtacacgagttgaagaaataccttcaaaatagtggtgctgatatacacgtgatagtgaaaattgagagtgcagactccatacctaacttgcactccattatcacagcatcagatggggcaatggttgcaagaggtgatcttggtgcagagcttccaattgaagaagtccccattcttcaggaggagatcattaacctgtgccgtagtatgggaaaagctgttattgttgcggctaacatgcttgagagtatgatagttcatccaactccaacccgggcagaggtctcagacattgctatcgctgttagagaaggtgctgatgcggtaatgctttcaggagaaactgctcacggaaagttcccattgaaagctgctggagtgatgcacactgttgcattgcgaacagaagcaaccattactagcggtgaaatgccacctaatcttggtcaagccttcaagaaccatatgagtgagatgtttgcataccatgcaaccatgatgtcaaacacacttggaacttcaactgttgtcttcaccagaaccggtttcatggccatattgttaagtcactatcgtccttccggcacaatctatgccttcacaaatgagaaaaaaatacaacaaagattagctttgtatcaaggtgtatgccccatatatatggagttcacagatgatgcagaagaaacttttgctaatgctttggctacattactgaaacaaggaatggtgaagaagggagaggaaatagcaatcgtacagagcggtacacagccaatctggcgatctcaatcgacacataacatccaagtccgcaaggtttaa

SEQ ID NO: 8712 - protein, 579 aa, Arabidopsis thaliana
MAQVVATRSIQGSMLSPNGGSVSTRSEKLLKPASFAVKVLGNEAKRSGRVSVRSRRVVDTTVRSARVETEVIPVSPEDVPNREEQLERLLEMQQFGDTSVGMWSKPTVRRKTKIVCTVGPSTNTREMIWKLAEAGMNVARMNMSHGDHASHKKVIDLVKEYNAQTKDNTIAIMLDTKGPEVRSGDLPQPIMLDPGQEFTFTIERGVSTPSCVSVNYDDFVNDVEAGDMLLVDGGMMSFMVKSKTKDSVKCEVVDGGELKSRRHLNVRGKSATLPSITEKDWEDIKFGVENKVDFYAVSFVKDAQVVHELKKYLQNSGADIHVIVKIESADSIPNLHSIITASDGAMVARGDLGAELPIEEVPILQEEIINLCRSMGKAVIVAANMLESMIVHPTPTRAEVSDIAIAVREGADAVMLSGETAHGKFPLKAAGVMHTVALRTEATITSGEMPPNLGQAFKNHMSEMFAYHATMMSNTLGTSTVVFTRTGFMAILLSHYRPSGTIYAFTNEKKIQQRLALYQGVCPIYMEFTDDAEETFANALATLLKQGMVKKGEEIAIVQSGTQPIWRSQSTHNIQVRKV

SEQ ID NO: 8713 - DNA, 1509 bp, Glycine max
  CDS (1)..(1509)
atggctacgacgaggattgaggcagagaagaagccgaagacgaagatcgtgtgcactctgggccccgcatcacggtcggtcccaatgatcgagaagcttctgcgagcaggcatgaacgtggcgcgcttcaacttctcccatgggtcccacgagtaccaccaggaaaccctcgacaacctccgcgccgccatggagaacaccggtattctctgcgccgtcatgctcgacaccaaggggcctgagattcgaactggttttctcaaggacggtaagcctatccaactgatacaaggtaatgaaataaccatttccactgactatgacctaaagggagatgagaagacgatttgtatgagctacaaaaagctgcctgaggatgtgaggcctgggatggtcatactctgcgcggatggcaccatatcatttacagttttatcatgtgacaaacaagcgggtttggttcaatgccgatgcgagaactctgccactcttggtgagaggaagaatgttaatttgcctggagtgatagtggatctcccaactttgacagacaaagacaaggaagatatcttggcctggggagttcccaataaaattgacatgattgctctttcttttgttcgaaaaggttctgacctggtggaagtcaggaaagttctgggaaaacatgccaagaacattatgctcatgtctaaggttgaaaaccaagaaggggttgcaaattttgatgaaatccttgcaaattcagatgcatttatgacggcacgtggtgaccttggaatggaaattccaatagagaagatatttctcgcacagaaagtgatgatttacaagtgcaacatccaaggaaaaccagttgtcactgcaacccagatgttggagtcaatgatcaaatctcccaggccaaccagggccgaagctactgatgttgccaatgcagttctggatggcacagactgtgtgatgcttagtggtgaaaccgctgctggagcctatccagaccttgctgttcaaacaatggctaaaatatgcattgaagcagagagcacccttgactatggtgatgtgttcaaaaggattatggagcactcaccggtacccatgagcccattagagagtctagcttcttctgctgttagaacagccaactcggctagagcggctcttatcttggttttaactagaggagggagtactgcaaaattggtggcgaaatacaggccagggatgccaattctttccgtggttgttcccgagctcaagactgatagctttgattgggcatgcagtgatgaggcccctgcgagacatagccttatattccgcgggttggttcccgtgttgagtgcagcttctgctagagcttctcatgctgaaacaacagaagaagcaatagaattcgccatgcaacatgccaagtccaagggtctctgccacaacggggattcagtggtggcactgcatcgtgtgggcactgcatctatcatcaagatcttgactgtgaaatga

SEQ ID NO: 8714 - protein, 502 aa, Glycine max
MATTRIEAEKKPKTKIVCTLGPASRSVPMIEKLLRAGMNVARFNFSHGSHEYHQETLDNLRAAMENTGILCAVMLDTKGPEIRTGFLKDGKPIQLIQGNEITISTDYDLKGDEKTICMSYKKLPEDVRPGMVILCADGTISFTVLSCDKQAGLVQCRCENSATLGERKNVNLPGVIVDLPTLTDKDKEDILAWGVPNKIDMIALSFVRKGSDLVEVRKVLGKHAKNIMLMSKVENQEGVANFDEILANSDAFMTARGDLGMEIPIEKIFLAQKVMIYKCNIQGKPVVTATQMLESMIKSPRPTRAEATDVANAVLDGTDCVMLSGETAAGAYPDLAVQTMAKICIEAESTLDYGDVFKRIMEHSPVPMSPLESLASSAVRTANSARAALILVLTRGGSTAKLVAKYRPGMPILSVVVPELKTDSFDWACSDEAPARHSLIFRGLVPVLSAASARASHAETTEEAIEFAMQHAKSKGLCHNGDSVVALHRVGTASIIKILTVK

SEQ ID NO: 8715 - DNA, 1530 bp, Zea mays
  CDS (1)..(1530)
atggcggcgggcggtgagttggcgtggggggaggagcccgtggcgcggcgccggcctaagaccaagatcgtctgcacgctcggcccggcgtcgcgatccgtcgagatgatctcgcgcctgctgcgcgccgggatgtgcgtcgcgcgcttcaacttctcccatggctcccacgagtaccaccaggagacgctcgacaacctgcacgccgccatggagctcaccgggatcctctgcgccgttatgctcgacaccaagggtccagagattagaactggatttttgaaagatgggaagcctattcaattgataaaaggccaagaaatcacaatttctacagactatagcattcagggtgatgagaaaatgatatcaatgagctacaagaagcttgctgttgatctgaagccaggcagtgtcatattgtgtgctgatggtaccatcactcttactgttcttcactgtgataaagaacaaggcttggttcgctgccgctgtgagaacactttcaagcttggcgagaggaagaatgttaatcttccaggagttattgttgatctccccacactcacagacaaggacaaggaggacatccttaaatggggtgttccaaacaagattgacatgattgccttgtcatttgttcggaagggttcggatcttgtggaggttaggaaggtacttggtgagcatgccaagtccataatgctgatgtcaaaggttgagaatcaagagggagtagctaactttgatgatatcctggcaaactctgatgcttttatggtggcaagaggtgatttaggaatggaaattcctatagagaagattttctttgcacagaaggtgatgattttcaagtgcaatattcaaggcaagcctgttgtgactgcaacccagatgttggaatctatgatcaagtctcctcgccctactcgggcagaagcaacggatgttgcaaacgcagttcttgatggcacagactgtgttatgctcagtggtgagactgctgctggggcctatccagagttggcggtgcagactatggctaagatctgcctgcaagcagagtcttgcgtagaccatgctgctatttttaaatcaatcatggcttcagctccaattccaatgagtccattggagagccttggatcatcagctgttcgcacagcaaactctgccagggcagcacttatcttggtcctgaccaggggaggaactactgctaggcttgtagccaagtataggccatccatgccgattctgtccgttgtggttcctgagctgaagacagactcgttcgactgggcctgcagtgacgagggtccggcaaggcacagcctcattgtgaggggtgtcatcccaatgctgagtgccgccactgccaaggcctttgacaacgaagccactgacgaagctattggttttgccattgaaaatgcgaagacgatggggctatgcaacaccggtcaatccgttgtggccctgcaccgcatcgggatttcatccgtcatcaagcttcttactgtgaagtag

SEQ ID NO: 8716 - protein, 509 aa, Zea mays
MAAGGELAWGEEPVARRRPKTKIVCTLGPASRSVEMISRLLRAGMCVARFNFSHGSHEYHQETLDNLHAAMELTGILCAVMLDTKGPEIRTGFLKDGKPIQLIKGQEITISTDYSIQGDEKMISMSYKKLAVDLKPGSVILCADGTITLTVLHCDKEQGLVRCRCENTFKLGERKNVNLPGVIVDLPTLTDKDKEDILKWGVPNKIDMIALSFVRKGSDLVEVRKVLGEHAKSIMLMSKVENQEGVANFDDILANSDAFMVARGDLGMEIPIEKIFFAQKVMIFKCNIQGKPVVTATQMLESMIKSPRPTRAEATDVANAVLDGTDCVMLSGETAAGAYPELAVQTMAKICLQAESCVDHAAIFKSIMASAPIPMSPLESLGSSAVRTANSARAALILVLTRGGTTARLVAKYRPSMPILSVVVPELKTDSFDWACSDEGPARHSLIVRGVIPMLSAATAKAFDNEATDEAIGFAIENAKTMGLCNTGQSVVALHRIGISSVIKLLTVK

SEQ ID NO: 8717 - DNA, 3182 bp, Lactobacillus casei
  CDS (1307)..(3073): transl_table=11
aaaaaattgcaaactgcccatggaccaattccagttatcactgtcgacacgaccagcaaggagagtgttttgttagataagcgatactgggtcactgctgacaccagcttgatggctgatcttgaatcgcggtttggtgcggctaatgtggtgttgcgaaaacgacaagaagaatagagaaaattgtaaaatgttctcattttcagggactttgtttctgaaaagtggtaaactcaatgagtatttgtgatgggacaaatcgcaaaagaatatgcatgaggtgaaataatgaaacgcattggtattttgaccagtggcggggatgcgcctggcatgaacgccgcggtccgcgctgttgctcgcaaggcgatgcacgaaggccttgaagtatatggcatcaattatggatttgctgggttagttgccggcgacattttcaaaatgaatgaatcaactgtcggtgataagattcaacgcggcgggaccatgttatattccgcacgttatccacaatttgcgcaagaagaaggccagttgcgcggggtcgaacaattaaacaagtttggcatcgaggcgttggtcgtcatcggcggagacggctcttatcacggtgcactagctttgacgcgtcacggtttcaacaccattggcctgccaggaacgatcgacaacgatattccttacacggacttcacgattggctttgatactgccgttaatacagttgtggaagctgttgaccgtcttcgcgataccgcggcttcgcatgaacgaacctttgtcattgaagtcatgggtcgtgaagctggggacattgccctttggtcgggcgtcgccggtggtgccgaggatgtcatcattccagaacacgactttgacgttaagaaaattgcgtcgaagttgcaaagttctcgtgaacgtggtcaaaagcatgcggtcattcttttggcagaaggcgtgatgcacgctgatcaatttgccaaggaattagccgcacatggcgatttccaattacgttcgacagttctgggacacattgttcgtggcggtgcaccgtccgcacgtgatcgcgttttggcttcacaaatgggttcatacgcggttgaacttttgttgcaaggcaaaggcgctttggctgtcggcattgaaaacaacaagatcacggcacatgatgttcggaccttgtttgatgccaagcatcacgcagaactttcgctctacaccttagcggaagagttaacattttaatctcgtaaacaaacgacattaacgtctgtttaaataatttcaaggagcgatttcacttatgaaaaaaaccaagatcgtcagcacgcttggacctgcaagtaacaccactgatatcatcgttaagttgattgaagcgggtgccaacgttttccgtttcaatttctcacatggtgatcatgaagagcatttggcacggatgaacatggttcacgaagctgaaaagatcacgggtaagaccgttggtatcatgctggatacgaagggtgccgaaattcggacaactcttgaagataccccgaatggtaagatcgattttcacaccggtgacaaagttcgcatctccatggatgcaagtctgaaaggcaccaaggaaaaagttgctgttacctatcctggcctttatgatgacactcacgttggcggccatgttttgtttgatgatggcttgattgacatgaagatcaccgaaaaggacgaaaagaaccgtgaactcgttaccgttgttcaaaacgacggtgtccttggtggtaagaaaggtgtcaacgctcctggtgttgccatcaacttgcctgggattacggaaaaagactccgatgacattcgtttcggcttggacaacgggatcaacttcattgctgcttcctttgttcgtaagcctcaagacgttttagacattcgtgaactccttgaagaaaagaacgcacttaatgttcagatcttccctaagatcgaatcacaagaaggcatcgacaacattgatgacatcttgaaggtttccgatggcttaatggttgctcgtggcgacatgggtgttgaaattccatttgaacatgttccgatcgttcagaagcgcttgatcaagaagtgcaactctttgggtaagccggttatcacggctacacaaatgttggattccatgcaagaaaacccacgtcctacccgtgccgaagtaaacgacgttgccaatgccgtgtttgatggcaccgatgcaacgatgctttctggcgaatctgctaatggtgactatccggttgaatccgttgctgcaatggctcggattgacgaatacaccgaagcagcgatgatggatcaggatgccttcgcattgaaggaatacagtaacaagaacgtcaccgaagctgttggccaaagtgttgcacacacggctcgcaacttaggggttaagaccattgttgctgcgaccgaatccggctacactgcccgcatgatttccaagtatcgtccgaaggctgacattcttgccattaccttcagcgaaaagacccaacgcggcctgatggtcaactggggtgtttacccaatcattgctgaaaagcctgctaacaccgatgctatgttcgacttggcaaccaagaaggcccaagaccttggctttgctaaggaaggcgatctgatcttgatcactgccggtgttcctgttggtgaatctggcacaaccaacgtaatgaaggttcaactcattggctccaagctggttcaaggctcaggtgtcggcgacgaatccacgattggtaaggcagtcatcgcaagcaacgctcaagaagctgctgctaagatgcaaaagggtgacattctggttgttaagacgactgacaaagattacttgccagcaatcgaaaaagcagctgccttggttgttgaaaccggtggcttgaccagtcacgcagctgttgttggtattgctatgggtatcccagttgttgttggtgctgaaaatgctaccagcgtcatctccgatggccagatcattactgttgactcccgtcgtgggatcatctacaaaggtgctaccaacgccctttaatcttcaaaatgacctgttaaaggttaggaaaaactctcaaggaaacttgggagtttttttcttcccaaaaaacagtagcgttacctgttttgagcaacttactgataaa

SEQ ID NO: 8718 - protein, 588 aa, Lactobacillus casei
MKKTKIVSTLGPASNTTDIIVKLIEAGANVFRFNFSHGDHEEHLARMNMVHEAEKITGKTVGIMLDTKGAEIRTTLEDTPNGKIDFHTGDKVRISMDASLKGTKEKVAVTYPGLYDDTHVGGHVLFDDGLIDMKITEKDEKNRELVTVVQNDGVLGGKKGVNAPGVAINLPGITEKDSDDIRFGLDNGINFIAASFVRKPQDVLDIRELLEEKNALNVQIFPKIESQEGIDNIDDILKVSDGLMVARGDMGVEIPFEHVPIVQKRLIKKCNSLGKPVITATQMLDSMQENPRPTRAEVNDVANAVFDGTDATMLSGESANGDYPVESVAAMARIDEYTEAAMMDQDAFALKEYSNKNVTEAVGQSVAHTARNLGVKTIVAATESGYTARMISKYRPKADILAITFSEKTQRGLMVNWGVYPIIAEKPANTDAMFDLATKKAQDLGFAKEGDLILITAGVPVGESGTTNVMKVQLIGSKLVQGSGVGDESTIGKAVIASNAQEAAAKMQKGDILVVKTTDKDYLPAIEKAAALVVETGGLTSHAAVVGIAMGIPVVVGAENATSVISDGQIITVDSRRGIIYKGATNAL

SEQ ID NO: 8719 - DNA, 1521 bp, Saccharomyces bayanus
  CDS (1)..(1521)
atgccagaatcaagactgcagagactagccaacttgaaaataggcactccgcaagagcttagacggacctccattataggcaccatcgggcccaagactaatagctgcgaggcaatcaccgctttgaggaaggctgggctgaacatcatccgaatgaacttctcccacggctcttatgaattccaccaatcggtgatagacaatgccttgaagtcggaacagcaattccccggaagaccgcttgccattgctctggacaccaagggccctgagattaggacaggccgcaccccgaacgaccaggacttccacatcctcgttgaccaccagatgatcttcaccaccgacgcgaagttcgaacactcctctaatgacaaaatcatgtatatagactatgccaatttgacaaaggtaattgtgcccgggaaactcatctacgtcgatgacgggattctgtcttttaaagtgctccagatcatggacgatgccaacataagggtccaagctctcaattcgggctatatctcatcccgtaaaggtgtcaacttacccaataccgacgtggatttgccccctctttccgcaaaggatattcaggacttgcaattcggcatgcggaatggaatccacatggtgtttgcctctttcattagggcccccgaagacgtcttgaccattaggaaagtcctgggcaccgaaggcgaggacatcaaaatcatctccaagatcgaaaatcaacaaggcctggataatttcgacgaaatcctgcaagtcacagatggtgtcatgatagccaggggtgatctgggcattgagatcctggcaccagaagtgctggccattcagaaaaaactcattgccaaatgtaacgtggcgggcaaacctgtcatttgcgcgacccaaatgctggagtcaatgacctacaacccaagacccacaagggctgaagtctctgatgtcggaaacgccgttttggatggtgccgattgtgttatgttgtctggcgaaacggcaaagggcgattatccagttaatgcagtcaagataatggcggccacagctctaattgcagagagtactattgcgcatttggctctatacgatgatcttagagacgccacttctaagcccacctccactacagaaaccgttgcagccgcagccactgcagcgatcttggagcaaaatggtaaagccatcgttgtattatccactacgggaaacacagcaaggctgttgtctaagtacagaccaagttgtcctatcatactagtgacgaggcacgcaagaacggcaagaatcgcacatttatacagaggtgtttttccatttgtctttgagccaaaacggctgtacgattggggtgaagacgttcacagacgcttaaagtttggcgtggaaatggcaagatcttttggaatggttgaaagtggtgataccgttgtatccatccaaggcttcagaggcggtattggtcattcaaacaccttgcgtgtttctaccgttggtgaagagttttag

SEQ ID NO: 8720 - protein, 506 aa, Saccharomyces bayanus
MPESRLQRLANLKIGTPQELRRTSIIGTIGPKTNSCEAITALRKAGLNIIRMNFSHGSYEFHQSVIDNALKSEQQFPGRPLAIALDTKGPEIRTGRTPNDQDFHILVDHQMIFTTDAKFEHSSNDKIMYIDYANLTKVIVPGKLIYVDDGILSFKVLQIMDDANIRVQALNSGYISSRKGVNLPNTDVDLPPLSAKDIQDLQFGMRNGIHMVFASFIRAPEDVLTIRKVLGTEGEDIKIISKIENQQGLDNFDEILQVTDGVMIARGDLGIEILAPEVLAIQKKLIAKCNVAGKPVICATQMLESMTYNPRPTRAEVSDVGNAVLDGADCVMLSGETAKGDYPVNAVKIMAATALIAESTIAHLALYDDLRDATSKPTSTTETVAAAATAAILEQNGKAIVVLSTTGNTARLLSKYRPSCPIILVTRHARTARIAHLYRGVFPFVFEPKRLYDWGEDVHRRLKFGVEMARSFGMVESGDTVVSIQGFRGGIGHSNTLRVSTVGEEF

SEQ ID NO: 8721 - DNA, 1584 bp, Arabidopsis thaliana
  CDS (1)..(1584)
atgcattcaagtcatctccttctcgaggaaccgatcaggatgacttcaatcctcgaaccttctaaatcaagtttcttcccggctttgactaagattgttgggactctaggtccgaaatctcgatccgtcgaggtgattgctggttgtctcaaagctggaatgtccgtggctcgattcgatttctcttggtgcgatgctgattatcaccaggagacgctggagaatctgaagatagctgtgaagagcactaagaagctttgtgctgttatgctagacactgtaggacctgagttgcaagttattaacaagactgagaaagctatttctcttaaagctgatggccttgtaactttgactccgagtcaagatcaagaagcctcctctgaagtccttcccattaattttgatgggttagcgaaggcggttaagaaaggagacactatctttgttggacaatacctcttcactggtagtgaaacaacttcagtttggcttgaggttgaagaagttaaaggagatgatgtcatttgtatttcaaggaatgctgctactctgggtggtccgttattcacattgcacgtctctcaagttcacattgatatgccaaccctaactgagaaggataaggaggttataagtacatggggagttcagaataagatcgactttctctcattatcttattgtcgacatgcagaagatgttcgccaggcccgtgagttgcttaacagttgtggtgacctctctcaaacacaaatatttgcgaagattgagaatgaagagggactaacccactttgacgaaattctacaagaagcagatggcattattctttctcgtgggaatttgggtatcgatctacctccggaaaaggtgtttttgttccaaaaggctgctctttacaagtgtaacatggctggaaagcctgccgttcttactcgtgttgtagacagtatgacagacaatctgcggccaactcgtgcaggggcaactgatgttgctaatgctgttttagatggaagtgatgcaattcttcttggtgctgagactcttcgtggattgtaccctgttgaaaccatatcaactgttggtagaatctgttgtgaggcagagaaagttttcaaccaagatttgttctttaagaagactgtcaagtatgttggagaaccaatgactcacttggaatctattgcttcttctgctgtacgggcagcaatcaaggttaaggcatccgtaattatatgcttcacctcgtctggcagagcagcaaggttgattgccaaataccgtccaactatgcccgttctctctgttgtcattccccgacttacgacaaatcagctgaagtggagctttagcggagcctttgaggcaaggcagtcacttattgtcagaggtcttttccccatgcttgctgatcctcgtcaccctgcggaatcaacaagtgcaacaaatgagtcggttcttaaagtggctctagaccatgggaagcaagccggagtgatcaagtcacatgacagagttgtggtctgtcagaaagtgggagatgcgtccgtggtcaaaatcatcgagctagaggattag

SEQ ID NO: 8722 - protein, 527 aa, Arabidopsis thaliana
MHSSHLLLEEPIRMTSILEPSKSSFFPALTKIVGTLGPKSRSVEVIAGCLKAGMSVARFDFSWCDADYHQETLENLKIAVKSTKKLCAVMLDTVGPELQVINKTEKAISLKADGLVTLTPSQDQEASSEVLPINFDGLAKAVKKGDTIFVGQYLFTGSETTSVWLEVEEVKGDDVICISRNAATLGGPLFTLHVSQVHIDMPTLTEKDKEVISTWGVQNKIDFLSLSYCRHAEDVRQARELLNSCGDLSQTQIFAKIENEEGLTHFDEILQEADGIILSRGNLGIDLPPEKVFLFQKAALYKCNMAGKPAVLTRVVDSMTDNLRPTRAGATDVANAVLDGSDAILLGAETLRGLYPVETISTVGRICCEAEKVFNQDLFFKKTVKYVGEPMTHLESIASSAVRAAIKVKASVIICFTSSGRAARLIAKYRPTMPVLSVVIPRLTTNQLKWSFSGAFEARQSLIVRGLFPMLADPRHPAESTSATNESVLKVALDHGKQAGVIKSHDRVVVCQKVGDASVVKIIELED

SEQ ID NO: 8723 - DNA, 1533 bp, Glycine max
  CDS (1)..(1533)
atggcgaacatagacatcgaagggatcttgaagcagcagcctgatgatgggcgcgttccgaagacgaaaatagtgtgtactttgggccccgcttctcgatccgtggaaatgactgagaagcttcttagggctgggatgaacgttgctcgtttcaatttctctcatggcacccacgactatcatcaggaaaccctcaacaatctcaagactgctatgcacaacactggtatactctgtgccgtcatgcttgacactaagggacctgagattcggactggttttctgaaagatggaaaacctattcaacttaaggaaggacaagaaatcaccataactactgattatgacattaagggggatcaggagatgatatccatgagttacaagaagctgcctgtccacttgaagcctggaaacaccatattgtgctctgatgggacgattactctcactgtcttatcttgtgatcctgatgctggtactgttagatgtcgttgtgaaaacactgctacgttgggtgagagaaaaaatgttaaccttcctggtgttgttgttgatctccccacacttactgagaaggataaggaagatattcttcaatggggtgtacccaacaagattgacatgattgctctttcatttgttcgcaaaggctcagatcttgttaatgtccgcaaggttctcgagccacatgcaaagactattcagttgatgtctaaggttgagaatcaggaaggagtcctgaattttgacgaaatcctgcgcgagactgatgcattcatggtggcacgaggtgatcttggaatggagatcccagttgaaaagatattcctggcgcagaagatgatgatatacaagtgtaatctggttgggaagccagtggtgactgctacccaaatgcttgaatcaatgataaagtctcccaggccaacccgagctgaagcaactgacgtagccaatgcagttcttgatggaacagattgtgtgatgcttagtggtgaaagtgctgctggggcatacccagaacttgctgtgaaaatcatggctcgtatctgcattgaagcagaatcatcccttgactatggtgccatcttcaaagagatgataaggtctacaccattgccaatgagtccattggagagccttgcatcatctgctgtccgcacagcaaacaaggccaaagcaaaactcattgttgtactgacacgtggcgggtctacagctaagttggttgctaagtataggccagcggttccaatattatcggtggtggttccagtgttgagcacagactcatttgattggacatgcagtgatgagacgccagcaaggcacagcttgatatataggggcttgattccaatattgggggagggatccgccaaggctactgatgcagaatctacagaggtcattctcgaagctgctcttaagtccgcaacacaaaggggcctttgtaagcctggtgatgcagttgttgccctgcatcgtattggcactgcctctgtcataaagatctgcatagtcaaataa

SEQ ID NO: 8724 - protein, 510 aa, Glycine max
MANIDIEGILKQQPDDGRVPKTKIVCTLGPASRSVEMTEKLLRAGMNVARFNFSHGTHDYHQETLNNLKTAMHNTGILCAVMLDTKGPEIRTGFLKDGKPIQLKEGQEITITTDYDIKGDQEMISMSYKKLPVHLKPGNTILCSDGTITLTVLSCDPDAGTVRCRCENTATLGERKNVNLPGVVVDLPTLTEKDKEDILQWGVPNKIDMIALSFVRKGSDLVNVRKVLEPHAKTIQLMSKVENQEGVLNFDEILRETDAFMVARGDLGMEIPVEKIFLAQKMMIYKCNLVGKPVVTATQMLESMIKSPRPTRAEATDVANAVLDGTDCVMLSGESAAGAYPELAVKIMARICIEAESSLDYGAIFKEMIRSTPLPMSPLESLASSAVRTANKAKAKLIVVLTRGGSTAKLVAKYRPAVPILSVVVPVLSTDSFDWTCSDETPARHSLIYRGLIPILGEGSAKATDAESTEVILEAALKSATQRGLCKPGDAVVALHRIGTASVIKICIVK

SEQ ID NO: 8725 - DNA, 1536 bp, Glycine max
  CDS (1)..(1536)
atggcgaacatagacatcgaagggatcttgaagcagcagcagccttatgatgggcgcgttccgaagacgaagatagtgtgtactttgggccctgcttctcgatccgtagaaatgaccgagaagcttctgagggcagggatgaacgttgctcgtttcaatttctctcatggcacccacgactatcaccaggaaaccctcaacaatctcaagactgccatgcacaacactggcatactctgtgccgtcatgcttgacactaagggacctgagattcggactggttttctgaaagatggaaaacctattcaacttaaagaaggccaagaagtcaccataactactgattatgacattaagggggatccggagatgatatccatgagttacaagaagctgcctgtccacttgaagcctggaaataccatactgtgctctgacgggacgattactctcactgtcttgtcttgtgaccctgatgctggtactgttagatgtcgttgtgaaaacactgcaacgttgggtgagagaaaaaatgttaaccttcctggtgttgtggtggatctacccacacttactgagaaggataaggaagacattcttggatggggtgtacccaacaagattgacatgattgctctttcatttgttcgtaaaggctcggatcttgttaatgtccgcaaggttctggggccacatgcaaagaatattcagttgatgtcaaaggttgagaatcaggagggagtcctgaattttgacgaaatcctgcgggagactgatgcattcatggtggcacgtggtgatcttggaatggagatcccagtagaaaagattttcctggcacagaagatgatgatatacaagtgtaatcttgttgggaagccagtggtgactgctacccaaatgcttgaatcaatgataaagtctcccaggccaacccgagctgaagcaactgatgtagctaatgcagttcttgatggaacagattgtgtgatgcttagtggtgaaagtgctgctggggcatacccagaacttgctgtgaaaatcatggctcgcatttgcattgaagcagaatcatcccttgactatggtgccatcttcaaagagatgataaggtctaccccattgcctatgagtccattggagagccttgcatcatctgctgtccgcacagcaaacaaggccaaagcaaaactcattgttgtactgacacgtggcgggtctacagctaagttggttgctaagtataggccagcggttccaatattatcggtggtggttccagtgttgagcacagactcatttgattggacatgcagtgatgagacgccagcaaggcacagcttgatatataggggcttgattccaatattgggggagggatccgccaaggctactgatgcagaatctacagaggtcattctcgaagctgctcttaagtccgcaacacaaaggggcctttgtaagcctggtgatgcagttgttgccctgcatcgtattggcactgcctctgtcataaagatctgcatagtcaaataa

SEQ ID NO: 8726 - protein, 511 aa, Glycine max
MANIDIEGILKQQQPYDGRVPKTKIVCTLGPASRSVEMTEKLLRAGMNVARFNFSHGTHDYHQETLNNLKTAMHNTGILCAVMLDTKGPEIRTGFLKDGKPIQLKEGQEVTITTDYDIKGDPEMISMSYKKLPVHLKPGNTILCSDGTITLTVLSCDPDAGTVRCRCENTATLGERKNVNLPGVVVDLPTLTEKDKEDILGWGVPNKIDMIALSFVRKGSDLVNVRKVLGPHAKNIQLMSKVENQEGVLNFDEILRETDAFMVARGDLGMEIPVEKIFLAQKMMIYKCNLVGKPVVTATQMLESMIKSPRPTRAEATDVANAVLDGTDCVMLSGESAAGAYPELAVKIMARICIEAESSLDYGAIFKEMIRSTPLPMSPLESLASSAVRTANKAKAKLIVVLTRGGSTAKLVAKYRPAVPILSVVVPVLSTDSFDWTCSDETPARHSLIYRGLIPILGEGSAKATDAESTEVILEAALKSATQRGLCKPGDAVVALHRIGTASVIKICIVK

SEQ ID NO: 8727 - DNA, 1791 bp, Arabidopsis thaliana
  CDS (1)..(1791)
atgtctcagtctatccaattctccagtccttcacacactcctcaccttctccatctccctcactcacaattcaaccgtcctctctcctctatctccttccgtcgcttccctctaacaaccatcaaatacacttccatcagagcctcctcgtcaccatctccttcaccggatctcgattcatcgtcctcatcatcatcctcgcaagtacttctctcacctaacggtactggtgctgtgaagtctgatgagagatccgttgttgctacggcggttacgacggatacgtctgggattgaggttgatactgtgacggaagcggagcttaaggagaatggatttagaagtacgaggaggacgaagctgatctgtacgatcggaccggcgacttgtggatttgagcagcttgaggcgcttgctgtgggaggtatgaatgtggcgaggcttaatatgtgtcacggtacgcgtgattggcatcgcggtgtgattcgtagtgttcggaggcttaatgaggagaaaggctttgcggttgctattatgatggatactgaaggtagtgagattcatatgggagatcttggtggtgaagcttcagctaaagcagaggatggtgaggtttggactttcactgttagagcttttgattcttctcgtcctgaacgtaccattagtgttagctacgatggtttcgctgaagatgtaagagttggtgatgaacttctggttgatggtgggatggtgagatttgaagtgattgagaagattggtcctgatgttaagtgtctatgtaccgatcctggattgttgcttcctcgagctaacttgacgttttggagagatggaagtctagtacgagaacgtaatgccatgcttccaacaatttcttccaaggactggctggatattgattttggaattgctgaaggtgtagatttcattgctgtatcgtttgtcaagtcggctgaagtcattaatcatcttaaaagttatcttgctgctcgttcccgtggaggggaaattggagtgattgcaaagatcgagagtatcgattcattgaccaatttggaagaaattattctagcatcagatggagccatggttgcaagaggagatctgggagctcagatacctcttgagcaagttccagcagctcaacagagaatcgtgcaagtctgcagagcgctgaacaaacccgtcattgtcgcttctcagctacttgagtccatgattgagtacccaactccaaccagagcagaagtagccgacgtgtctgaagcagtaagacaaagatcagatgcattgatgctctctggagaatcagctatgggacaattcccagacaaggcgctcacggttctaaggacagtcagtttaagaatcgagagatggtggagagaagagaaacgtcatgagtctgtgccgcttcaagccataggctcttcattttcagacaaaatctcagaagagatctgtaactcagctgctaaaatggctaacaatcttggagtggacgcggttttcgtttacacaacgagcggacacatggcatcactggtctcccgatgtcgcccggactgcccgatctttgctttcacaaccacaacctcagtgagaagacgcttaaacctacaatggggacttatcccattccgtctcagcttctcagacgacatggaaagcaacttgaacaaaacattctcgttactgaaatcaagaggtatgatcaaatctggtgacctcgtgatcgcagtctcggacatgctgcaatcaatccaggtaatgaacgtcccgtaa

SEQ ID NO: 8728 - protein, 596 aa, Arabidopsis thaliana
MSQSIQFSSPSHTPHLLHLPHSQFNRPLSSISFRRFPLTTIKYTSIRASSSPSPSPDLDSSSSSSSSQVLLSPNGTGAVKSDERSVVATAVTTDTSGIEVDTVTEAELKENGFRSTRRTKLICTIGPATCGFEQLEALAVGGMNVARLNMCHGTRDWHRGVIRSVRRLNEEKGFAVAIMMDTEGSEIHMGDLGGEASAKAEDGEVWTFTVRAFDSSRPERTISVSYDGFAEDVRVGDELLVDGGMVRFEVIEKIGPDVKCLCTDPGLLLPRANLTFWRDGSLVRERNAMLPTISSKDWLDIDFGIAEGVDFIAVSFVKSAEVINHLKSYLAARSRGGEIGVIAKIESIDSLTNLEEIILASDGAMVARGDLGAQIPLEQVPAAQQRIVQVCRALNKPVIVASQLLESMIEYPTPTRAEVADVSEAVRQRSDALMLSGESAMGQFPDKALTVLRTVSLRIERWWREEKRHESVPLQAIGSSFSDKISEEICNSAAKMANNLGVDAVFVYTTSGHMASLVSRCRPDCPIFAFTTTTSVRRRLNLQWGLIPFRLSFSDDMESNLNKTFSLLKSRGMIKSGDLVIAVSDMLQSIQVMNVP

SEQ ID NO: 8729 - DNA, 1584 bp, Arabidopsis thaliana
  CDS (1)..(1584)
atgcattcaagtcatctccttctcgaggaaccgatcaggatgacttcaatcctcgaaccttctaaatcaagtttcttcccggctttgactaagattgttgggactctaggtccgaaatctcgatccgtcgaggtgattgctggttgtctcaaagctggaatgtccgtggctcgattcgatttctcttggtgcgatgctgattatcaccaggagacgctggagaatctgaagatagctgtgaagagcactaagaagctttgtgctgttatgctagacactgtaggacctgagttgcaagttattaacaagactgagaaagctatttctcttaaagctgatggccttgtaactttgactccgagtcaagatcaagaagcctcctctgaagtccttcccattaattttgatgggttagcgaaggcggttaagaaaggagacactatctttgttggacaatacctcttcactggtagtgaaacaacttcagtttggcttgaggttgaagaagttaaaggagatgatgtcatttgtatttcaaggaatgctgctactctgggtggtccgttattcacattgcacgtctctcaagttcacattgatatgccaaccctaactgagaaggataaggaggttataagtacatggggagttcagaataagatcgactttctctcattatcttattgtcgacatgcagaagatgttcgccaggcccgtgagttgcttaacagttgtggtgacctctctcaaacacaaatatttgcgaagattgagaatgaagagggactaacccactttgacgaaattctacaagaagcagatggcattattctttctcgtgggaatttgggtatcgatctacctccggaaaaggtgtttttgttccaaaaggctgctctttacaagtgtaacatggctggaaagcctgccgttcttactcgtgttgtagacagtatgacagacaatctgcggccaactcgtgcagaggcaactgatgttgctaatgctgttttagatggaagtgatgcaattcttcttggtgctgagactcttcgtggattgtaccctgttgaaaccatatcaactgttggtagaatctgttgtgaggcagagaaagttttcaaccaagatttgttctttaagaagactgtcaagtatgttggagaaccaatgactcacttggaatctattgcttcttctgctgtacgggcagcaatcaaggttaaggcatccgtaattatatgcttcacctcgtctggcagagcagcaaggttgattgccaaataccgtccaactatgcccgttctctctgttgtcattccccgacttacgacaaatcagctgaagtggagctttagcggagcctttgaggcaaggcagtcacttattgtcagaggtcttttccccatgcttgctgatcctcgtcaccctgcggaatcaacaagtgcaacaaatgagtcggttcttaaagtggctctagaccatggggagcaagccggagtgatcaagtcacatgacagagttgtggtctgtcagaaagtgggagatgcgtccgtggtcaaaatcatcgagctagaggattag

SEQ ID NO: 8730 - protein, 527 aa, Arabidopsis thaliana
MHSSHLLLEEPIRMTSILEPSKSSFFPALTKIVGTLGPKSRSVEVIAGCLKAGMSVARFDFSWCDADYHQETLENLKIAVKSTKKLCAVMLDTVGPELQVINKTEKAISLKADGLVTLTPSQDQEASSEVLPINFDGLAKAVKKGDTIFVGQYLFTGSETTSVWLEVEEVKGDDVICISRNAATLGGPLFTLHVSQVHIDMPTLTEKDKEVISTWGVQNKIDFLSLSYCRHAEDVRQARELLNSCGDLSQTQIFAKIENEEGLTHFDEILQEADGIILSRGNLGIDLPPEKVFLFQKAALYKCNMAGKPAVLTRVVDSMTDNLRPTRAEATDVANAVLDGSDAILLGAETLRGLYPVETISTVGRICCEAEKVFNQDLFFKKTVKYVGEPMTHLESIASSAVRAAIKVKASVIICFTSSGRAARLIAKYRPTMPVLSVVIPRLTTNQLKWSFSGAFEARQSLIVRGLFPMLADPRHPAESTSATNESVLKVALDHGEQAGVIKSHDRVVVCQKVGDASVVKIIELED

SEQ ID NO: 8731 - DNA, 1740 bp, Arabidopsis thaliana
  CDS (1)..(1740)
atggctcaagtggttgctaccaggtcaattcaaggctcgatgttatctcccaacggtggatctgtgtctacaagatccgagaagctattgaaaccagcgagttttgcagtgaaggttcttggcaacgaagcaaagagaagtggaagagtctctgtaagaagcagaagagtggttgatactactgtgagatccgctcgtgttgagactgaagtcattcctgtttctcctgaagatgtgcctaacagagaggagcagcttgagaggttgttggaaatgcagcagtttggtgatacatcggtagggatgtggtcgaagccgacagtgaggaggaagacaaagattgtttgcaccgttggtccgtcgaccaacacacgagaaatgatatggaaattggctgaagctgggatgaatgttgctaggatgaatatgtctcatggagatcatgcttcacataagaaggttattgatttggttaaagaatacaatgcacaaactaaagacaacactattgctatcatgcttgacaccaagggtccggaagttaggagtggagatttacctcagccaattatgttagatcctggtcaagagtttacctttacaattgagagaggagtcagcacaccaagttgtgtcagtgttaactatgatgatttcgttaatgacgtggaagcgggtgacatgcttcttgttgatggtggtatgatgtcgtttatggtgaagtcaaagaccaaagactctgtcaaatgtgaagttgttgatggtggagaacttaagtcaaggagacacctgaatgtccgaggaaagagtgcaactttaccttcaatcactgagaaggactgggaggatattaaatttggagtggagaacaaagttgacttttatgcagtttcctttgtcaaagatgctcaagttgtacacgagttgaagaaataccttcaaaatagtggtgctgatatacacgtgatagtgaaaattgagagtgcagactccatacctaacttgcactccattatcacagcaccagatggggcaatggttgcaagaggtgatcttggtgcagagcttccaattgaagaagtccccattcttcaggaggagatcattaacctgtgccgtagtatgggaaaagctgttattgttgcgactaacatgcttgagagtatgatagttcatccaactccaacccgggcagaggtctcagacattgctatcgctgttagagaaggtgctgatgcggtaatgctttcaggagaaactgctcacggaaagttcccattgaaagctgctggagtgatgcacactgttgcattgcgaacagaagcaaccattactagcggtgaaatgccacctaatcttggtcaagccttcaagaaccatatgagtgagatgtttgcataccatgcaaccatgatgtcaaacacacttggaacttcaactgttgtcttcaccagaaccggtttcatggccatattgttaagtcactatcgtccttccggcacaatctatgccttcacaaatgagaaaaaaatacaacaaagattagctttgtatcaaggtgtatgccccatatatatggagttcacagatgatgcagaagaaacttttgctaatgctttggctacattactgaaacaaggaatggtgaagaagggagaggaaatagcaatcgtacagagcggtacacagccaatctggcgatctcaatcgacacataacatccaagtccgcaaggtttaa

SEQ ID NO: 8732 - protein, 579 aa, Arabidopsis thaliana
MAQVVATRSIQGSMLSPNGGSVSTRSEKLLKPASFAVKVLGNEAKRSGRVSVRSRRVVDTTVRSARVETEVIPVSPEDVPNREEQLERLLEMQQFGDTSVGMWSKPTVRRKTKIVCTVGPSTNTREMIWKLAEAGMNVARMNMSHGDHASHKKVIDLVKEYNAQTKDNTIAIMLDTKGPEVRSGDLPQPIMLDPGQEFTFTIERGVSTPSCVSVNYDDFVNDVEAGDMLLVDGGMMSFMVKSKTKDSVKCEVVDGGELKSRRHLNVRGKSATLPSITEKDWEDIKFGVENKVDFYAVSFVKDAQVVHELKKYLQNSGADIHVIVKIESADSIPNLHSIITAPDGAMVARGDLGAELPIEEVPILQEEIINLCRSMGKAVIVATNMLESMIVHPTPTRAEVSDIAIAVREGADAVMLSGETAHGKFPLKAAGVMHTVALRTEATITSGEMPPNLGQAFKNHMSEMFAYHATMMSNTLGTSTVVFTRTGFMAILLSHYRPSGTIYAFTNEKKIQQRLALYQGVCPIYMEFTDDAEETFANALATLLKQGMVKKGEEIAIVQSGTQPIWRSQSTHNIQVRKV

SEQ ID NO: 8733 - DNA, 1581 bp, Aspergillus oryzae
  CDS (1)..(1581)
atggccgccagcagttctctcgaccatttgagcaaccgtatgaagctggagtggcactccaagctgaacacggagatggtgcccgcgaagaacttccgccgcacctccatcattggcaccattggccctaagaccaactcggtggagaagatcaacgctctccgcagatccggtctcaatgttgttcgtatgaacttctcccacggttcgtatgagtaccaccagtccgttatcgacaacgcccgtgaggccgccagagtccagaccggacgtcccctcgccattgctcttgataccaaaggacctgaaatccgtactggaaacactaccgatgataaggatatccccatcaaggagggtcacgagctcaacatcaccactgatgagaagtacgctaatgctagcgacgaccagaacatgtacctggactataagaacattaccaatgtgatcgctcccggaaagctcatctatgtcgacgatggtatcctctccttccaggttctggaggtcgttgacgacaagaccctgcgcgtcaagtgtcttaacaatggcaacatctcctctcgcaagggtgttaacctgcccggcaccgatgttgaccttcccgccctttccgagaaggatatcagtgatctcaagttcggtgtcaagaacggcgtcgacatgatctttgcctcgttcattcgtcggggaagtgacatccgccacattcgtgacgtgttgggtgaagagggtaaggagattcagatcatcgccaagattgagaaccagcagggtgtcaacaacttcgacgagattctcgaggagactgacggtgttatggtcgcccgtggtgatcttggtatcgaaatccccgcccccaaggtcttcatcgctcagaagatgatgatcgccaagtgcaacatcaagggcaagcctgtcatctgtgccactcaaatgctcgagtccatgacatacaaccctcgccccactcgtgccgaggtgtccgatgtcgctaacgctgttcttgacggagccgactgtgtcatgctttctggtgagaccgctaagggctcatacccttgtgaggctgttaagatgatgagcgagacctgtttgctcgccgaggttgccattccccacttcaatgtctttgacgagttgcgcaacctcgctccccgccccactgatactgtggaatccatcgccatggctgccgttagcgccagtcttgagcttaacgccggtgccattgttgtcttgaccaccagtggtaacactgctcgccttctttccaagtaccgccctgtgtgccccatcctgatggtcacccgtaaccctagagcttcgaggtattctcacctctaccgtggtgtctggcccttcctcttccccgagaacaagcccgacttcaacgtcaagatctggcaggaggacgttgaccgccgtctcaagtgggctatctcccacggtatcaagctcggtatcatcaacaagggagacaacattgtctgtgtccagggttggcgcggaggccagggccacaccaacaccgtccgtgtggtcccagctgaggagaaccttggtctgattgagtaa

SEQ ID NO: 8734 - protein, 526 aa, Aspergillus oryzae
MAASSSLDHLSNRMKLEWHSKLNTEMVPAKNFRRTSIIGTIGPKTNSVEKINALRRSGLNVVRMNFSHGSYEYHQSVIDNAREAARVQTGRPLAIALDTKGPEIRTGNTTDDKDIPIKEGHELNITTDEKYANASDDQNMYLDYKNITNVIAPGKLIYVDDGILSFQVLEVVDDKTLRVKCLNNGNISSRKGVNLPGTDVDLPALSEKDISDLKFGVKNGVDMIFASFIRRGSDIRHIRDVLGEEGKEIQIIAKIENQQGVNNFDEILEETDGVMVARGDLGIEIPAPKVFIAQKMMIAKCNIKGKPVICATQMLESMTYNPRPTRAEVSDVANAVLDGADCVMLSGETAKGSYPCEAVKMMSETCLLAEVAIPHFNVFDELRNLAPRPTDTVESIAMAAVSASLELNAGAIVVLTTSGNTARLLSKYRPVCPILMVTRNPRASRYSHLYRGVWPFLFPENKPDFNVKIWQEDVDRRLKWAISHGIKLGIINKGDNIVCVQGWRGGQGHTNTVRVVPAEENLGLIE

SEQ ID NO: 8735 - DNA, 2150 bp, Pseudomonas hydrogenothermophila
  CDS (16)..(1437): transl_table=11
ttacggaaacggaagatgcgccacaccaaaatcgtcgcgacgctaggccccgcttcgagcgatcccgccacgctcgaacggctgctccttgccggcgtcgacgtcgttcgcctcaacttttcgcacggaaccgcggacgagcaccgcgcccgggcgtcgctcgtgcgtgcgctcgcacagcagacccaacgccccgttggcatcctgggcgacctccaaggaccgaaaatccgcatcggccggttcaccaccaacgctgttactctgagcaaagggcaacgctttcggctcgactgcgacctcgccccgggtgacgccacccgggttgggctcgactacccggaactgatcgacgacgtcgaggtcggcgacatcttgctcctcgacgacggcaaaattcgcttgcagatcgtcgaaaagtgcgcagacgcgctcatcacgcaggtgcttgttggcggcaccctctcgaaccacaaagggatcaacaaactgggtggcgggctttcggcgccagcgctcactgcgaaagaccgtgccgtgccgatatcgcgctcgctgccgaaatcggcgtcgattaccgtcgcggtctctttcgtcaagcacgccgaagagatgcacgaagcgcggcacttggcgcgcgctgccgggagccgcgcccgtttgatcgccaaaatcgaacgggtcgaagcgatcgctaacctcgacgcgattctggaggcgagcgacggcgtgatggtcgcgcgtggggatctcgcggtcgaggtgggcgatgctgctgtgccggcgttacaaaagcgcattttgcgccgcgcacgggaaatgaaccgcctgtcgatcaccgccacccaaatgatggaatcgatggtgcatagccccgtcccgacccgggccgaggtctccgacgtcgcgaacgcggtgctcgacggcaccgacgcggtgatgctctcggccgaaaccgcagcgggccagtacccggtcgaggcagtcgaagcgatggcgcgcgtctgcgccgaagccgacgcgtcgaacgacgcccacctcgaccaggagctcctggggcggcgttttcaccgcgtcgacgaagcgatcgcggtctccgccgtctggtcgggctaccacctaggggtgaaagcgatcgtcgcgctcacccaatcgggcgcgaccgcactctggatgagccgcatcgcaagcattctccccatctacgccctcacccccgacccggtgaccttcggccacctcaccctcttccgccaagtcacgccagttcgcttcgacctgaaccccgcgtccgacccggcaatgctcctcacacagatacgcacgctccttgtgtcgaacggctgggctgcaccaggggaaacgatcgcggtcactttcggcgaaccgatgggacaacccggcggcagcaacacgttgaagatcgttaccctctagcctgagggatacggggatggtagcattgggcaagattccaatcgtaccaggaggaggaaaaaccgtgtcagcgcaacaacaaaacccgatcagccgcttccccgtccccgaaaccctcgacgcgctccctgccgatatccgcgaacggatcgaaaaggtcgcggaaaaatcgggcttcatccccaacgtcttcttggcgctggcggcgcgtcccgaagaatttcgcgccttcttcgcctaccacgatgcgctgatggagcgcccctcgaacctcagcaaagcggaaaaagagatgatcgtcgtcgccacctccgcggcgaacgactgcctctattgcgtggtcgcccacggtgcgatcctgcgcgtgcgcagcaaaaatccgcgcctttcggagcagatcgccaccaactaccgtcgtgccgagatcaccccacggcagcgggcgatgctcgactacgcgatgaaagtggcgctcgactccgcgcgcatcaccgaagccgactgggagccgctcatcgcccacgggttcacccaagacgacatttgggaaatcggtgcgattgccgccttttttgcgatgagcaaccgcttggcgaacatgagcgcgatgcggccgaacgacgagttctacagtctggggcggtagcgtaccgtctggggcggtagcgtaccgcttgcttttttgtgccctaggccgcccccaacctttcgca

SEQ ID NO: 8736 - protein, 473 aa, Pseudomonas hydrogenothermophila
MRHTKIVATLGPASSDPATLERLLLAGVDVVRLNFSHGTADEHRARASLVRALAQQTQRPVGILGDLQGPKIRIGRFTTNAVTLSKGQRFRLDCDLAPGDATRVGLDYPELIDDVEVGDILLLDDGKIRLQIVEKCADALITQVLVGGTLSNHKGINKLGGGLSAPALTAKDRAVPISRSLPKSASITVAVSFVKHAEEMHEARHLARAAGSRARLIAKIERVEAIANLDAILEASDGVMVARGDLAVEVGDAAVPALQKRILRRAREMNRLSITATQMMESMVHSPVPTRAEVSDVANAVLDGTDAVMLSAETAAGQYPVEAVEAMARVCAEADASNDAHLDQELLGRRFHRVDEAIAVSAVWSGYHLGVKAIVALTQSGATALWMSRIASILPIYALTPDPVTFGHLTLFRQVTPVRFDLNPASDPAMLLTQIRTLLVSNGWAAPGETIAVTFGEPMGQPGGSNTLKIVTL

SEQ ID NO: 8737 - DNA, 1413 bp, Selenomonas ruminantium
  CDS (1)..(1413): transl_table=11
atgttaaaaaagacgaaaatcgtttgcacgcagggtccgtccacagagaaaccgggcgtaattgatgcactgattgccaatggcatgaactgcgcacgcttcaatttctcccatggtgaccacgaagaacatcttggccgtatcaatatggttcgtgaagctgccaagaaggctggcaaggttatctctttaatcctcgataccaaaggtccggaaatgcgtctgggcgagttcaaagatggcaaagttatgctcgaaaagggcaacaagttcactttgacctatgacgatgaaccgggtgatgaaactcatgtttccgtaaaccacaaaggtctttacacggaagttaagccgggcgacaccctgctcctctccgatggcctcgtagctctcaaagttgatgaaatcaagggcaaggatatcgttacgacgattcagaacagcggtaagatgagcacgcgcaagcgcgtagctgctccgggcgtaccccttggtctgcctcctatctccgaacaggatgctaaggacatcatctttggctgcgaacaggatatggatttcgtagctgcttccttcatccagcgtccggatgatgttatcgccatccgcaagctcatcgaagagcacaatggccacatggaaattctgccgaagatcgaaaacctcgaaggtgttaagaacttcgatgcaatcctggaagtttccgacggcatcatggttgcccgtggtgacctgggcgtagaagttccggcagaagatgtgccccttattcagaaggaaatcatccgcaagtgcaacgctgctggcaagccggttatcgttgctacgcagatgctcgactccatggaacgcaacccgcgtccgacccgtgcagaagtttctgacgttggtaacgccatcctcgatggtacggatgccatcatgctgtccggcgaaacggcttccggtgactatccggtagaagcagttgccacgatgaaccgcattgcacagcgcatggaaagctcccttgaatacaaggaactctatgtagaacgtggtctgcagcacatggaatcccgtacgcgtgctatcgctcatgctacggttcagatggcttatgagctcgatgctccggctattatcacgccgaccgaatccggttacacgacgaaggtcgtttccaagtatcgtccgaaggctgctatcgtagcttacacgccgagcgaaaaagttctgcgtcagctgaacctgcgttggggcgtatatccggtactcggcacccagtggagcgatgtggatgaaatgatcagcaatgcaacggctgctgctgttaaggaagacctcgtacagcgcggcgacctcaccatcatcacctccggtgtgaagatggaatcccgtacgcgtgctatcgctcatgctacggacatctaa

SEQ ID NO: 8738 - protein, 470 aa, Selenomonas ruminantium
MLKKTKIVCTQGPSTEKPGVIDALIANGMNCARFNFSHGDHEEHLGRINMVREAAKKAGKVISLILDTKGPEMRLGEFKDGKVMLEKGNKFTLTYDDEPGDETHVSVNHKGLYTEVKPGDTLLLSDGLVALKVDEIKGKDIVTTIQNSGKMSTRKRVAAPGVPLGLPPISEQDAKDIIFGCEQDMDFVAASFIQRPDDVIAIRKLIEEHNGHMEILPKIENLEGVKNFDAILEVSDGIMVARGDLGVEVPAEDVPLIQKEIIRKCNAAGKPVIVATQMLDSMERNPRPTRAEVSDVGNAILDGTDAIMLSGETASGDYPVEAVATMNRIAQRMESSLEYKELYVERGLQHMESRTRAIAHATVQMAYELDAPAIITPTESGYTTKVVSKYRPKAAIVAYTPSEKVLRQLNLRWGVYPVLGTQWSDVDEMISNATAAAVKEDLVQRGDLTIITSGVKMESRTRAIAHATDI

SEQ ID NO: 8739 - DNA, 1545 bp, Arabidopsis thaliana
  CDS (1)..(1545)
atggcttcaatcctcgagccttccaaatctagtttcttcccggcattgactaagatcgtcggaactctaggtcctaaatcccgatccgtcgaggctctctccggctgtctcaaagccggcatgtctgtggctcgatttgatttctcgtggggagatgctgattatcaccaggagacacttgataatttgaaagttgctgtgaggagcactaagaagctttgtgctgttatgcttgatactgttggacctgagctacaagttattaacaaatctgagaaagctattactttgaaagctgatggccttgtaactttgacaccgaatcaagatcaagaagcttcttctgaagttcttcccattaatttcaatggacttgccaaggcagtgaagaaaggagacaccatcttcgttgggcaatacctattcactggtagtgaaacaacttcagtttggctcgaggttgatgaagttaaaggagatgatgtcatttgcctttcaaggaatgctgctactctggctggttctttgttcactttacactcctctcaagttcacattgatctcccaacgcttacagagaaggataaggaggttataagcacatggggagttcaaaataaaatcgattttctctcattgtcttattgtcgtcatgctgaggatgttcgccagacccgtgaaatgcttaaaaagttgggcgacctctctcaaacacaaatatttgctaagattgagaacgtagagggactaacccacttcgatgagattctacaagaagctgatggcattattctttctcgtgggaatttgggtatagatttacccccggaaaaggtgtttttgtttcaaaaggctgctctttacaagtgcaacatggctggaaagccagctgttcttacccgtgttgttgacagtatgactgacaacttgcgaccaactcgtgctgaggccacggatgttgctaatgctgttttagatggaagtgatgcaattcttcttggtgctgagacccttcgtggattgtaccctgttgagacaatatcaactgttggtaggatctgtgctgaggcagaaaaggttttcaatcaagatttgtactttaagaagactgtcaagtatgttggagaaccaatgactcacttggaatcgattgcttcttcagctgtacgggcagccattaaggttaaggcatccgtaattatatgcttcacctcttctggaagagcagccagattgattgccaaatacaggccaacgatgccggttatttctgttgtcattccccgggttaagacaaatcaactgaaatggagctttagtggagcttttgaggcgaggcagtcacttattgtcagaggcctcttccctatgcttgctgaccctcgtcaccctgcggaatctacaagtgcgacaaacgagtcagtcctgaaggttgctctagaccatgggaagcatgctggagtaatcaagtcgcatgacagagtagtggtgtgtcagaaagttggtgatgcatctgtggttaagatcattgagcttgaggattaa

SEQ ID NO: 8740 - protein, 514 aa, Arabidopsis thaliana
MASILEPSKSSFFPALTKIVGTLGPKSRSVEALSGCLKAGMSVARFDFSWGDADYHQETLDNLKVAVRSTKKLCAVMLDTVGPELQVINKSEKAITLKADGLVTLTPNQDQEASSEVLPINFNGLAKAVKKGDTIFVGQYLFTGSETTSVWLEVDEVKGDDVICLSRNAATLAGSLFTLHSSQVHIDLPTLTEKDKEVISTWGVQNKIDFLSLSYCRHAEDVRQTREMLKKLGDLSQTQIFAKIENVEGLTHFDEILQEADGIILSRGNLGIDLPPEKVFLFQKAALYKCNMAGKPAVLTRVVDSMTDNLRPTRAEATDVANAVLDGSDAILLGAETLRGLYPVETISTVGRICAEAEKVFNQDLYFKKTVKYVGEPMTHLESIASSAVRAAIKVKASVIICFTSSGRAARLIAKYRPTMPVISVVIPRVKTNQLKWSFSGAFEARQSLIVRGLFPMLADPRHPAESTSATNESVLKVALDHGKHAGVIKSHDRVVVCQKVGDASVVKIIELED

SEQ ID NO: 8741 - DNA, 1704 bp, Arabidopsis thaliana
  CDS (1)..(1704)
atggctgcttatggtcaaatctcctcgggaatgactgtagatcctcaggttctctcttcctccagaaacattggagtttccctatcacctctccggagaacactaatcggcgccggagttaggtctactagtatctctctccgtcaatgttctctctccgttagatcgattaaaatctccgaagatagccgcaaacctaaagcttatgcagagaacggtgcttttgatgtgggagttttggattcttcatcatatagattggctgattcaagaacaagtagtaatgattcaaggaggaagactaagattgtgtgtacgattggaccgtcttcgagttctagggaaatgatttggaaactcgcggaagctggaatgaatgtggctcgtttgaatatgtctcatggtgatcatgcttctcatcagataactattgatttagttaaggagtataattctttgtttgttgacaaagctattgctattatgttggatacaaagggtcctgaggttcgaagcggggatgtaccgcagccgatatttcttgaagagggtcaagagtttaactttactatcaagagaggtgtttcgcttaaagacactgttagtgtaaattatgatgattttgtgaacgatgttgaagttggggatatacttttggtggatggtggaatgatgtcgttagctgttaaatcaaagacgagtgatttggtgaagtgtgtggttattgatggtggagagcttcaatctagacgtcacttgaatgttcgaggaaagagtgcgactcttccatccattacagacaaagattgggaagacataaaatttggagtggacaaccaagtcgatttctacgccgtctcctttgttaaggatgctaaagttgtccatgagttgaagaactatctcaaaaacatatcggtgattgtgaaaattgaaagtgcagactctataaagaatcttccttctatcatatctgcttgtgatggggcaatggttgctcgtggagatcttggagctgaacttcccattgaagaggtcccgttgttacaggaagaaataatcagaaggtgtagaagcattcataaaccagtgattgttgccacaaacatgctagagagtatgattaatcatccaacgcctacaagagctgaagtctctgacattgcaattgcagtacgtgaaggcgcagatgctatcatgctttctggtgaaaccgcacatggaaagtttccgctgaaagctgttaacgtaatgcatactgtggcgttgagaaccgaggcaagtctacctgtcagaacctcggcatcccgtaccactgcttacaagggtcacatgggccaaatgtttgcttttcatgcttctataatggcaaatacactgagctcaccgctaattgtatttacgagaaccggatccatggcagtgcttctaagccactaccgcccatctgcaacaattttcgccttcacaaaccagagaagaataatgcaaaggcttgctctttatcaaggtgtcatgcctatatatatggagttctcggatgatgcagaagatacatatgcccggtctctcaaactcttacaggacgagaatatgctcaaggaaggacaacatgtaactcttgtccaaagtggctcgcaacccatttggcgtgaagaatcaacacatctcatacaagtccgtaagataaagataggtggatga

SEQ ID NO: 8742 - protein, 567 aa, Arabidopsis thaliana
MAAYGQISSGMTVDPQVLSSSRNIGVSLSPLRRTLIGAGVRSTSISLRQCSLSVRSIKISEDSRKPKAYAENGAFDVGVLDSSSYRLADSRTSSNDSRRKTKIVCTIGPSSSSREMIWKLAEAGMNVARLNMSHGDHASHQITIDLVKEYNSLFVDKAIAIMLDTKGPEVRSGDVPQPIFLEEGQEFNFTIKRGVSLKDTVSVNYDDFVNDVEVGDILLVDGGMMSLAVKSKTSDLVKCVVIDGGELQSRRHLNVRGKSATLPSITDKDWEDIKFGVDNQVDFYAVSFVKDAKVVHELKNYLKNISVIVKIESADSIKNLPSIISACDGAMVARGDLGAELPIEEVPLLQEEIIRRCRSIHKPVIVATNMLESMINHPTPTRAEVSDIAIAVREGADAIMLSGETAHGKFPLKAVNVMHTVALRTEASLPVRTSASRTTAYKGHMGQMFAFHASIMANTLSSPLIVFTRTGSMAVLLSHYRPSATIFAFTNQRRIMQRLALYQGVMPIYMEFSDDAEDTYARSLKLLQDENMLKEGQHVTLVQSGSQPIWREESTHLIQVRKIKIGG

SEQ ID NO: 8743 - DNA, 1533 bp, Lilium longiflorum
  CDS (1)..(1533)
atggcgaacatcgacatcgagggcatcctgaaggagctcccggccgacggccgcgtcccgaagacgaaattggtctgcaccctcgggccgtcgtccagatccgtgccgatgctcgagaagctgctgcgcgccggcatgaacacggccagattcaacttctcccacggcacgcacgagtatcaccaggagacgctcgataacctccggatcgcaatgcagaacacgcagattctctgcgccgtcgtgctcgataccaagggtcctgagattcgcactgggtttctgaaggatggaaaggccgtccaaccaaaggagggtcaagaaatcatagtgagcactgattacgatctcaaaggcggcgggaatacaattactatgagttacaagaaacttcctgtggatatgaaacctggaggcacaatcctgtgtgcagatggcagcattagcttaactgtcctatcatgtgacccagatgccggaactgtgagatgccgctgtgagaatactgcacttttaggtgagagaaagaatgtcaatctgccaggtgttgttgtggatctccccacactgacagagaaggacaaggaagacattttggaatggggtgttcccaacaacattgatatgattgctctgtccttcgtgcgcaagggctccgatcttgtcaatgtccgacaggttcttggatctcatgcaaaaaacataaagttgatgtcaaaggttgagaaccaagagggtgtcgtaaacttcgatgaaatcttaaaagagacagatgccttcatggttgcccgtggtgatctgggcatggaaattcccgttgagaagatcttccttgctcagaagctgatgatatacatatgcaaccttgcgggcaagcctgttgtcactgccacccagatgcttgagtctatgataaaatcccctcgcccgacacgtgctgaagccactgatgtcgccaatgccgtcctcgatggcaccgactgcgtcatgcttagtggcgaaagtgcggcgggagcctatctagagatagccgtgaaggtcatggccaagatatgtatcgaggcagagtcatcccttgattatgatgccatcttcaaggagatgataaggtctgcgcctctccccatgagcccactggagagtcttgcgtcctcggctgtccgtactgcgaacaaggccaaggcggctctgattgttgtattgacccgtggtgggactacagccaagctggtagcgaagtaccgcccggcagtgccaatcctgtctgtggtggtgccagtgctgacaagcgattcgttcgactggaatgttagtgacgagtcaccagcaaggcatagcctcatctacagaggcctcatcccgctgctagcggagggttctgcgaaggcgactgatgccgagtcgacagaggtgatcctggaggctgcactcaagtcagcgacggcaaggaggctgtgcaaacctggtgactctattgttgcgctgcatcgcattggtgttgcttctgtcattaaaatttgcatagtgaaatga

SEQ ID NO: 8744 - protein, 510 aa, Lilium longiflorum
MANIDIEGILKELPADGRVPKTKLVCTLGPSSRSVPMLEKLLRAGMNTARFNFSHGTHEYHQETLDNLRIAMQNTQILCAVVLDTKGPEIRTGFLKDGKAVQPKEGQEIIVSTDYDLKGGGNTITMSYKKLPVDMKPGGTILCADGSISLTVLSCDPDAGTVRCRCENTALLGERKNVNLPGVVVDLPTLTEKDKEDILEWGVPNNIDMIALSFVRKGSDLVNVRQVLGSHAKNIKLMSKVENQEGVVNFDEILKETDAFMVARGDLGMEIPVEKIFLAQKLMIYICNLAGKPVVTATQMLESMIKSPRPTRAEATDVANAVLDGTDCVMLSGESAAGAYLEIAVKVMAKICIEAESSLDYDAIFKEMIRSAPLPMSPLESLASSAVRTANKAKAALIVVLTRGGTTAKLVAKYRPAVPILSVVVPVLTSDSFDWNVSDESPARHSLIYRGLIPLLAEGSAKATDAESTEVILEAALKSATARRLCKPGDSIVALHRIGVASVIKICIVK

SEQ ID NO: 8745 - DNA, 1413 bp, Vibrio marinus
  CDS (1)..(1413): transl_table=11
atgaaaaagactaaaattgtttgtacaattggtccaaaaactgaatcagtagagaaactaacagagcttgttaatgcaggcatgaacgttatgcgtttaaatttctctcatggtaactttgctgaacattcagtgcgtattcaaaatatccgtcaagtaagtgaaaacctgaataagaaaattgctgttttactggatactaaaggtccagaaatccgtacgattaaactagaaaacggtgacgatgtaatgttgaccgctggtcagtcattcacgtttacaacagacattaacgtggtaggtaataaagactgtgttgctgtaacatatgctggttttgctaaagaccttaatcctggtgcaatcatccttgttgatgatggtttaattgaaatggaagttgttgcaacaactgacactgaagttaaatgtacagtattaaatactggtgcacttggtgaaaataaaggcgttaacttacctaacatcagtgtaggtctacctgcattgtcagaaaaagataaagctgatttagcgtttggttgtgagcaagaagttgattttgttgctgcatcatttattcgtaaggctgatgatgtaagagaaattcgtgaaatcctatttaataatggtggcgaaaacattcagattatctcgaaaattgaaaaccaagaaggtgtagacaatttcgatgaaatcttagctgaatcagacggtatcatggttgctcgtggcgatctcggtgttgagatcccagttgaagaagtgatcatggcacagaagatgatgatcaaaaaatgtaataaagcaggtaaagttgtaattactgcaacacaaatgcttgattcaatgatcagtaacccacgtccaacacgtgcagaagcgggcgatgttgccaatgctgtgcttgacggtaccgacgcggtaatgctttctggtgaaactgcgaaaggtaaatacccagttgaagctgtgtctatcatggcaaacatctgtgaacgtactgataactcaatgtcttcggatttaggtgcgaacattgttgctaaaagcatgcgcattacagaagctgtgtgtaaaggtgcggtagaaacaacagaaaaattgtgtgctccacttattgttgttgcaactcgtggcggtaaatcagcaaaatctgttcgtaaatacttcccgaaagcaaatattcttgctatcacaacaaatgaaaaagcagcgcaacagttatgcctaactaaaggcgtaagcagctgcatcgttgagcagattgatagcactgatgagttctaccgtaaaggtaaagagcttgcattagcaactggtttagctaaagaaggcgatatcgttgttatggtatcaggtgcgttagtaccatcaggtacaacgaatacggcatctgttcaccaactttaa

SEQ ID NO: 8746 - protein, 470 aa, Vibrio marinus
MKKTKIVCTIGPKTESVEKLTELVNAGMNVMRLNFSHGNFAEHSVRIQNIRQVSENLNKKIAVLLDTKGPEIRTIKLENGDDVMLTAGQSFTFTTDINVVGNKDCVAVTYAGFAKDLNPGAIILVDDGLIEMEVVATTDTEVKCTVLNTGALGENKGVNLPNISVGLPALSEKDKADLAFGCEQEVDFVAASFIRKADDVREIREILFNNGGENIQIISKIENQEGVDNFDEILAESDGIMVARGDLGVEIPVEEVIMAQKMMIKKCNKAGKVVITATQMLDSMISNPRPTRAEAGDVANAVLDGTDAVMLSGETAKGKYPVEAVSIMANICERTDNSMSSDLGANIVAKSMRITEAVCKGAVETTEKLCAPLIVVATRGGKSAKSVRKYFPKANILAITTNEKAAQQLCLTKGVSSCIVEQIDSTDEFYRKGKELALATGLAKEGDIVVMVSGALVPSGTTNTASVHQL

SEQ ID NO: 8747 - DNA, 1752 bp, Ricinus communis
  CDS (1)..(1752)
atgtcacagtctctccatttctcaccgaacctcactttcgccaaacaacctttccctaagctccctctcccattcccaacctccaattcccggtatccagtcaataattataaatcactctcaatcaaagcgtccacgtcgccgtcatcatcatcagatcctcaagttttagttgcggataacggaacagggaacagcggcgttttgtataataataacaacaaatcagttacagtttctgatccgagctcaattgaagttgacgccgtgacggagacggagttaaaagagaatggattcaggagtacacgtaggacaaagctagtgtgtacgataggaccagcgacttgtggatttgaagagctggaagcgttagcagtaggaggaatgaatgtagcgagaattaatatgtgtcatggaacacgtgagtggcacaagagtgtaattgaacgtgttaggagattgaatgaagagaaaggttttgctgttgctattatgatggatactgaaggtagtgaaattcatatgggtgatttaggtggtgcttcttctgctaaagctgaggatggtgaaatctggacttttagtgtcagagcctatgattctcctcgcccagagcgcaccatcaatgttaactatgacggttttgctgaggatgtgaaagttggggatgagctacttgtggatggtggaatggttaggtttgaggtgattgagaaaattggcccagatgtcaagtgccgatgtactgatcctggactgttattaccacgagctaatttgactttctggagggatgggagtcttgttagagaacgtaatgcaatgcttccaacaatttcctctaaggattggttagatattgactttggtatcgcagagggtgttgattttattgcaatatcttttgtcaagtctgctgaagtgattaatcatcttaaaagctacattgctgcaaggtctcgtgacagtgatatagctgtcattgctaagatagagagtattgactcattgaagaacttagaagagatcattcgagcatcagatggagctatggtagcaagaggagatctgggtgctcagataccattggaacaggttccatcagcccagcaaaacattgttcaggtctgcaggcagctaaataagccagtcattgttgcttctcagttacttgaatcaatgattgaataccctacacccaccagagcagaagtggctgatgtttctgaagctgttaggcaacgggctgatgctttgatgctctctggtgagtcagccatgggccagtaccccgagaaggcattggctgttctcagaagtgtcagtgtgagaattgagaagtggtggagagaagagaagcaccatgaagcaatggaactcccagcaattggatccacttattccgactctatttcagaggagatttgcaactctgctgccaagatggcgaacaacttgggggtggatgcactttttgtgtatacaaaagatggtcacatggcatctctcttgtctcgttgccggcctgactgcccaatctttgcttttacaactaccacatctgtacggagacgcctgaatttacagtggggcctgatacccttccgcctgagctttgctgatgatatggaaagcaaccttaacaaaaccttctctttgctcaaggctagaggaatgatcaaatcgggtgatcttgttatagctgtttcagacatgttacagtccatccaagttatgaatgttccttag

SEQ ID NO: 8748 - protein, 583 aa, Ricinus communis
MSQSLHFSPNLTFAKQPFPKLPLPFPTSNSRYPVNNYKSLSIKASTSPSSSSDPQVLVADNGTGNSGVLYNNNNKSVTVSDPSSIEVDAVTETELKENGFRSTRRTKLVCTIGPATCGFEELEALAVGGMNVARINMCHGTREWHKSVIERVRRLNEEKGFAVAIMMDTEGSEIHMGDLGGASSAKAEDGEIWTFSVRAYDSPRPERTINVNYDGFAEDVKVGDELLVDGGMVRFEVIEKIGPDVKCRCTDPGLLLPRANLTFWRDGSLVRERNAMLPTISSKDWLDIDFGIAEGVDFIAISFVKSAEVINHLKSYIAARSRDSDIAVIAKIESIDSLKNLEEIIRASDGAMVARGDLGAQIPLEQVPSAQQNIVQVCRQLNKPVIVASQLLESMIEYPTPTRAEVADVSEAVRQRADALMLSGESAMGQYPEKALAVLRSVSVRIEKWWREEKHHEAMELPAIGSTYSDSISEEICNSAAKMANNLGVDALFVYTKDGHMASLLSRCRPDCPIFAFTTTTSVRRRLNLQWGLIPFRLSFADDMESNLNKTFSLLKARGMIKSGDLVIAVSDMLQSIQVMNVP

SEQ ID NO: 8749 - DNA, 1782 bp, Nicotiana tabacum
  CDS (1)..(1782)
atgtcgcaagctcttaacttcttcgtttcctcgtcttcacgttctccggcgactttcacaatctcaaggccgtcggttttcccgtcaaccggtagtttacggttactggtgaagaaatcgttgcggacgttagttgtggaagcgtcgtcggcggcggcgtcagatctcgacgagccgcagtcgtccccggtgttagtatcggagaatggttcaggaggggtattatcgagtgcgacgcaggagtacggtcgtaatgctgcaccggggaccgattcgagttcgattgaagtggatacagtaacggaggcggagttaaaggagaacgggtttaggagtacacgtagaacaaagttgatttgcacgattggacctgccacgtgtgggtttgagcagctggaacgattagctgagggaggaatgaatgtagctaggataaatatgtgccatggaacacgcgagtggcatcgtatggtgattgagagactgaggaggttgaatgaggagaaagggtttgctgtagctatcatgatggatactgaaggtagtgaaattcatatgggagatcttggtggcgcttcttctgctaaagctgaggatggtgaaatttggaatttcactgttcgttcatttgatccaccactcccagaacgcaccgttactgttaactatgatggctttgctgaagatgtgaaagtgggtgatgagctactagtagatggtggaatggtgagatttgaagtgattgagaaaattggcccagatgttaagtgtctttgcacagatcctggacttcttctacctcgggctaatctgacattttggcgggatggtaaactagtaagggaacgcaatgccatgcttccaacaatttcctcaaaggattggctagacatagactttggtattgctgagggtgttgattttattgctgtatcatttgtcaagtctgctgaagtcattaagcatcttaagagctacattcaagcccgggctcgggatagtgatatttctgtaattgcaaaaatagagagcattgactcattgaagaacttagaagagataatccaggcatcagatggtgctatggtcgcgagaggagatcttggtgctcaaattccattagaacaggttccatcagagcagcaaaagattgttcagatatgcaggcagctgaataggcctgttatagtagcctcccagctgctggaatctatgattgaataccctattccaactagagctgaagttgctgatgtttctgaagcagttaggcaaaggggggatgctttgatgctttctggtgagtcggccatgggacagtttcctgagaaggcattgactgtactaagaagtgttagcttgagaattgaaagaatgtggagggaacagaaacgccatgaagttattgaattgccatccatagcatcttcattttcagatagtatttcagaagagatctgcaactctgccgccaagatggcaaacaatttggaagttgatgctctttttgtttacaccaagaatgggcacatggcatctctcttgtcacgctgccgtcctgactgcccaatatttgcatttacaacgacaacatctgtacgcagacgcctgaacctgcaatggggtctaatgcctttccgcttgagtttctccgatgatatggaaagcaacctcaacaagacattctccttactaaaagctcggggcatgatcaagtcaggtgacctcatcattgctgtttccgacatgctgcagtccattcaagttatgaatgttccatga

SEQ ID NO: 8750 - protein, 593 aa, Nicotiana tabacum
MSQALNFFVSSSSRSPATFTISRPSVFPSTGSLRLLVKKSLRTLVVEASSAAASDLDEPQSSPVLVSENGSGGVLSSATQEYGRNAAPGTDSSSIEVDTVTEAELKENGFRSTRRTKLICTIGPATCGFEQLERLAEGGMNVARINMCHGTREWHRMVIERLRRLNEEKGFAVAIMMDTEGSEIHMGDLGGASSAKAEDGEIWNFTVRSFDPPLPERTVTVNYDGFAEDVKVGDELLVDGGMVRFEVIEKIGPDVKCLCTDPGLLLPRANLTFWRDGKLVRERNAMLPTISSKDWLDIDFGIAEGVDFIAVSFVKSAEVIKHLKSYIQARARDSDISVIAKIESIDSLKNLEEIIQASDGAMVARGDLGAQIPLEQVPSEQQKIVQICRQLNRPVIVASQLLESMIEYPIPTRAEVADVSEAVRQRGDALMLSGESAMGQFPEKALTVLRSVSLRIERMWREQKRHEVIELPSIASSFSDSISEEICNSAAKMANNLEVDALFVYTKNGHMASLLSRCRPDCPIFAFTTTTSVRRRLNLQWGLMPFRLSFSDDMESNLNKTFSLLKARGMIKSGDLIIAVSDMLQSIQVMNVP

SEQ ID NO: 8751 - DNA, 1494 bp, Arabidopsis thaliana
  CDS (1)..(1494)
atggctatggaacagaggcctaagacgaagatcgtgtgcacactcgggccggcgtccagatctgtcccaatggtcgagaagcttcttatggcggggatgagcgtggctcgcttcaacttttctcatggatcttacgaatatcaccaggagactctcgacaatcttcgtcaggccatgcttaacactggcatgctatgtgctgtcatgctcgacaccaagggaccagagattcgaaccgggttcttaaaggatgggaaacctatccagctcaaacaaggccaagaaatcaccatttcaactgactatgacttgaagggtgatgagaaaactatttgcatgagctacaagaagttggcgcaagatgtgaatccaggcatggtcatactctgtgccgatggtaccatctcgttaaaggtcctttcttgtgacaaagaaaagggcactgtccgttgtcgttgtgagaacacttcaatgcttggtgaaagaaagaacgttaatctccctggtgttgtggttgatctcccaactctaactgaaaaagacaagcaagacattcttgaatggggagttcccaatcaaatcgacatgattgctctgtcttttgtcagaaaaggttcggacttggtacaagttaggaagctacttggaaaacatgctaaaaccatacttctcatgtcaaaggttgaaaaccaagaaggtgtagcgaattttgatgatatcttgataaactcggatgcgtttatgatcgcaagaggtgaccttggaatggagattccaattgagaagatattcttagctcagaaagtgatgatctacaagtgcaatttcatggggaagccagtggttacagcgactcagatgcttgagtctatgatcaaatccccacgaccaacaagagcagaagctactgatgttgcaaatgctgtcctcgatggcacagactgtgtcatgcttagtggtgaaaccgcagctggagcatacccagagcttgctgttcgtacaatggccaagatatgtgtggaagcagagagcacacttgactatggagacatcttcaagaggataatgcttcacgctgcggtccctatgagcccgatggagtcacttgcttcatctgcggtcagaaccgctacttcctcaagagccactcttatgatggtcttgaccagaggaggcagcacggcgaggctggtggctaagtatagaccagggatacccattttgtccgtggtggttcctgaaatcacgtctgactcttttgattgggcgtgtagcaacgaggcaccggcaagacacagtctcatctaccgtggtttagtcccggtgctgtatgctggatcggctagagcctcgatcgacgagtcaacagaagaaactctcgagttcgcgtcagagtatggtaaaaagaagcaactctgcaagaccggagactctgttgtggctctcttccgtacaggtaacgctattgttatcaagatcttgaccgtcaagtga

SEQ ID NO: 8752 - protein, 497 aa, Arabidopsis thaliana
MAMEQRPKTKIVCTLGPASRSVPMVEKLLMAGMSVARFNFSHGSYEYHQETLDNLRQAMLNTGMLCAVMLDTKGPEIRTGFLKDGKPIQLKQGQEITISTDYDLKGDEKTICMSYKKLAQDVNPGMVILCADGTISLKVLSCDKEKGTVRCRCENTSMLGERKNVNLPGVVVDLPTLTEKDKQDILEWGVPNQIDMIALSFVRKGSDLVQVRKLLGKHAKTILLMSKVENQEGVANFDDILINSDAFMIARGDLGMEIPIEKIFLAQKVMIYKCNFMGKPVVTATQMLESMIKSPRPTRAEATDVANAVLDGTDCVMLSGETAAGAYPELAVRTMAKICVEAESTLDYGDIFKRIMLHAAVPMSPMESLASSAVRTATSSRATLMMVLTRGGSTARLVAKYRPGIPILSVVVPEITSDSFDWACSNEAPARHSLIYRGLVPVLYAGSARASIDESTEETLEFASEYGKKKQLCKTGDSVVALFRTGNAIVIKILTVK

SEQ ID NO: 8753 - DNA, 1533 bp, Solanum tuberosum
  CDS (1)..(1533)
atggccaacatagacatagctggaatcatgaaggatctcccaaatgatggccgtattccaaagaccaagattgtttgcacgttagggccatcttctagaacagtgccaatgctggagaagcttctccgtgctggcatgaacgttgccaggtttaacttttctcatgggacccatgagtaccatcaggagacattggacaatcttaagattgctatgcagaatactcagatcctgtgtgctgtcatgcttgacaccaaggggcctgagattcgtactggtttcttaacagatggaaaaccgattcagcttaaggaaggtcaagaaatcactgtatccacagactataccataaaaggaaatgaagaaatgatctcaatgagctataagaagttggtaatggacttgaagcccggcaataccattttgtgtgcagatggtaccataacccttactgttttgtcatgtgatccaccgtctggaacggtgagatgtcgctgcgagaatactgccaccttaggagagaggaagaatgtaaaccttccaggtgtggttgtggaccttccaacacttacagagaaggataaagaagatatactagagtggggtgttcctaacaacattgatatgatagcgctttcgtttgtgcgtaagggttcagatcttgtcaatgttcgcaaggttcttggtccacatgccaagcgcattcaactaatgtcaaaggttgaaaaccaagaaggggtaatcaactttgatgaaatccttcgtgagacagattcttttatggttgctcgaggtgatctcggaatggaaattccagttgagaagattttcttggctcagaaaatgatgatatacaagtgtaatcttgctggcaaagctgtggtaactgccactcagatgcttgaatcaatgatcaagtctccagcacccacccgtgctgaggctactgatgtggctaatgctgtcttggatggcactgattgtgttatgttaagtggggagagtgcagctggtgcttatcctgagctggcagtaaaaatcatgtcacgaatctgcattgaggcagagtcttcacttgacaacgaggctatcttcaaggaaatgatcaggtgtaccccactgccaatgagcccattggagagtcttgcatcatcagctgtccgtacggctaacaaagctagagcaaaactcattgttgtcctgacacgtggcgggagtacagcaaagctggttgccaagtataggcctgcagttcctattctgtcagtagtcgtgcctgttttgaccacagactctttcgattggtccatcagcgacgagaccccagctagacacagtttggtatataggggcttgattccacttcttggtgaaggttctgcaaaggccactgattctgaatcaactgaggtaatccttgaagcggccctgaagtctgccgtaacgagagggctatgcaaacctggtgatgctgtcgtggcacttcatcgtattggttctgcatccgttatcaagatttgcgtcgtgaagtaa

SEQ ID NO: 8754 - protein, 510 aa, Solanum tuberosum
MANIDIAGIMKDLPNDGRIPKTKIVCTLGPSSRTVPMLEKLLRAGMNVARFNFSHGTHEYHQETLDNLKIAMQNTQILCAVMLDTKGPEIRTGFLTDGKPIQLKEGQEITVSTDYTIKGNEEMISMSYKKLVMDLKPGNTILCADGTITLTVLSCDPPSGTVRCRCENTATLGERKNVNLPGVVVDLPTLTEKDKEDILEWGVPNNIDMIALSFVRKGSDLVNVRKVLGPHAKRIQLMSKVENQEGVINFDEILRETDSFMVARGDLGMEIPVEKIFLAQKMMIYKCNLAGKAVVTATQMLESMIKSPAPTRAEATDVANAVLDGTDCVMLSGESAAGAYPELAVKIMSRICIEAESSLDNEAIFKEMIRCTPLPMSPLESLASSAVRTANKARAKLIVVLTRGGSTAKLVAKYRPAVPILSVVVPVLTTDSFDWSISDETPARHSLVYRGLIPLLGEGSAKATDSESTEVILEAALKSAVTRGLCKPGDAVVALHRIGSASVIKICVVK

SEQ ID NO: 8755 - DNA, 1536 bp, Glycine max
  CDS (1)..(1536)
atggcgaacatagacatcgaagggatcttgaagcagcagcagccttatgatgggcgcgttccgaagacgaagatagtgtgtactttgggccctgcttctcgatccgtagaaatgaccgagaagcttctgagggcagggatgaacgttgctcgtttcaatttctctcatggcacccacgactatcaccaggaaaccctcaacaatctcaagactgccatgcacaacactggcatactctgtgccgtcatgcttgacactaagggacctgagattcggactggttttctgaaagatggaaaacctattcaacttaaagaagggcaagaagtcaccataactactgattatgacattaagggggatccggagatgatatccatgagttacaagaagctgcctgtccacttgaagcctggaaataccatactgtgctctgacgggacgattactctcactgtcttgtcttgtgaccctgatgctggtactgttagatgtcgttgtgaaaacactgcaacgttgggtgagagaaaaaatgttaaccttcctggtgttgtggtggatctacccacacttactgagaaggataaggaagacattcttggatggggtgtacccaacaagattgacatgattgctctttcatttgttcgtaaaggctcggatcttgttaatgtccgcaaggttctggggccacatgcaaagaatattcagttgatgtcaaaggttgagaatcaggagggagtcctgaattttgacgaaatcctgcgggagactgatgcattcatggtggcacgtggtgatcttggaatggagatcccagtagaaaagattttcctggcacagaagatgatgatatacaagtgtaatcttgttgggaagccagtggtgactgctacccaaatgcttgaatcaatgataaagtctcccaggccaacccgagctgaagcaactgatgtagctaatgcagttcttgatggaacagattgtgtgatgcttagtggtgaaagtgctgctggggcatacccagaacttgctgtgaaaatcatggctcgcatttgcattgaagcagaatcatcccttgactatggtgccatcttcaaagagatgataaggtctaccccattgcctatgagtccattggagagccttgcatcatctgctgtccgcacagcaaacaaggccaaagcaaaactcattgttgtgctgacacgtggcgggtctacagccaagttagttgccaagtataggccagcggttccaatattgtcggtggtggttccagtgttgagcacggactcatttgattggacctgcagtgatgagacgccagcaaggcacagcctgatatacaggggcttgattcctatactgggcgagggatctgcaaaggctaccgatgcagaatccacagaggtcattctcgaagctgctcttaagtccgcaacagaaagggccctttgtaagcctggtgatgcagttgttgccctgcatcgtattggagctgcctctgtcataaagatctgcatagtcaaataa

SEQ ID NO: 8756 - protein, 511 aa, Glycine max
MANIDIEGILKQQQPYDGRVPKTKIVCTLGPASRSVEMTEKLLRAGMNVARFNFSHGTHDYHQETLNNLKTAMHNTGILCAVMLDTKGPEIRTGFLKDGKPIQLKEGQEVTITTDYDIKGDPEMISMSYKKLPVHLKPGNTILCSDGTITLTVLSCDPDAGTVRCRCENTATLGERKNVNLPGVVVDLPTLTEKDKEDILGWGVPNKIDMIALSFVRKGSDLVNVRKVLGPHAKNIQLMSKVENQEGVLNFDEILRETDAFMVARGDLGMEIPVEKIFLAQKMMIYKCNLVGKPVVTATQMLESMIKSPRPTRAEATDVANAVLDGTDCVMLSGESAAGAYPELAVKIMARICIEAESSLDYGAIFKEMIRSTPLPMSPLESLASSAVRTANKAKAKLIVVLTRGGSTAKLVAKYRPAVPILSVVVPVLSTDSFDWTCSDETPARHSLIYRGLIPILGEGSAKATDAESTEVILEAALKSATERALCKPGDAVVALHRIGAASVIKICIVK

SEQ ID NO: 8757 - DNA, 1847 bp, Nicotiana tabacum
  CDS (45)..(1571)
gttgctgtcgcttttcgtttgaaaaaaaactaaaattctctgctatggcgattgagaataacaacaatggagtgaatttttgtacggtgaagaggccgaagacgaagatagtatgtactttggggccagcatctcgatcggtgccgatgatcgagaagcttctacgggcaggcatgaacgtggcccgattcaacttttctcatggatctcacgactatcatcaggagactattgacaatctccgtcaagctatggagagtaccggtattctctgtgccgttatgcttgacaccaagggtccagaaattcgaacagggtttttaaaagatgctaagcctgttcaacttaaacagggtcaggagatcacaatctcaactgattacagcattaaaggtgatgagagtatgatatgcatgagctacaaaaagttagcagaggacgtaaagccacaaagtgtgatcctctgtgcagatggccaaatcacctttacagttttgtcttgtgacaaagagaacggtttggatcgatgccgctgtgagaacactgctgttcttggtgaaagaaagaatgtcaatctcccgggagtaattgtggatctgccaacattgacagataaagacaaggatgacattttaaactggggagttccgaatcatattgacatgattgcgttatcttttgttcgtaagggttcagatctcgtggaggttcggaagctgctaggtgaacatgcaaagaacattcttctgatgtctaaggttgaaaaccaggaaggtgtagcgaattttgatgacattcttctcaactctgatgcatttatggtggcaagaggtgacctgggaatggaaattccaattgagaagatatttttggctcaaaaggtaatgatttacaagtgcaacatccaagggaagcctgttgtcacagcaacacagatgttggagtccatgatcaaatctccaaggccaactcgtgcagaagcaacagatgttgccaatgctgttcttgatggcacagactgtgtcatgcttagtggtgaaacagctgctggagcttaccctgatcttgcagtgggtaccatggctaagatttgtattgaagcagaaagcacaattgattatccagatgttttcaaaagaattatgtcaaatgccccagttcccatgagcccattggagagccttgcatcttctgctgttcgaaccgctaactctgcaaaagctgctcttatcctagtgttaaccaggggaggaagtactgcaaaattggtggccaagtacagacctggaatgcctatattgtcggtggttgtccccgagatcaaaactgattcttttgattggacttgcagtgacgagtctccagcaaggcatagccttatattcaggggattggttcccgttctccatgcaggatctgctagggcttctcatgaagagtctacagaagaagcactggactttgctcttcaacatgccaaaacaaaagggttatgcaagcaaggagactccgttgtagccctacaccgtgttggaactgcatctgtgatcaagattgttacagtcaagtgatagatgaactttgacgcgtgctttttgggtttctgttgttgcaaaagggtaactgataaatgtttttgcttgtttcactgaatcattttctgccttctagagaaggaacttatgactataccttatattatgtctctatataacgcctggctgttttttgctttggctggagtttcatacccttttatctttttatgcaatttgtctacagacacagatatgatgcgaaataaattccttgtgccttcaatttatctgtctaaaaaaaaaaaaaaa

SEQ ID NO: 8758 - protein, 508 aa, Nicotiana tabacum
MAIENNNNGVNFCTVKRPKTKIVCTLGPASRSVPMIEKLLRAGMNVARFNFSHGSHDYHQETIDNLRQAMESTGILCAVMLDTKGPEIRTGFLKDAKPVQLKQGQEITISTDYSIKGDESMICMSYKKLAEDVKPQSVILCADGQITFTVLSCDKENGLDRCRCENTAVLGERKNVNLPGVIVDLPTLTDKDKDDILNWGVPNHIDMIALSFVRKGSDLVEVRKLLGEHAKNILLMSKVENQEGVANFDDILLNSDAFMVARGDLGMEIPIEKIFLAQKVMIYKCNIQGKPVVTATQMLESMIKSPRPTRAEATDVANAVLDGTDCVMLSGETAAGAYPDLAVGTMAKICIEAESTIDYPDVFKRIMSNAPVPMSPLESLASSAVRTANSAKAALILVLTRGGSTAKLVAKYRPGMPILSVVVPEIKTDSFDWTCSDESPARHSLIFRGLVPVLHAGSARASHEESTEEALDFALQHAKTKGLCKQGDSVVALHRVGTASVIKIVTVK

SEQ ID NO: 8759 - DNA, 1689 bp, Nicotiana tabacum
  CDS (1)..(1689)
atggccacaatgaatctacctacaggactacatgtcgcggctaaaccggcgtcattggatcggctttcctcggccaagaacgtcggtgatttgttcttctccgattctcgtcacaggaaacgagtgaatacttcgaatcaaatcatggccgttcaatcacttgagcatattcatggcgttaataacaatgtttatgccaattatgttaatttcaatgtaccctcttccggttacagtctggggcaagaaagtgtgtatctgaattctccaagaaaaaccaagatagtttgcaccattggtccctccacaagctcacgggagatgatctggaaattggcagaggctggaatgaacgtggcccgtctgaatatgtcacatggggaccacgcatcgcatcagagaacgattgaccttgttaaagaatacaatgctcaatttgaggacaaggttattgcaataatgttggacactaagggacctgaggtaataagtggagatgtgcccaaaccaattctccttaaggagggtcaagaattcaactttagcattaaaagaggagtcagcacagaagacaccgttagtgtaaattatgatgatttcataaatgatgtggaggccggagacatactactcgttgatggtgggatgatgtcattagctgtgaaatcgaaaaccagcgatatagtgaaatgtgaagttattgatggaggagaactgaaatcgagacggcatctaaatgtaagaggaaaaagtgccaccctgccttcaataacagaaaaagactgggatgatattaagtttggtgtgaacaatcaagtcgacttctatgccgtttcttttgtgaaggatgctaaggtggtccatgaattgaaagattacctgaaaagctgtaatgcagatattcatgttattgtaaagattgaaagtgcagactccattccaaatctccactcgatcatttccgcttccgatggggcaatggtggcccgtggtgatcttggagctgaacttccaattgaggaagtgccgttgcttcaggaagacattattagaaggtgtcagagcatgcaaaaacctgtaatagtagcaacgaacatgctcgaaagcatgattgatcacccaaccccaacaagggcagaagtttcagacatttccattgcagtacgtgaaggcgctgatgctgtaatgctttcaggcgaaaccgctcatgggaagtatccactgaaggcagttaaggtgatgcatattgtggcattaaggaccgagtctagcctacaaaaaagcactagttctcctagtcaatctgccgcctataagagccatatgggtgaaatgtttgccttccactcttcctcaatggctaatacccttagcactcccatcattgtcttcacaagaactgggtccatggcaataattttaagtcataatcggccttcatcaacagtttttgccttcacaaacaatgaaagggtgaagcagcgtctggctctgtatcatggtgtcgtgcctatatatatggagttttcaagtgacgcagaggagaccttttctcgagctatcaagcttttgttgagcaaaagcttggtgaaggatgggcaatatgtaactctcgtccaaagtggagcccaaccaatctggcgtagacattctactcaccacatacaagtccgtaaggtccaaagttga

SEQ ID NO: 8760 - protein, 562 aa, Nicotiana tabacum
MATMNLPTGLHVAAKPASLDRLSSAKNVGDLFFSDSRHRKRVNTSNQIMAVQSLEHIHGVNNNVYANYVNFNVPSSGYSLGQESVYLNSPRKTKIVCTIGPSTSSREMIWKLAEAGMNVARLNMSHGDHASHQRTIDLVKEYNAQFEDKVIAIMLDTKGPEVISGDVPKPILLKEGQEFNFSIKRGVSTEDTVSVNYDDFINDVEAGDILLVDGGMMSLAVKSKTSDIVKCEVIDGGELKSRRHLNVRGKSATLPSITEKDWDDIKFGVNNQVDFYAVSFVKDAKVVHELKDYLKSCNADIHVIVKIESADSIPNLHSIISASDGAMVARGDLGAELPIEEVPLLQEDIIRRCQSMQKPVIVATNMLESMIDHPTPTRAEVSDISIAVREGADAVMLSGETAHGKYPLKAVKVMHIVALRTESSLQKSTSSPSQSAAYKSHMGEMFAFHSSSMANTLSTPIIVFTRTGSMAIILSHNRPSSTVFAFTNNERVKQRLALYHGVVPIYMEFSSDAEETFSRAIKLLLSKSLVKDGQYVTLVQSGAQPIWRRHSTHHIQVRKVQS

SEQ ID NO: 8761 - DNA, 1425 bp, Agrobacterium vitis
  CDS (1)..(1425): transl_table=11
atgttcattcgcagcaaccgccgcgccaagatcgtcgcaacagtcggccctgcctcaagttcaccggcaatactgaggtcgctgttcctggcaggcgtcgatacgttccggctcaatttcagccatggaagccgcgacgaccatgccgccgcctaccgccacatccgcgcgctggaaaaggagctgggaacctcgatcggcatccttcaggacctgcagggcccgaagatccgcatcggcgtgcttcacgaaggccggctgcagctgacgaaggacgcggaaatccgcttcgtgtgcgggaccgaaccagggcgcgggctgatggacattccccttccccatcgcgagatcttcgcggcagtcaagccgggcgacgatctgctgatcgacgatggacgggtgcgagtgcgggcgctgggcgtcagcgacgaattcatcgatgcaaaagtcatcgtcgctggaccgatatccaaccgcaagggtgtcaacctgccgggaaccgtcctcgatatttcccctctcaccccgaaggatcgcaaggatctcgaattcgggctggaactcggcgtcgactggatcgccctatcattcgtgcagactgcccgcgacatgatcgaagcccgatcgctggtcagcgacagggccgggctgatcgccaagatcgaaaaaccctcggcactggacgagatcgacgacatcgtagcgctttccgacgccatcatggtggcgcgcggcgatcttggtgtggaaatcccgcccgaggatgtgccgggccgtcagaaggaactcatccgcgcctgccgtatcgccgccaaaccggtgatcgtcgccacgcagatgctcgactcgatggtgacctcgccgacgccgacgcgcgcagaagcctcggacgtggcgggagcgatctatgacggcgccgacgccgtgatgctctcggcggagtctgcaacgggcgccttcccggtcgaaacggtggagatcatgagccgtatcatcgaaaagaccgaaaaacataaattctaccggccgatcctcgaagcgaccgaaccacagattgcccatacccctccgcacgcagtcgccaccgccgcggcagatgtcgcccttgccctgaaggcccctgttatcgtcgcgtttacggtcagcggcacgaccgcttccagaatcagccgggcacggccaccgctcccgatcctcgccctgacgccatccgaacagaccgcgcgtcagctcggactgatgtggggcgtcgtcagcctgctttcgccgacagtcgacacctatgaacaatccgtcgatcgcgccacccaggccgccgtacaaaccggcctggcggagaaaagcgatcagatcgtcgtggtgacgggatttccctttgcgaccgcgggcagcaccaacaaccttcgcgtcacccaggcgggttga

SEQ ID NO: 8762 - protein, 474 aa, Agrobacterium vitis
MFIRSNRRAKIVATVGPASSSPAILRSLFLAGVDTFRLNFSHGSRDDHAAAYRHIRALEKELGTSIGILQDLQGPKIRIGVLHEGRLQLTKDAEIRFVCGTEPGRGLMDIPLPHREIFAAVKPGDDLLIDDGRVRVRALGVSDEFIDAKVIVAGPISNRKGVNLPGTVLDISPLTPKDRKDLEFGLELGVDWIALSFVQTARDMIEARSLVSDRAGLIAKIEKPSALDEIDDIVALSDAIMVARGDLGVEIPPEDVPGRQKELIRACRIAAKPVIVATQMLDSMVTSPTPTRAEASDVAGAIYDGADAVMLSAESATGAFPVETVEIMSRIIEKTEKHKFYRPILEATEPQIAHTPPHAVATAAADVALALKAPVIVAFTVSGTTASRISRARPPLPILALTPSEQTARQLGLMWGVVSLLSPTVDTYEQSVDRATQAAVQTGLAEKSDQIVVVTGFPFATAGSTNNLRVTQAG

SEQ ID NO: 8763 - DNA, 1506 bp, Candida glabrata
  CDS (1)..(1506)
atggactctagattggctagattgactaccttgcaaacctctgccggtgaggaattgagaagaacctctatcatcggtaccattggtccaaagaccaacaacccagaaaccttggttgctctaagaaaggctggtttgaacattgtccgtatgaacttctcccacggttcttacgaataccacaagtctgtcattgacaatgccagaaagtccgaagagctatacccaggtagaccattggctatcgctttggacaccaagggtccagaaatcagaactggtaccaccactaacgaagtcgactacccaatcccaccaaaccacgaaatgatcttcaccaccgatgacaagtacgctaaggcttgtgacgacaagatcatgtacttggactacaagaacatcaccaaggtcatctccgctggtagaatcatctacgtcgatgacggtgttttgtctttcgaagtcttgcaagtcgttgacgacaagaccttgaaggtcaagtccttgaacgctggtaagatctgctcccacaagggtgttaacttgccaggtaccgatgtcgacttgccagctttgtctgaaaaggacaaggctgacttgagattcggtgttgaaaacggtgtccacatgatcttcgcttctttcatcagaaccgctcaagatgttttgaccatcagagaagttttgggtgaagacggtaaggacatcaagatcgtcgtcaagattgaaaaccaacaaggtgttaacaacttcgacgaaatcttgaaggtcactgacgctgtcatggttgccagaggtgacttgggtatcgaaatcccagccccagaagtcttggctgtccaaaagaagttgatcgctaagtctaacttggccggtaagccagttatctgtgctacccaaatgttggaatctatgacctacaacccaagaccaaccagagctgaagtttccgatgtcggtaacgctgttttggacggtgctgactgtgtcatgttgtccggtgaaaccgctaagggtaactacccaattaacgctgttaccactatggctgaaactgctttgatcgctgaacaagctattgcttacttgccaaactacgatgacatcagaaactgcactccaaagccaacttctaccactgaaactgttgctgcttccgccgtcgctgctgtcttcgaacaaaaggctaaggctatcatcgttttgtctacctctggtaccaccgctagattggtttccaagtacagaccaaactgcccaatcatcttggtcaccagaaacgccagaactgctagattctctcacttgtacagaggtgttttcccattcgtttacgagaaggaatctgtctctgactggactgaagatgttgaagctagattgaacttcggtatcgaacaagctatcgaattcggtatcttgaagaagggtgacacttacgtttccatccaaggtttcaaggctggtgtcggtcactccaacactttgcaagtctccactgcttaa

SEQ ID NO: 8764 - protein, 501 aa, Candida glabrata
MDSRLARLTTLQTSAGEELRRTSIIGTIGPKTNNPETLVALRKAGLNIVRMNFSHGSYEYHKSVIDNARKSEELYPGRPLAIALDTKGPEIRTGTTTNEVDYPIPPNHEMIFTTDDKYAKACDDKIMYLDYKNITKVISAGRIIYVDDGVLSFEVLQVVDDKTLKVKSLNAGKICSHKGVNLPGTDVDLPALSEKDKADLRFGVENGVHMIFASFIRTAQDVLTIREVLGEDGKDIKIVVKIENQQGVNNFDEILKVTDAVMVARGDLGIEIPAPEVLAVQKKLIAKSNLAGKPVICATQMLESMTYNPRPTRAEVSDVGNAVLDGADCVMLSGETAKGNYPINAVTTMAETALIAEQAIAYLPNYDDIRNCTPKPTSTTETVAASAVAAVFEQKAKAIIVLSTSGTTARLVSKYRPNCPIILVTRNARTARFSHLYRGVFPFVYEKESVSDWTEDVEARLNFGIEQAIEFGILKKGDTYVSIQGFKAGVGHSNTLQVSTA

SEQ ID NO: 8765 - DNA, 1413 bp, Escherichia coli O157
  CDS (1)..(1413): transl_table=11
atgaaaaagaccaaaattgtttgcaccatcggaccgaaaaccgaatctgaagagatgttagctaaaatgctggacgctggcatgaacgttatgcgtctgaacttctctcatggtgactatgcagaacacggtcagcgcattcagaatctgcgcaacgtgatgagcaaaactggtaaaaccgccgctatcctgcttgataccaaaggtccggaaatccgcaccatgaaactggaaggcggtaacgacgtttctctgaaagctggtcagacctttactttcactactgataaatctgttatcggcaacagcgaaatggttgcggtaacgtatgaaggtttcacaactgacctgtctgttggcaacaccgtactggttgacgatggtctgatcggtatggaagttactgccattgaaggtaacaaagttatctgtaaagtgctgaacaacggcgacctgggtgaaaacaaaggtgtgaacctgcctggcgtttccattgccctgccagcactggctgaaaaagacaaacaggacctgatctttggttgcgaacaaggcgtagactttgtcgctgcttcctttattcgtaagcgttctgacgttatcgaaatccgtgagcacctgaaagcgcacggcggcgaaaacatccacatcatctccaaaatcgaaaaccaggaaggcctcaacaacttcgacgaaatcctcgaagcctctgacggcatcatggttgcgcgtggcgacctgggtgtagaaatcccggtagaagaagttatcttcgcccagaagatgatgatcgaaaaatgtatccgtgcacgtaaagtcgttatcactgcgacccagatgctggattccatgatcaaaaacccacgcccgactcgcgcagaagccggtgacgttgcaaacgccatcctcgacggtactgacgcagtgatgctgtctggtgaatccgcaaaaggtaaatacccgctggaagcggtttctatcatggcgaccatctgcgaacgtaccgaccgcgtgatgaacagccgtctcgagttcaacaatgacaaccgtaaactgcgcattaccgaagcggtatgccgtggtgccgttgaaactgctgaaaaactggatgctccgctgatcgtggttgctacccagggcggtaaatctgctcgcgcagtacgtaaatacttcccggatgccaccatcctggcactgaccaccaacgaaaaaacggctcatcagttggtactgagcaaaggcgttgtgccgcagctggttaaagagatcacttctactgatgatttctaccgtctgggtaaagaactggctctgcagagcggtctggcacacaaaggtgacgttgtagttatggtttctggtgcactggtaccgagcggcactactaacaccgcatctgttcacgtcctgtaa

SEQ ID NO: 8766 - protein, 470 aa, Escherichia coli O157
MKKTKIVCTIGPKTESEEMLAKMLDAGMNVMRLNFSHGDYAEHGQRIQNLRNVMSKTGKTAAILLDTKGPEIRTMKLEGGNDVSLKAGQTFTFTTDKSVIGNSEMVAVTYEGFTTDLSVGNTVLVDDGLIGMEVTAIEGNKVICKVLNNGDLGENKGVNLPGVSIALPALAEKDKQDLIFGCEQGVDFVAASFIRKRSDVIEIREHLKAHGGENIHIISKIENQEGLNNFDEILEASDGIMVARGDLGVEIPVEEVIFAQKMMIEKCIRARKVVITATQMLDSMIKNPRPTRAEAGDVANAILDGTDAVMLSGESAKGKYPLEAVSIMATICERTDRVMNSRLEFNNDNRKLRITEAVCRGAVETAEKLDAPLIVVATQGGKSARAVRKYFPDATILALTTNEKTAHQLVLSKGVVPQLVKEITSTDDFYRLGKELALQSGLAHKGDVVVMVSGALVPSGTTNTASVHVL

SEQ ID NO: 8767 - DNA, 1413 bp, Salmonella typhimurium
  CDS (1)..(1413): transl_table=11
atgaaaaagacgaaaattgtttgtactatcggtccgaaaaccgaatccgaagagatgttaagcaaaatgctggacgcgggcatgaacgtgatgcgtctgaacttctctcatggcgattatgcagaacacggtcagcgtatccagaatttgcgcaacgtgatgagcaaaactggtaaaaaagccgctattctgcttgatactaaaggaccagaaatccgcaccattaaactggaaggcggtaacgacgtttcgctgaaagcgggccaaacctttacttttaccaccgacaaatccgtggtcggtaataatgaaatcgttgccgtcacctatgaaggctttaccagcgacctgagcgttggcaacaccgtcctggttgacgatggtctgatcggtatggaagtgaccgccatcgaaggcaataaagtcatttgtaaggtgctgaacaacggcgatctgggcgagaacaaaggcgttaacctgccgggcgtttctattgctctgccggcgctggctgaaaaagacaaacaggacctgatcttcggttgcgaacagggcgttgactttgttgcggcgtcctttatccgtaaacgttctgacgttgtcgaaattcgcgagcatctgaaagctcacggcggcgaaaatatccagattatctctaagatcgaaaaccaggaaggcctgaacaacttcgatgaaattctcgaagcttccgacggcatcatggttgcgcgtggcgacctgggcgtagaaatcccggttgaagaagtgatttttgcgcagaaaatgatgatcgaaaaatgtatccgcgcacgtaaagtcgtgatcaccgcgactcagatgctggattctatgatcaaaaacccgcgtccgacccgcgcagaagcaggcgacgttgcgaacgccatcctcgacggtacggatgcggttatgctgtccggcgaatccgcaaaagggaaatacccgctggaagccgtttctatcatggcgaccatctgcgaacgtaccgaccgcgtcatgaacagccgtctggactacaacaacgacagccgtaaactgcgcattacggaagcagtatgccgcggcgcggtagaaaccgccgaaaaactggaagcgccgctgatcgtggtagcgacccagggcggtaaatccgctcgcgccgtgcgtaaatacttcccggacgccaccatcctggcattgaccaccaatgaagtgaccgcccgtcagttagtactgagcaaaggcgtggtatcgcagctggtgaaagaaatcaattctactgatgatttctaccgtctgggcaaagatgtcgccctgcaaagcggcctcgcccagaaaggcgacgtcgtagtgatggtctccggcgcgctggttccaagcggcaccactaacaccgcctctgttcacgtactgtaa

SEQ ID NO: 8768 - protein, 470 aa, Salmonella typhimurium
MKKTKIVCTIGPKTESEEMLSKMLDAGMNVMRLNFSHGDYAEHGQRIQNLRNVMSKTGKKAAILLDTKGPEIRTIKLEGGNDVSLKAGQTFTFTTDKSVVGNNEIVAVTYEGFTSDLSVGNTVLVDDGLIGMEVTAIEGNKVICKVLNNGDLGENKGVNLPGVSIALPALAEKDKQDLIFGCEQGVDFVAASFIRKRSDVVEIREHLKAHGGENIQIISKIENQEGLNNFDEILEASDGIMVARGDLGVEIPVEEVIFAQKMMIEKCIRARKVVITATQMLDSMIKNPRPTRAEAGDVANAILDGTDAVMLSGESAKGKYPLEAVSIMATICERTDRVMNSRLDYNNDSRKLRITEAVCRGAVETAEKLEAPLIVVATQGGKSARAVRKYFPDATILALTTNEVTARQLVLSKGVVSQLVKEINSTDDFYRLGKDVALQSGLAQKGDVVVMVSGALVPSGTTNTASVHVL

SEQ ID NO: 8769 - DNA, 1503 bp, Saccharomyces cerevisiae
  CDS (1)..(1503)
atgtctagattagaaagattgacctcattaaacgttgttgctggttctgacttgagaagaacctccatcattggtaccatcggtccaaagaccaacaacccagaaaccttggttgctttgagaaaggctggtttgaacattgtccgtatgaacttctctcacggttcttacgaataccacaagtctgtcattgacaacgccagaaagtccgaagaattgtacccaggtagaccattggccattgctttggacaccaagggtccagaaatcagaactggtaccaccaccaacgatgttgactacccaatcccaccaaaccacgaaatgatcttcaccaccgatgacaagtacgctaaggcttgtgacgacaagatcatgtacgttgactacaagaacatcaccaaggtcatctccgctggtagaatcatctacgttgatgatggtgttttgtctttccaagttttggaagtcgttgacgacaagactttgaaggtcaaggctttgaacgccggtaagatctgttcccacaagggtgtcaacttaccaggtaccgatgtcgatttgccagctttgtctgaaaaggacaaggaagatttgagattcggtgtcaagaacggtgtccacatggtcttcgcttctttcatcagaaccgccaacgatgttttgaccatcagagaagtcttgggtgaacaaggtaaggacgtcaagatcattgtcaagattgaaaaccaacaaggtgttaacaacttcgacgaaatcttgaaggtcactgacggtgttatggttgccagaggtgacttgggtattgaaatcccagccccagaagtcttggctgtccaaaagaaattgattgctaagtctaacttggctggtaagccagttatctgtgctacccaaatgttggaatccatgacttacaacccaagaccaaccagagctgaagtttccgatgtcggtaacgctatcttggatggtgctgactgtgttatgttgtctggtgaaaccgccaagggtaactacccaatcaacgccgttaccactatggctgaaaccgctgtcattgctgaacaagctatcgcttacttgccaaactacgatgacatgagaaactgtactccaaagccaacctccaccaccgaaaccgtcgctgcctccgctgtcgctgctgttttcgaacaaaaggccaaggctatcattgtcttgtccacttccggtaccaccccaagattggtttccaagtacagaccaaactgtccaatcatcttggttaccagatgcccaagagctgctagattctctcacttgtacagaggtgtcttcccattcgttttcgaaaaggaacctgtctctgactggactgatgatgttgaagcccgtatcaacttcggtattgaaaaggctaaggaattcggtatcttgaagaagggtgacacttacgtttccatccaaggtttcaaggccggtgctggtcactccaacactttgcaagtctctaccgtttaa

SEQ ID NO: 8770 - protein, 500 aa, Saccharomyces cerevisiae
MSRLERLTSLNVVAGSDLRRTSIIGTIGPKTNNPETLVALRKAGLNIVRMNFSHGSYEYHKSVIDNARKSEELYPGRPLAIALDTKGPEIRTGTTTNDVDYPIPPNHEMIFTTDDKYAKACDDKIMYVDYKNITKVISAGRIIYVDDGVLSFQVLEVVDDKTLKVKALNAGKICSHKGVNLPGTDVDLPALSEKDKEDLRFGVKNGVHMVFASFIRTANDVLTIREVLGEQGKDVKIIVKIENQQGVNNFDEILKVTDGVMVARGDLGIEIPAPEVLAVQKKLIAKSNLAGKPVICATQMLESMTYNPRPTRAEVSDVGNAILDGADCVMLSGETAKGNYPINAVTTMAETAVIAEQAIAYLPNYDDMRNCTPKPTSTTETVAASAVAAVFEQKAKAIIVLSTSGTTPRLVSKYRPNCPIILVTRCPRAARFSHLYRGVFPFVFEKEPVSDWTDDVEARINFGIEKAKEFGILKKGDTYVSIQGFKAGAGHSNTLQVSTV

SEQ ID NO: 8771 - DNA, 1527 bp, Candida glabrata
  CDS (1)..(1527)
atggactccaggttgcatagattgattaacttagaagtcactccaggtaaggatgtcagaaagactgccattattggtaccattggtcccaagactaacaatgttgacacattagttgctttgagaaaggctggtttgaatattgtccgtatgaacttctctcatggttcttacgaataccaccaatctgtgattgataacgccagaaagtcagaacaggtttatcctggtagaccattggccattgccttggacaccaagggtccagagattagaacaggtaccaatgttgacgatgttgactacccaattccaccaaatcatgagatgatcttcactactgatgataaatatgccaaggcatgtgatgacaagatcatgtatgttgattataagaacatcaccaaagtgattcaaccaggtaaagtcatctatgttgatgacggtgttttgtcttttgaagtcttagaagtcgtcgacgataagaccttgaaggtcaaatccttaaatgcaggtaaaatttcttctcataaaggtgttaacttgccaggaactgatgtcgacttaccagctttatctgaaaaggacaaagaagatttgagattcggtgtcaaaaatggtgttcatatgatctttgcctcttttatcagaactgcacaagatgtcttgactatcagagaagtactgggcgaggaaggtaaagacataaaagtcattgttaagatagaaaaccagcaaggtgtcaataactttgatgagattttggaagtggcccatggtgttatggttgccagaggtgacttgggtatcgaaattccggcaccacaggtcttggccgttcaaaagaaacttatagctaaatgtaacttggctggtaagccagtcatttgtgctactcaaatgctagagtccatgacattcaacccaagaccaaccagagctgaagtttctgatgttggtaacgctatattggatggtgctgattgtgtcatgttgtctggagaaactgctaaaggtaattaccccatcaatgctgtcacaacaatggcagaaactgccattatcgctgaacgagccattgcttatatgccattgtatgatgatttgagaaattgtactccaaaaccaacatcgacaacagagactgttgctgcctcggcagttgcagctgttcaagagcaaggtgccaaacttattttggtactatctacttctggtaacactgcaagattagtctccaagtatagacctcaatgcccaatcgttttggttacaagaaacccaagaactgctagattttctcatttattcagaggtgtgttcccatttgtttatgaaaaagaaccactagatgactggagtgaggatacccacgctcgtttgagatttggtgtcgatatggccaaagaatatggctttgttaagaatggtgatgcagttatttccattcaaggtttcaagggtggtgttggtcactctaatactatgcgtgtttccattgtaggtggagaaaaggaggatatctga

SEQ ID NO: 8772 - protein, 508 aa, Candida glabrata
MDSRLHRLINLEVTPGKDVRKTAIIGTIGPKTNNVDTLVALRKAGLNIVRMNFSHGSYEYHQSVIDNARKSEQVYPGRPLAIALDTKGPEIRTGTNVDDVDYPIPPNHEMIFTTDDKYAKACDDKIMYVDYKNITKVIQPGKVIYVDDGVLSFEVLEVVDDKTLKVKSLNAGKISSHKGVNLPGTDVDLPALSEKDKEDLRFGVKNGVHMIFASFIRTAQDVLTIREVLGEEGKDIKVIVKIENQQGVNNFDEILEVAHGVMVARGDLGIEIPAPQVLAVQKKLIAKCNLAGKPVICATQMLESMTFNPRPTRAEVSDVGNAILDGADCVMLSGETAKGNYPINAVTTMAETAIIAERAIAYMPLYDDLRNCTPKPTSTTETVAASAVAAVQEQGAKLILVLSTSGNTARLVSKYRPQCPIVLVTRNPRTARFSHLFRGVFPFVYEKEPLDDWSEDTHARLRFGVDMAKEYGFVKNGDAVISIQGFKGGVGHSNTMRVSIVGGEKEDI

SEQ ID NO: 8773 - DNA, 1443 bp, Salmonella typhimurium
  CDS (1)..(1443): transl_table=11
atgtccagaaggcttcgcagaaccaaaatcgttaccacgttaggcccggcaactgaccgcgataacaaccttgagaaggttatcgccgcgggcgcaaacgtagtacgtatgaacttctctcacggctcgccggaagatcataaaatgcgtgctgataaagtccgtgagattgccgccaaactggggcgtcatgtggctattttaggcgacctgcaagggccaaaaattcgcgtttccacttttaaagaaggcaaagtgttcctcaacatcggggacaaatttctgttagacgctaacctgggtaaaggcgaaggcgacaaagaaaaagtcggcattgattacaaagggttgccggcagacgtcgttcctggcgatatcctgctgcttgacgatggtcgagtgcagttgaaagtgcttgaagtccagggcatgaaagtctttaccgaggtcaccgtcggcggcccgctgtctaacaataaaggcattaacaagctcggcggcgggctttctgctgaagcgctgaccgaaaaagacaaagccgatattcaaaccgctgcgctgataggtgttgactatctggccgtctccttcccgcgctgcggcgaagatctgaactatgcacgccgcctggcgcgcgacgccggctgcgacgcgaaaattgtggctaaggtcgaacgcgccgaagcggtatgcgaccaaaacgccatggacgatatcattctggcctctgacgttgtgatggtcgcacgtggcgatctgggcgttgaaatcggcgatccggagctggttggtatccagaaagcgctgattcgccgtgcgcgtcagctaaaccgcgcagtcatcaccgcaacgcaaatgatggagtcgatgatcaccaacccgatgccgacccgtgcggaagtgatggacgtggcgaacgccgtcctggatggcacggatgcggttatgctgtctgccgaaaccgcagccggtcagtatccttctgaaaccgttgccgcaatggcgcgcgtctgcctgggcgcagaaaaaatccccagcatcaatgtgtctaaacaccgtctcgacgtgcagttcgacaacgttgaagaagccattgccatgtctgcgatgtatgcggcaaaccatctgaaaggcgttaccgcgatcatcaccatgacggaatccggtcgtaccgcgctaatgacttcccgtatcagctccggcctgccgattttcgccatgtcgcgccatgaacgcacgctgaacctgaccgcgctctatcgcggagtaacgccggtgcattttgatagcgcggctgatggcgttgtcgcggcacatgaagctgttaatctgctgcgcgataaagggtatctggtttccggcgacctggttatcgtgacccagggcgatgtcatgagcaccgtcggttcaaccaataccacgcgtattttgaccgttgagtaa

SEQ ID NO: 8774 - protein, 480 aa, Salmonella typhimurium
MSRRLRRTKIVTTLGPATDRDNNLEKVIAAGANVVRMNFSHGSPEDHKMRADKVREIAAKLGRHVAILGDLQGPKIRVSTFKEGKVFLNIGDKFLLDANLGKGEGDKEKVGIDYKGLPADVVPGDILLLDDGRVQLKVLEVQGMKVFTEVTVGGPLSNNKGINKLGGGLSAEALTEKDKADIQTAALIGVDYLAVSFPRCGEDLNYARRLARDAGCDAKIVAKVERAEAVCDQNAMDDIILASDVVMVARGDLGVEIGDPELVGIQKALIRRARQLNRAVITATQMMESMITNPMPTRAEVMDVANAVLDGTDAVMLSAETAAGQYPSETVAAMARVCLGAEKIPSINVSKHRLDVQFDNVEEAIAMSAMYAANHLKGVTAIITMTESGRTALMTSRISSGLPIFAMSRHERTLNLTALYRGVTPVHFDSAADGVVAAHEAVNLLRDKGYLVSGDLVIVTQGDVMSTVGSTNTTRILTVE

SEQ ID NO: 8775 - DNA, 1521 bp, Saccharomyces cerevisiae
  CDS (1)..(1521)
atgccagagtccagattgcagagactagctaatttgaaaataggaactccgcagcagctcagacgcacctccataataggtaccattgggcccaagacaaatagctgcgaggccattactgctctgagaaaagctggtttgaacatcattcgattgaacttttcccatggctcctacgaattccatcaatcagtaatcgaaaatgctgtgaaatcggaacagcaattccctggcaggccgctcgccattgccctggataccaagggtcccgagatcagaacaggtcgcacgttaaatgaccaagatctttatatccccgtagaccaccaaatgatctttaccactgacgcaagttttgcaaacacctccaatgataaaatcatgtatatagactatgctaacctgacaaaagttatcgttccggggagatttatatacgtggacgacgggattctctcttttaaagtgctccaaatcattgacgaatctaatttaagggtgcaagcggtaaactcgggttatatcgcatctcataaaggtgttaatctgcctaataccgacgttgatttgccccccttgtccgccaaagacatgaaggacttgcaattcggagtccgcaatggcattcacatcgtatttgcctctttcataagaacttcagaagatgtgttgtctatcagaaaagcgttgggttctgaagggcaagatatcaagattatatccaagatagaaaaccagcaagggttggataattttgacgaaatcctggaagtcacggatggtgttatgatagcgagaggcgatttaggaattgaaatcctggcacctgaagtattagccattcaaaaaaagctgattgcaaaatgtaatttggcgggcaaacctgtcatttgcgcgactcagatgctggattcaatgacacacaatccgagaccgacaagggctgaagtatcggatgtgggtaacgctgtgttggatggtgctgattgtgttatgctttctggagaaacggcgaagggtgattatccggtgaatgcagttaatattatggcggcgaccgctctgattgctgaaagtactatcgctcatttggctctttatgacgatctcagagacgccactcccaaacctacttccactacggaaactgtagcagctgcagctaccgcagcaatcttggagcaagatggtaaggccatcgttgtattatctactacagggaacacggcaaggctactgtcgaagtatagaccaagctgccctatcatattagtaacaagacacgcaagaacggcaagaattgcgcatttgtatagaggtgttttcccatttctgtatgaaccgaaacgcctagacgactggggtgaggatgttcataggcgcctaaagtttggtgttgaaatggcgaggtctttcggaatggtggacaacggtgatactgttgtttccattcaaggattcaaaggaggagtcggccattccaataccttacgcatttctactgttggtcaagaattctag

SEQ ID NO: 8776 - protein, 506 aa, Saccharomyces cerevisiae
MPESRLQRLANLKIGTPQQLRRTSIIGTIGPKTNSCEAITALRKAGLNIIRLNFSHGSYEFHQSVIENAVKSEQQFPGRPLAIALDTKGPEIRTGRTLNDQDLYIPVDHQMIFTTDASFANTSNDKIMYIDYANLTKVIVPGRFIYVDDGILSFKVLQIIDESNLRVQAVNSGYIASHKGVNLPNTDVDLPPLSAKDMKDLQFGVRNGIHIVFASFIRTSEDVLSIRKALGSEGQDIKIISKIENQQGLDNFDEILEVTDGVMIARGDLGIEILAPEVLAIQKKLIAKCNLAGKPVICATQMLDSMTHNPRPTRAEVSDVGNAVLDGADCVMLSGETAKGDYPVNAVNIMAATALIAESTIAHLALYDDLRDATPKPTSTTETVAAAATAAILEQDGKAIVVLSTTGNTARLLSKYRPSCPIILVTRHARTARIAHLYRGVFPFLYEPKRLDDWGEDVHRRLKFGVEMARSFGMVDNGDTVVSIQGFKGGVGHSNTLRISTVGQEF

SEQ ID NO: 8777 - DNA, 1506 bp, Ashbya gossypii
  CDS (1)..(1506)
atggaatctagattgggatggctaactcgtttgaactacgacactggttctgcattgagaagaacgtcgatcatcgggacgattggtcctaagaccaacaacccagagacgttggtggagcttagaaaggcgggcttgaacatcgtgagaatgaacttctcgcacggctcgtacgagtaccaccagtcggtgatcgacaacgccagaaagtcggaggagttgtaccctggtagaccattggccattgcgttggacaccaagggtcctgagatcagaactggtaccactgtcgacaacgtcgactacccaatcccacctaaccacgagatgatcttcaccaccgacgaccagtacgccaagtcctgcgacgacaaagtcatgtttgtcgactacaagaacatcacgaaggtgattgagaagggcagagtgatttacgttgacgacggtgttctatcgttcgaggtgttggaggtcgtggacgacaagaccttgaaggtcaagtctttgaacgcagggaagatctgctcccacaagggtgtgaacttgccgggtaccgatgtcgacttgccagctctgtctgagaaggacaagtctgacttgcgcttcggtgtcaagaacggtgtgcacatggtcttcgcttccttcatcagaactgctggagacatcctaactatcagagagatcttgggcgaggatggcaaggacatcaagatcatcgccaagattgagaaccagcagggtgtgaacaacttcgacgagattttgaaggtcaccgacggtgttatggtcgccagaggtgacttgggtatcgagatcccagcgcctcaggtatttgctgtgcaaaagatgttgatcgccaagtgtaacttggctggtaagccagttatctgtgccacccagatgttggagtctatgacctataacccaagaccaaccagagctgaggtttctgacgttggtaacgctgtcctggacggtgctgactgtgttatgttgtctggtgagaccgccaagggtatctacccaatcaacgctgttaagaccatggctgagactgctttgattgctgagcaggccattccatacgttccaacttacgatgacctcagaaacttgactccaaagccaactccaacctccgagaccatcgctgctgctgctgtcgcggctactttcgagcagaaggccaaggccattgtcgtgctatccacctccggtgacaccaccagattggtctccaagtacaagccaaacgttccaatcgttatggtgaccagaaacccaagagcggccagatactgccacttgcacagaggtgtcttcccattcgtctacgaacaggaggcagctgatgagtggaccgatgacgtcgaggccagattgaacttcggtgtggagaagtccaaggagcttggtatcctgagcgagggtgacactattgtcactattcagggtttcgcgtctggtgttggccactctaacaccttgagggtgttgaccgtctaa

SEQ ID NO: 8778 - protein, 501 aa, Ashbya gossypii
MESRLGWLTRLNYDTGSALRRTSIIGTIGPKTNNPETLVELRKAGLNIVRMNFSHGSYEYHQSVIDNARKSEELYPGRPLAIALDTKGPEIRTGTTVDNVDYPIPPNHEMIFTTDDQYAKSCDDKVMFVDYKNITKVIEKGRVIYVDDGVLSFEVLEVVDDKTLKVKSLNAGKICSHKGVNLPGTDVDLPALSEKDKSDLRFGVKNGVHMVFASFIRTAGDILTIREILGEDGKDIKIIAKIENQQGVNNFDEILKVTDGVMVARGDLGIEIPAPQVFAVQKMLIAKCNLAGKPVICATQMLESMTYNPRPTRAEVSDVGNAVLDGADCVMLSGETAKGIYPINAVKTMAETALIAEQAIPYVPTYDDLRNLTPKPTPTSETIAAAAVAATFEQKAKAIVVLSTSGDTTRLVSKYKPNVPIVMVTRNPRAARYCHLHRGVFPFVYEQEAADEWTDDVEARLNFGVEKSKELGILSEGDTIVTIQGFASGVGHSNTLRVLTV

SEQ ID NO: 8779 - DNA, 1581 bp, Aspergillus niger
  CDS (1)..(1581)
atggccgccagctcttccctcgaccacctgagcaaccgcatgaagttggagtggcactccaagctcaacactgagatggtgccctccaagaacttccgccgcacctccatcatcggaaccatcggccccaagaccaactccgtggagaagatcaactctctccgcactgccggtcttaacgttgttcgcatgaacttctcccacggttcttatcagtaccaccaatctgttatcgacaacgcccgcgaggccgccaagacccaggtcggacgtcctctcgccattgctcttgataccaaaggacccgagatccgtaccggaaacacccccgatgataaggatatccctatcaagcagggccacgagctcaacatcaccaccgacgagcaatatgccaccgcctccgacgacaagaacatgtacctcgactacaagaacatcaccaaggtgatctctcctggcaagctcatctatgttgatgacggtatcctttccttcgaggtcctcgaagtcgtagatgacaagaccatccgcgtccggtgcttgaacaacggcaacatctcttcccgcaagggtgttaacttgcccggcactgacgttgacctccccgccctttccgagaaggacattgccgatctcaagttcggtgttaggaacaaggtcgacatggtcttcgcttctttcatccgccgcggtagcgacattcgccacatccgtgaggttctgggtgaggagggcaaggagatccagatcattgccaagattgagaaccagcagggtgtcaacaacttcgacgagatcctcgaagagactgacggtgtcatggttgcccgtggtgaccttggtatcgagatccccgcccccaaggtcttcatcgcccagaagatgatgatcgccaagtgtaacatcaagggtaagcccgtcatctgtgccactcagatgctcgagtccatgacatacaaccctcgtcctactcgtgccgaggtgtccgatgttgccaacgccgtccttgacggtgccgactgtgtcatgctgtcgggagagaccgccaagggtaactaccccaacgaggccgtcaagatgatgtccgagacctgcctgctcgccgaggttgccatcccccacttcaatgtgttcgatgagctccgcaaccttgctcctcgccccaccgacactgtcgagtccatcgccatggctgccgttagcgccagtctggaactcaacgctggtgccattgtcgtcttgactaccagcggtaaaactgctcgctacctttccaagtaccgccccgtctgccccattgtcatggttacccgtaaccccgctgcctcccggtactctcacctgtaccgtggtgtctggcccttcctcttccccgagaagaagcccgacttcaacgtcaaggtctggcaggaggatgttgaccgccgtctcaagtggggtatcaaccacgctcttaagctcggcatcatcaacaagggtgacaacatcgtctgtgtccagggatggcgcggcggtatgggccacaccaacaccgtccgtgtggtccctgctgaggagaaccttggcctggctgagtaa

SEQ ID NO: 8780 - protein, 526 aa, Aspergillus niger
MAASSSLDHLSNRMKLEWHSKLNTEMVPSKNFRRTSIIGTIGPKTNSVEKINSLRTAGLNVVRMNFSHGSYQYHQSVIDNAREAAKTQVGRPLAIALDTKGPEIRTGNTPDDKDIPIKQGHELNITTDEQYATASDDKNMYLDYKNITKVISPGKLIYVDDGILSFEVLEVVDDKTIRVRCLNNGNISSRKGVNLPGTDVDLPALSEKDIADLKFGVRNKVDMVFASFIRRGSDIRHIREVLGEEGKEIQIIAKIENQQGVNNFDEILEETDGVMVARGDLGIEIPAPKVFIAQKMMIAKCNIKGKPVICATQMLESMTYNPRPTRAEVSDVANAVLDGADCVMLSGETAKGNYPNEAVKMMSETCLLAEVAIPHFNVFDELRNLAPRPTDTVESIAMAAVSASLELNAGAIVVLTTSGKTARYLSKYRPVCPIVMVTRNPAASRYSHLYRGVWPFLFPEKKPDFNVKVWQEDVDRRLKWGINHALKLGIINKGDNIVCVQGWRGGMGHTNTVRVVPAEENLGLAE

SEQ ID NO: 8781 - DNA, 1758 bp, Bacillus licheniformis
  CDS (1)..(1758): transl_table=11
atgagaaagactaaaatagtttgtacaattggaccggccagcgaaagtgttgaaaagctcacccagctgatggaagccggaatgaacgtggcgcgcctgaacttttcccatggagatttcgaagagcacggcgcaagaattaaaaacattcgtgaagcagccggcaagctgggaaaagatatcggcatccttcttgacacgaaagggcctgaaatccgcacgcacacaatggaaaacggttcgatcgaactggcagcgggttctcagctgatcgtttcaatggacgaagtcatcggtacgcctgataaaatctcagttacatatgatgggttgattcacgatgtgtcagtcggttcaacgattttgcttgacgatggattggtcggacttgaagtcactgacataaacaaggacaagcgtgaaatcgtcacgaaagtgatgaacagcggaacgttgaaaaacaaaaaaggcgtgaatgtgccgggcgtcagcgtcaatcttccgggaattacggaaaaagatgcaaacgacatcgtattcggcatcgagcagggcgttgatttcatcgcggcatcctttgtgcgccgtccgtcggatgtccttgaaatccgcgaacttcttgaagagcacaatgcggcagatattcaaatcattccaaaaatcgaaaaccaggaaggcgttgacaacatcgatgccattcttgaagtatcagacggtctgatggttgcgcgtggagacctgggtgtagaaatccctgccgaagaagtgccgctcgttcaaaaagaactgatcaaaaaatgcaatgcgcttggcaagcctgtcatcacggctacccaaatgctcgacagcatgcagcgcaatccgcgcccgacacgcgcggaagcgagcgacgttgccaatgcgatctttgacggaactgacgcaatcatgctttcaggtgaaacggcagcgggaaattatcctgttgaagccgttcagacgatgcacaatatcgcttcccgttcagaagaagcgctcaaccataaaaagatcctttccgcacgaagcaagcaagtcagcatgtcaattacggatgcgatcggccaatctgtggcgcatacggcaatcaaccttgatgtgaatgccatcgtcacaccgacggaaagcggccatacggcgagaatgatttccaaatatcgcccgcaggcgccgattgtcgcagttacggtaaacgatgcggtgtcaagaaagctgtcacttgtgttcggggttttcgcaacaagcggacaaaaccacagctccactgacgaaatgcttgaaaaagcggtgcaaaaatctctcgatacaggcatcgtacgccacggcgacttgatcgttatcacggccggagctgtcggtgaagccggtacaacaaacttgatgaaagtgtatgttgtcggagacgtggtcgcaaaaggccagggcatcggacgcaaatccgcatttggtgaagtggtcatcgctcaaaacgcacaagaagcggccaaaaaaatgaaagatggcgccgttttagttacaaaaagcacggatcgtgacatgatggcatcccttgaaaaagcggctgcgctgattacggaagaaggcggcttaacaagccacgcggcagtcgtaggcttaagcctcggcatccctgtcatcgtcggaatggaaaatgcgacttccattctgaaagagggagaagacatcacggtcgactccgcccgcggagctgtatacaaaggacgtgcaagcgtgctttaa

SEQ ID NO: 8782 - protein, 585 aa, Bacillus licheniformis
MRKTKIVCTIGPASESVEKLTQLMEAGMNVARLNFSHGDFEEHGARIKNIREAAGKLGKDIGILLDTKGPEIRTHTMENGSIELAAGSQLIVSMDEVIGTPDKISVTYDGLIHDVSVGSTILLDDGLVGLEVTDINKDKREIVTKVMNSGTLKNKKGVNVPGVSVNLPGITEKDANDIVFGIEQGVDFIAASFVRRPSDVLEIRELLEEHNAADIQIIPKIENQEGVDNIDAILEVSDGLMVARGDLGVEIPAEEVPLVQKELIKKCNALGKPVITATQMLDSMQRNPRPTRAEASDVANAIFDGTDAIMLSGETAAGNYPVEAVQTMHNIASRSEEALNHKKILSARSKQVSMSITDAIGQSVAHTAINLDVNAIVTPTESGHTARMISKYRPQAPIVAVTVNDAVSRKLSLVFGVFATSGQNHSSTDEMLEKAVQKSLDTGIVRHGDLIVITAGAVGEAGTTNLMKVYVVGDVVAKGQGIGRKSAFGEVVIAQNAQEAAKKMKDGAVLVTKSTDRDMMASLEKAAALITEEGGLTSHAAVVGLSLGIPVIVGMENATSILKEGEDITVDSARGAVYKGRASVL

SEQ ID NO: 8783 - DNA, 2083 bp, Bacillus psychrophilus
  CDS (271)..(2031): transl_table=11
gcatgcgaaatcatgtggtggtagactatgagttgacagatgttttcgaacaatcaaatggtttggatatggaaatgtacaagctgtccaacgaattgtctatttaactttatgtagcaaaaattccctgcctttatacgtgggaagacaaacgcgaacgaagtcagtaattcagagggcatcaaaatgtcggctgaatcgagcgagcactatttaaaatctgggtgcaattaattgggttgttaaaaaaactaaaagaggcgatatttgatgagaaaaacgaaaatagtatgtacgattggccctgcaagtgaatcaccggaattattggaacaacttattgaggctggtatgaatgtagcgaggctgaatttttcccatggtaatcatgcggaacataaagcccgtatcgattccattagaaaagtcgcacgtgaaaaaggcaaagttgttgggattctattagatacgaaaggaccagaaattcggacgcattctatgatgaatggaaagttggaacttgtaacaggacaaaaaattgatatttccatgacgcaagtcgaaggaaacaatgatgtattttcagtaagttacgataaacttattgaagatgtaaacgagggttctgttattcttttagacgatggtctaatccaattagaagttactggtaaagacgtagcacgagggttaattcatacactaattattaattcggggtcattaagcaataataagggcgttaacataccgggtgtttcagtacaacttcctggaatgacggaaaaagatgcagaagatatcctgtttggtattagggaaggtgtcgacttcatagctgcctcattcgtaagacgggcttccgatgttatggaaatccgtgcccttcttgagaacaacaacggctcgaacctgcaaattattccgaagatagaaaaccaagaaggcgtcgacaatatcgatgaaattttgaatgtttcagatggtcttatggtagcacgtggtgatctgggtgtagaaataccaccagaagaagtaccacttgtccagaaaaatttgattgagaagtgtaaccaggcgggtaaaccggttatcacggcaacacaaatgcttgattcgatgcagcgtaacccgcgtcctacacgtgcagaagcgagcgatgtagcgaatgcgatttttgacggtaccgatgcaattatgctgtcaggagagacggcagcaggaatttatccagtcgaatcagtccaaacgatggatcgaattgcgcttactacggaagctgccatcgattatcgctctgtagtgtcgacacgtcgacgagaaaaacatggtaatatgactgaagcgattggacaagctgcagcatacacggctatcaacttgaaagtgaaggctgtccttgccccaacagaaagtggtcacacagctaaaatgattgccaaatatcgtccaggttgcccagttattgcggtaacgtcatctgaaatgtgttcaagaaaactatcacttatctggggcgtctacccgatagttggaaaaaaagcttcttcgattgatgaaatcttgcaagagtctgtagaagagagtgttaaacatcaatatgtcggacatggtgatgtggttatcattacagcaggtgttccagttggtgaagcgggaacgacgaacttgatgaaaatacatgtcataggtgatttgcttgcacgaggacaaggaattggcaaagatgtagcttatggtcgaactgttgtagccaaaaatgcagctgaagcattggcgtatgatacagaaggagctattcttgtaacgaacgcatctgatcgtgatatgatgcctgccatcgagaaatgcgcaggactcattacggaagaaggcggattgacgagtcatggtgcaattgtcggactcagtttaggtataccgataattgtcggagttgaaaatgctaccgagcttatccaacatggcaaggaaattacgatggatgctgaatctggcgttatctataatggacacgcgagcgttctataaagttaatcttcaatcagagtgggggttcttcatcccccactgattgtttaaa

SEQ ID NO: 8784 - protein, 586 aa, Bacillus psychrophilus
MRKTKIVCTIGPASESPELLEQLIEAGMNVARLNFSHGNHAEHKARIDSIRKVAREKGKVVGILLDTKGPEIRTHSMMNGKLELVTGQKIDISMTQVEGNNDVFSVSYDKLIEDVNEGSVILLDDGLIQLEVTGKDVARGLIHTLIINSGSLSNNKGVNIPGVSVQLPGMTEKDAEDILFGIREGVDFIAASFVRRASDVMEIRALLENNNGSNLQIIPKIENQEGVDNIDEILNVSDGLMVARGDLGVEIPPEEVPLVQKNLIEKCNQAGKPVITATQMLDSMQRNPRPTRAEASDVANAIFDGTDAIMLSGETAAGIYPVESVQTMDRIALTTEAAIDYRSVVSTRRREKHGNMTEAIGQAAAYTAINLKVKAVLAPTESGHTAKMIAKYRPGCPVIAVTSSEMCSRKLSLIWGVYPIVGKKASSIDEILQESVEESVKHQYVGHGDVVIITAGVPVGEAGTTNLMKIHVIGDLLARGQGIGKDVAYGRTVVAKNAAEALAYDTEGAILVTNASDRDMMPAIEKCAGLITEEGGLTSHGAIVGLSLGIPIIVGVENATELIQHGKEITMDAESGVIYNGHASVL

SEQ ID NO: 8785 - DNA, 1764 bp, Bacillus stearothermophilus
  CDS (1)..(1764): transl_table=11
atgaagcggaaaacgaaaatcgtctgcacgatcgggccggcaagcgagagcgtagacaagctcgtgcaactgatggaagcgggaatgaacgtggcgcgcctaaacttttcgcacggcgatcatgaagagcacgggcggcgcatcgccaatattcgcgaagcggcgaagcgaacgggccgaacggtcgccattttgcttgacacgaaagggccggaaatccggacgcacaatatggaaaacggcgccattgagctgaaggaagggtcaaagctcgtcatttcgatgagcgaagtgctcggcacgccggaaaaaatttcggtcacctatcccagcttaatcgatgatgtgtccgtcggcgcgaaaattttgcttgatgacgggctcatcagcctggaagtcaacgcggtcgacaagcaagcgggagaaatcgtcacgaccgtgttaaacggcggcgtgctgaaaaacaaaaaaggagtcaatgtgccgggtgtcaaagtcaacttgccaggcatcaccgagaaagatcgggctgacattttgtttggcattcgccaagggatcgatttcatcgccgcctcgtttgtgcgccgggcgtccgatgtgctggagatccgcgagctgcttgaggcgcatgacgccctccatatccaaattatcgccaaaattgaaaatgaagaaggcgtcgccaacattgacgaaattttagaagccgccgacggcctgatggtggcgcgcggcgatttgggcgtggaaattccggctgaggaagtgccgctcattcaaaaactgctcattaaaaagtgcaacatgctcggcaagccggtcattacggcgacgcaaatgctcgattcgatgcagcgcaatccgcgtccgacgcgggcggaggcgagcgacgtcgccaacgccatttttgacggcaccgacgccgtcatgctttccggggaaacggcggccggccagtatccggtcgaagcggtgaaaacgatgcaccaaatcgcgctccgcaccgaacaggcgcttgagcaccgcgacattttgtcccaacgcacaaaagaaagccaaacgacgatcaccgacgccatcgggcagtcggtcgcccacaccgcgctcaacttggatgtggcggcgatcgtgacgccgaccgtgagcggaaaaacgccgcaaatggtggcgaagtatcgcccgaaagcgccgattattgccgtgacgtcaaatgaagcggtatcgcgccggctggcgcttgtgtggggcgtgtatacgaaagaagcgccgcatgtgaacacgacggacgaaatgctcgatgtcgccgtcgatgcggcggtgcgctccgggttggtgaagcacggtgacttggtcgtcatcacggctggcgtgccggtcggcgaaacgggttcgacgaacttaatgaaggtgcacgttatcagcgatcttctcgccaaagggcaaggcatcggccgcaagtcggcgttcggcaaggccgttgtagcgaaaacagcggaagaagcgcggcaaaaaatggtcgacggcggcattttagtcactgtcagcaccgatgccgacatgatgccggcgatcgaaaaagcggcagccatcattactgaagagggcgggttgaccagccatgcggcggtcgtcggtttgagccttgggattccagtgattgtcggagtggaaaacgcaacaaccttgtttaaagatgggcaggagattacggtggacggcgggttcggtgccgtctatcgcggccatgccagcgtgttgtaa

SEQ ID NO: 8786 - protein, 587 aa, Bacillus stearothermophilus
MKRKTKIVCTIGPASESVDKLVQLMEAGMNVARLNFSHGDHEEHGRRIANIREAAKRTGRTVAILLDTKGPEIRTHNMENGAIELKEGSKLVISMSEVLGTPEKISVTYPSLIDDVSVGAKILLDDGLISLEVNAVDKQAGEIVTTVLNGGVLKNKKGVNVPGVKVNLPGITEKDRADILFGIRQGIDFIAASFVRRASDVLEIRELLEAHDALHIQIIAKIENEEGVANIDEILEAADGLMVARGDLGVEIPAEEVPLIQKLLIKKCNMLGKPVITATQMLDSMQRNPRPTRAEASDVANAIFDGTDAVMLSGETAAGQYPVEAVKTMHQIALRTEQALEHRDILSQRTKESQTTITDAIGQSVAHTALNLDVAAIVTPTVSGKTPQMVAKYRPKAPIIAVTSNEAVSRRLALVWGVYTKEAPHVNTTDEMLDVAVDAAVRSGLVKHGDLVVITAGVPVGETGSTNLMKVHVISDLLAKGQGIGRKSAFGKAVVAKTAEEARQKMVDGGILVTVSTDADMMPAIEKAAAIITEEGGLTSHAAVVGLSLGIPVIVGVENATTLFKDGQEITVDGGFGAVYRGHASVL

SEQ ID NO: 8787 - DNA, 1758 bp, Bacillus subtilis
  CDS (1)..(1758): transl_table=11
atgagaaaaactaaaattgtttgtaccatcggtccggcaagtgaaagtattgaaatgcttacgaaattaatggagtcaggaatgaacgtggctcgattaaacttttctcacggagattttgaggagcacggtgcaagaattaaaaatatccgcgaagcaagtaaaaaacttggcaagaacgttggaattctgcttgatacaaaaggtcctgaaatccgcacacatacaatggaaaacggcggtattgagcttgaaacaggcaaagagctcattatttcaatggacgaggttgtaggaacaacagataaaatttcagtgacatatgaaggtttagtccatgacgttgaacaaggttcaacgattctgttagatgacggccttatcggtcttgaggtacttgatgtagatgccgctaaacgcgaaatcaaaacaaaagtattaaacaacggaacactcaaaaataaaaaaggtgttaacgtaccgggcgtaagtgtcaatcttccggggattactgaaaaggatgcgcgagacatcgttttcggtattgagcaaggagtagacttcatcgcaccatctttcattcgacgttctacggatgtgctcgaaatccgtgagcttcttgaagagcacaacgctcaggatattcaaatcatccctaaaatcgaaaaccaagagggcgttgacaacatcgatgcgattctcgaagtgtctgacggcttaatggttgcacgcggagacttaggtgtggaaattccagctgaagaagtgccgcttgtgcaaaaagaactgatcaaaaaatgcaacgcgctgggcaaacctgttattacagcgacacaaatgcttgacagcatgcagcgcaacccgcgtccgactcgtgcggaagcaagtgacgttgcaaacgcgatcttcgacggaacagatgcgatcatgctttctggtgaaactgctgccggaagttacccggttgaagcagttcaaacaatgcataacatcgcgtcccgttctgaagaagcattaaattataaagaaattctctcaaaacgcagagaccaagtgggcatgacaattacagacgcaattggacaatctgtcgcacatacggcgattaacctgaatgctgctgcgatcgtaacgccgacagaaagcggccatacagcacgtatgattgcaaaataccgtccgcaggctccgattgttgcggttactgtaaatgactctatttccagaaagcttgccctcgtatctggcgtattcgcggaaagcggccaaaatgcgagctcaacagatgagatgcttgaggatgctgtccaaaaatcattgaacagcggaattgtaaaacacggcgatcttatcgttattacagctggcactgtcggtgagtccggcactacgaacttaatgaaggttcatactgtcggcgatatcatcgctaaaggccaaggcattggacgcaaatcagcttacggtccggttgtcgttgcacaaaatgcaaaagaagctgagcaaaaaatgactgacggtgcggtacttgttaccaaaagcactgaccgtgatatgattgcatcccttgaaaaagcgtctgctcttattacagaagaaggcggtttgactagccatgctgcggtagtcggattaagccttggcatcccggttatcgtgggtctggaaaatgcgacatctattttgacagatggccaggatattacagttgacgcttccagaggcgcagtctatcaaggccgtgcgagcgttctttaa

SEQ ID NO: 8788 - protein, 585 aa, Bacillus subtilis
MRKTKIVCTIGPASESIEMLTKLMESGMNVARLNFSHGDFEEHGARIKNIREASKKLGKNVGILLDTKGPEIRTHTMENGGIELETGKELIISMDEVVGTTDKISVTYEGLVHDVEQGSTILLDDGLIGLEVLDVDAAKREIKTKVLNNGTLKNKKGVNVPGVSVNLPGITEKDARDIVFGIEQGVDFIAPSFIRRSTDVLEIRELLEEHNAQDIQIIPKIENQEGVDNIDAILEVSDGLMVARGDLGVEIPAEEVPLVQKELIKKCNALGKPVITATQMLDSMQRNPRPTRAEASDVANAIFDGTDAIMLSGETAAGSYPVEAVQTMHNIASRSEEALNYKEILSKRRDQVGMTITDAIGQSVAHTAINLNAAAIVTPTESGHTARMIAKYRPQAPIVAVTVNDSISRKLALVSGVFAESGQNASSTDEMLEDAVQKSLNSGIVKHGDLIVITAGTVGESGTTNLMKVHTVGDIIAKGQGIGRKSAYGPVVVAQNAKEAEQKMTDGAVLVTKSTDRDMIASLEKASALITEEGGLTSHAAVVGLSLGIPVIVGLENATSILTDGQDITVDASRGAVYQGRASVL

SEQ ID NO: 8789 - DNA, 1446 bp, Buchnera aphidicola subsp
  CDS (1)..(1446)
atgttaaatcgtgttagaagaacaaaaattgtagcaactttaggaccttctacagataaagcaaataatcttgaaaagattattttatctggagcaaatgttcttcgtttaaatttttctcatggttcatctgaagaacataaaaaaagagcgaaaaaagcaaaagaaataatgtttaaattaaattgtcatattgctttattaggtgatttacaaggaccaaaaatcagaatttctaaatttaaaaaaaacagtatttttttaaaagttaatgacgtttttatattagatgcaaatttaaatgaaaaaaatggaaacaatgaaagagtcggaattgattataaaaaattaccaaatgacctaaatgtaaatgatatcttgttgttagacgacggaagaatacaattaaaagtaataaaaattgaaaaatgtgcaatatttacaaaagttattataggtggcattctatctaataataagggtattaataaattaggtggtggtttatcagcagatgcattaacagaaaaagataaaaaagatataattcttgcttctgaaattgatgtagattatttggccgtatcgttccctcgttgtgctgatgatttaataaaagccagagagttattaaaaaaatctggtagtaacgctcaaattatagctaaaatagaaagagccgaagctgtatttgatcaaaatgctatagaaaatataatattgtcttcagatgcaattatgattgctagaggagacttaggtgtcgaaattggtgatgcagaattggtaggtattcaaaaaaaattaattagaactgctagaaaattaaataaggtagcaattactgcaacacaaatgatggaatcaatgattttaaatccgttacctactcgtgcagaagttatggatgtagccaatgctgtgttagatggaagcgatgcagtcatgctgtctgcggaaactgcatctggaaaatatccatctgaaactgtgataagtatggctaaagtttgcaaaggggcagaaaaagttcctagtattaatgtttctagacatcgtcttaatgtagaatttcaaagcattgaggaagccattgctatgtcatcaatgtatgcggcgaatcacttaaaaggaattacagcaattattactatgacagaatctggtaaaacagcattaatgacttctagaattacttctggactaccgatttttgctttatcaaaacataaaaaaactttaaatttaactgctctctatagaggtgtgattcctatttattttgatagtgataaggatggtgttgaagctgctaatgaagcaataattcttttgtgcaagaaaaaatttctatttaataatgatttagtcattgtcactcaaggtgacataatggggaaaataggtaaaacgaataccagtagaattttaagagttacatattaa

SEQ ID NO: 8790 - protein, 481 aa, Buchnera aphidicola subsp
MLNRVRRTKIVATLGPSTDKANNLEKIILSGANVLRLNFSHGSSEEHKKRAKKAKEIMFKLNCHIALLGDLQGPKIRISKFKKNSIFLKVNDVFILDANLNEKNGNNERVGIDYKKLPNDLNVNDILLLDDGRIQLKVIKIEKCAIFTKVIIGGILSNNKGINKLGGGLSADALTEKDKKDIILASEIDVDYLAVSFPRCADDLIKARELLKKSGSNAQIIAKIERAEAVFDQNAIENIILSSDAIMIARGDLGVEIGDAELVGIQKKLIRTARKLNKVAITATQMMESMILNPLPTRAEVMDVANAVLDGSDAVMLSAETASGKYPSETVISMAKVCKGAEKVPSINVSRHRLNVEFQSIEEAIAMSSMYAANHLKGITAIITMTESGKTALMTSRITSGLPIFALSKHKKTLNLTALYRGVIPIYFDSDKDGVEAANEAIILLCKKKFLFNNDLVIVTQGDIMGKIGKTNTSRILRVTY

SEQ ID NO: 8791 - DNA, 1422 bp, Clostridium acetobutylicum
  CDS (1)..(1422): transl_table=11
atgcaaaaaactaaaatgatttttacagttggaccagcaagtgagacagaggagattgtaacagctttcataaaagctggaatgaatgcttcaagacataacttttcacacggtgatcatgcagagcacggtggaagaatagctttagtaaaaaaggttagagcaaagcttaataagcctgtagctatatgccttgatactaaaggaccagaaataagaactggagatttcaatccttcaaagcttgaacttcaaaaaggttcaaaatttactatcgtttgtggcgaagaaatagttggagatgctacaaaatgttcaatatcatataaagatttatacaaagatgtaaaaccaggaaacactatattaatagatgatggtttagttggacttacagtagaagctatagaaggaacaaatgtaatttgtactgtagcaaatacaggattagttggaagccataaaggagtaaatgttccaaacgtttcaatacaacttcctgcaatgacagaaaaagataagagcgatttaatattcggatgtaaagaagaaatagatatggtaagtgcatcattcataagaaaacctgaagatgtacttgcaataagaaaagtattaaatgagaatggcggagaaaacattcaaatattctctaaaattgaaaatcaagaaggcgtggacaacatagatgctattatagaagtttctgacggaataatggtagctagaggagatatgggagttgaaattcctatacaaagagttccattaatccaaaaaatgataatcaaaaaatgtaatgcagtaggaaaacctgttataacagcaactcaaatgcttgattcaatgatgagaaatccaagacctacaagagcagaagcttcagatatagcaaatgctatatttgatggaacagatgctataatgttaagtggagaaagcgctaatggatcatatccaatagaagctgtaactacaatggcaaaaatagcacaagaggcagaaaatgaaatcaattatgataaattcctagcagaaagaaaaggaaatgaaaagaaaaatacttctgatgtaataagtcttggaacttgcacagcagcagcagacttagaagcttcagcaataataactgcaactcaaacaggaagcacagcaagaacagtttcaaaatatagaccaaaagcacctgtaatagcagttactccatctgaaaaagtagcaagaaaacttgcaatgagctggggagtacaccctataatatctgataaatttggttcaactgatgaacttatctctacttcagtagataaagcccttgaagcaggatatgtacaaaaaggagatcttgtagttgtagctgcaggtgtaccaacaaatgtatcaggtactacaaacatgcttaaagttcaagttgttgagtaa

SEQ ID NO: 8792 - protein, 473 aa, Clostridium acetobutylicum
MQKTKMIFTVGPASETEEIVTAFIKAGMNASRHNFSHGDHAEHGGRIALVKKVRAKLNKPVAICLDTKGPEIRTGDFNPSKLELQKGSKFTIVCGEEIVGDATKCSISYKDLYKDVKPGNTILIDDGLVGLTVEAIEGTNVICTVANTGLVGSHKGVNVPNVSIQLPAMTEKDKSDLIFGCKEEIDMVSASFIRKPEDVLAIRKVLNENGGENIQIFSKIENQEGVDNIDAIIEVSDGIMVARGDMGVEIPIQRVPLIQKMIIKKCNAVGKPVITATQMLDSMMRNPRPTRAEASDIANAIFDGTDAIMLSGESANGSYPIEAVTTMAKIAQEAENEINYDKFLAERKGNEKKNTSDVISLGTCTAAADLEASAIITATQTGSTARTVSKYRPKAPVIAVTPSEKVARKLAMSWGVHPIISDKFGSTDELISTSVDKALEAGYVQKGDLVVVAAGVPTNVSGTTNMLKVQVVE

SEQ ID NO: 8793 - DNA, 1515 bp, Debaryomyces hansenii
  CDS (1)..(1515)
atgtctaacgcatcattatcttggttaaccaaattgaataccagtgaaaccccagataaggttttacgtcgttcgtctattatcggtactattggaccaaagaccaacaacgttgacgttttggtcaaattaagaaaggccggtttaaacattgttcgtatgaacttctcgcacggatcttacgaataccatcaatccgttattgacaatgctaagcaatcggaagaaatctacaagggccgtccattggccattgctttggacactaaaggtccagaaatcagaactggtactaccattgacgacaaggactacccaatcttaccaaaccatgaaatgatcttcaccactgacgaagcttacgctaagaagtgtgacgacaaggttatgttcatcgactacaagaatatcaccaaggtcatcgaagccggtaaaatcatatatattgacgatggtgttgtttcattcgaagttttacaaattgtcgacgataagaccttgaaggttagatccgtcaactccggtaagatatgttcccacaagggtgttaacttgccaggtaccgatgttgacttaccagctttatccgaaaaggataaggctgatatcaaattcggtgtcaagaacggtgtccacatgatctttgcttctttcatcagaactggtgacgatatcaaggaaatccgtaaggttttaggtgaagaaggtaaggatatccaaatcattgctaagatcgaaaatcaacaaggtgtcaacaactttgacgaaatcttagtcgaaaccgatggtgttatggttgccagaggtgatttaggtattgaaattcctgctcctcaagtctttgttgttcaaaagcaattgattgctaagtgtaacttggctgctaagccagtcatttgtgccacccaaatgttggaatccatgacttacaacccaagaccaaccagagccgaagtttctgatgtcggtaacgccattttagatggtgctgattgtgttatgttgtctggtgaaactgccaagggtaactacccattcgaagctgtctccatgatgcacaacaccgctatcattgctgaaaaggccatcgcttaccaacctttacacaacgaaatcaggtctttagctaacagaccaacacctaccaccgaaacatgtgccatggcttccgtctcagctgcctacgaacaagatgctaaggctattgttgttttgtccacctctggtttcacctccagattggtttccaaatacaagccaaatgtcccagttatgatggttacaagaaaccatagagctgctagatactgtcacttgtacagaggtgtctacccatttgtctacgaaaagaaaactgttgacaactggcaagaagatgtcgaaaacagattaagatgggctgtttctgaagctattgatttaggtatcatcaagaagggtgactccatcgttactattcaaggttggaccagaggttctggtcactctaacactgttagggttgtccaagcttaa

SEQ ID NO: 8794 - protein, 504 aa, Debaryomyces hansenii
MSNASLSWLTKLNTSETPDKVLRRSSIIGTIGPKTNNVDVLVKLRKAGLNIVRMNFSHGSYEYHQSVIDNAKQSEEIYKGRPLAIALDTKGPEIRTGTTIDDKDYPILPNHEMIFTTDEAYAKKCDDKVMFIDYKNITKVIEAGKIIYIDDGVVSFEVLQIVDDKTLKVRSVNSGKICSHKGVNLPGTDVDLPALSEKDKADIKFGVKNGVHMIFASFIRTGDDIKEIRKVLGEEGKDIQIIAKIENQQGVNNFDEILVETDGVMVARGDLGIEIPAPQVFVVQKQLIAKCNLAAKPVICATQMLESMTYNPRPTRAEVSDVGNAILDGADCVMLSGETAKGNYPFEAVSMMHNTAIIAEKAIAYQPLHNEIRSLANRPTPTTETCAMASVSAAYEQDAKAIVVLSTSGFTSRLVSKYKPNVPVMMVTRNHRAARYCHLYRGVYPFVYEKKTVDNWQEDVENRLRWAVSEAIDLGIIKKGDSIVTIQGWTRGSGHSNTVRVVQA

SEQ ID NO: 8795 - DNA, 1581 bp, Emericella nidulans
  CDS (1)..(1581)
atggccgcaagctcttccctcgaccacttgtccaaccgtatgaagctggagtggcactccaagctgaatactgagatggtgccggcgaagaacttccgccgtacatccatcatctgtaccatcggtcccaagacaaactccgttgagaaaatcaatgccctccgcagagccggtctcaatgtcgttcgcatgaacttttctcacggttcatacgagtaccaccaatcagttatcgaccacgctcgggaagccgaaaagcagcaggctggccgccccgttgccattgctctggacaccaaaggacccgagatccgtaccggaaacaccgtaggtgacaaggacatcccaatcaaggctggccatgagatgaacatcagcaccgatgagcaatatgccaccgcatccgacgaccagaacatgtatgtcgattacaagaacatcaccaaggtgatttctgccggcaagctcatctatgtcgatgacggtatcctttcatttgaggttcttgaagttgtagatgacaagaccctgcgcgtccgatgccttaacaacggcaacatctcttcccgcaagggtgtcaaccttcccggtaccgacgtagacttgcccgctctttcagagaaggacatcagcgatctgaagtttggtgtcaagaacaaggtcgacatggttttcgcttccttcatccgtcgtggcagcgacatccgccacatccgtgaggtgttgggtgaagagggccgagagattcagatcatcgccaagattgagaaccaacaaggtgtcaacaatttcgacgagattctggaagagaccgacggtgtcatggtcgcccgtggtgaccttggtatcgagatccccgctcccaaggtgttcatcgcccagaagatgatgatcgccaagtgtaacatcaagggcaagcccgtcatttgtgccactcagatgcttgagtccatgacatataaccctcgtcccactcgtgctgaggtgtccgatgtggccaacgctgttctcgacggtgccgactgtgtcatgctttctggagagactgccaagggtaactacccttgcgaggctgtcacgatgatgtctgagacctgcctcctcgccgaggttgccattcctcacttcaacgtcttcgacgagctgcgaaacctggcccctcgtcccaccgacactgttgaatccatcgccatggctgctgtgagtgccagtcttgaactgaacgccggcgccattgtggtcctcaccactagtggaaacactgcccgtatgatctccaagtaccgccccgtttgccccatcatcatggtttctcgcaaccctgctgctacaaggtactcccacctgtaccgtggtgtctggcccttctacttccccgagaagaagcccgacttcaacgtcaagatctggcaggaggatgtcgaccgtcgcctcaagtggggtatcaaccacggtctcaagctcggtatcatcaacaagggcgacaacatcgtctgtgttcagggctggcgcggcggtatgggccacactaacactgtccgtgtggtccctgctgaggagaacctcggactttctgagtaa

SEQ ID NO: 8796 - protein, 526 aa, Emericella nidulans
MAASSSLDHLSNRMKLEWHSKLNTEMVPAKNFRRTSIICTIGPKTNSVEKINALRRAGLNVVRMNFSHGSYEYHQSVIDHAREAEKQQAGRPVAIALDTKGPEIRTGNTVGDKDIPIKAGHEMNISTDEQYATASDDQNMYVDYKNITKVISAGKLIYVDDGILSFEVLEVVDDKTLRVRCLNNGNISSRKGVNLPGTDVDLPALSEKDISDLKFGVKNKVDMVFASFIRRGSDIRHIREVLGEEGREIQIIAKIENQQGVNNFDEILEETDGVMVARGDLGIEIPAPKVFIAQKMMIAKCNIKGKPVICATQMLESMTYNPRPTRAEVSDVANAVLDGADCVMLSGETAKGNYPCEAVTMMSETCLLAEVAIPHFNVFDELRNLAPRPTDTVESIAMAAVSASLELNAGAIVVLTTSGNTARMISKYRPVCPIIMVSRNPAATRYSHLYRGVWPFYFPEKKPDFNVKIWQEDVDRRLKWGINHGLKLGIINKGDNIVCVQGWRGGMGHTNTVRVVPAEENLGLSE

SEQ ID NO: 8797 - DNA, 1506 bp, Kluyveromyces lactis
  CDS (1)..(1506)
atggaatctagattaggctggttgaccgatttgagtaccgaaactggtaccaacttgagaagaacctcaattatttgtaccattggtccaaagaccaacaacccagaaactttggttgaattgagaaaggctggtatgaacattgttcgtatgaacttctcccacggttcttacgaataccatcaatctgtcattgacaacgccagaaaatctgaagaactataccaaggtagacctctggctattgcattggacactaagggtcctgaaatcagaactggtaccaccactaacgatgtggattacccaattcctccaaaccacgaaatgatcttcactactgatgacaagtacgctaaggcttgtgacgacaaaaccatgtacgttgattacaagaacatcaccaaggtcattgaagctggtagaattatctacgtcgatgatggtgttttgtcattcgaagttttggaagttattgatgacaacaccttgaaggttaagtctttgaacgccggtaagatttgttctcacaagggtgtcaacttgccaggtaccgatgtcgatttgccagctttgtccgaaaaggacaagtctgacttgaaattcggtgtcaagaacggtgtccacatggtcttcgcctctttcatcagaaccgctcaagatgttttgactatcagagaagttttgggtgagcaaggtaaggatatcaagatcattgttaagattgaaaaccaacaaggtgtcaacaactttgacgatatcttgaaggtcactgacggtgttatggttgctagaggtgatttgggtattgaaattccagctcctcaagtgtttgctgtgcaaaagaagttgattgctaagtgtaacttggctggtaagccagttatctgtgctacccaaatgttggaatccatgacctacaacccaagaccaaccagagctgaagtctctgatgttggtaacgccgttcttgatggtgctgactgtgttatgttgtctggtgaaactgccaagggtaactacccaatcaatgccgttaagaccatggctgaaactgctttgattgctgaacaagccatcccatacatcccaacttacgatgacttaagaaacttgactccaaagccaacctcaaccactgaaactatcgctgctgcttctgtttctgctgtatttgaacaaaaggccagagctttgattgtcctatccaccaccggtgacactccaagattggttgccaagtacaagccaaatgtcccaattgttatggttactagaaacccaagagctgctagattctctcatctatatagaggtgtcttcccattcgtatacgatgaatcctctgactccgaatggactgtcgatgttgaaaagagaatcaacttcggtgtcaagaaggccaaggaattcggaattttggttgacggtgacaccattgtcaccattcaaggtttcgccgctggtgtcggtaactccaacactctacgtgtcttgaccgtttaa

SEQ ID NO: 8798 - protein, 501 aa, Kluyveromyces lactis
MESRLGWLTDLSTETGTNLRRTSIICTIGPKTNNPETLVELRKAGMNIVRMNFSHGSYEYHQSVIDNARKSEELYQGRPLAIALDTKGPEIRTGTTTNDVDYPIPPNHEMIFTTDDKYAKACDDKTMYVDYKNITKVIEAGRIIYVDDGVLSFEVLEVIDDNTLKVKSLNAGKICSHKGVNLPGTDVDLPALSEKDKSDLKFGVKNGVHMVFASFIRTAQDVLTIREVLGEQGKDIKIIVKIENQQGVNNFDDILKVTDGVMVARGDLGIEIPAPQVFAVQKKLIAKCNLAGKPVICATQMLESMTYNPRPTRAEVSDVGNAVLDGADCVMLSGETAKGNYPINAVKTMAETALIAEQAIPYIPTYDDLRNLTPKPTSTTETIAAASVSAVFEQKARALIVLSTTGDTPRLVAKYKPNVPIVMVTRNPRAARFSHLYRGVFPFVYDESSDSEWTVDVEKRINFGVKKAKEFGILVDGDTIVTIQGFAAGVGNSNTLRVLTV

SEQ ID NO: 8799 - DNA, 1584 bp, Neurospora crassa
  CDS (1)..(1584)
atggccgctactgcgcttgaccatctcagcctcggcggcaagattcagtggctcgctcagcttaacactgagttccagcccgctcgcgagttccgtcgcacttccatcatctgcaccattggtcccaagaccaactcggtcgaggccatcaacaagctccgcgatgctggtctcaacgtcgttcgcatgaacttctcccacggaagctacgagtatcaccagtccgtcattgacaatgctcgccaggctgagaaggttcatcccggccgccctattgccattgcccttgacaccaagggccctgagatccgtaccggcaacaccaagaacgatgaggatattcccatctccgccggtaccatccttaacatcaccactgatgaaaagtacaaggatgagtgcactatcgagcacatgtacgtcgactatgtcaacatcaccaaggtcattgctcctggccgtatcatctacgtcgacgatggtgtcctcgctttcgaggtcctcgagattgtcgatgacaagaccatcaaggttaaggcccgcaacaacggctacatctcctcccgcaagggtgtcaaccttcccaacaccgatgtcgatctccctgctctttccgagaaggataaggccgatctcaggttcggtgtcaagaacaaggtcgacatggtctttgcttcttttatccgtcgcggccaggacatcaaggacattcgtgaggtccttggcgaggatggcaagcagatccagatcattgccaagatcgagaacaggcagggtctcaacaactttgctgagattctcgccgagaccgatggtgtcatggttgcccgtggtgacttgggtattgagatccccgccgccgaggtgttcgctgcccagaagaagatcatcgccatgtgcaacattgccggcaagcccgtcatctgcgctacccagatgctcgagtccatgatcaagaaccccagacccaccagagccgagatcagcgatgtcggtaacgctgttaccgatggtgctgactgcgtcatgctttctggtgagaccgccaagggtgcttaccccaccgaggccgtccgtgagatgagcgaggccgttcttaaggccgagaacaccatcccctacgtcagccacttcgaggagctttgcagcttggccaagcgccccgtctccattgtcgagtcctgcgccatggcctctgtccgcgcctcccttgaccttaacgccgctgccattcttgttctctccacctccggcgagtccgctcgtctcatctccaagtaccgccctgtgtgccccatcatcatgatcaccaggaacgactctgcttcgaggtacgcccacctttaccgtggcgtctaccccttccttttccccgagtccaagcccgactttagcaaggtcaactggcaggaggatgttgatcgtcgcatcaagtggggtctcagccacggtattggcctcaaggtcctcaacgagggcgaaaccgttgtcgttgttcagggctggaagggtggtatgggtaacaccaacaccttccgtatcgttaaggccgatgtcaaccacctcggtcttggccagccttaa

SEQ ID NO: 8800 - protein, 527 aa, Neurospora crassa
MAATALDHLSLGGKIQWLAQLNTEFQPAREFRRTSIICTIGPKTNSVEAINKLRDAGLNVVRMNFSHGSYEYHQSVIDNARQAEKVHPGRPIAIALDTKGPEIRTGNTKNDEDIPISAGTILNITTDEKYKDECTIEHMYVDYVNITKVIAPGRIIYVDDGVLAFEVLEIVDDKTIKVKARNNGYISSRKGVNLPNTDVDLPALSEKDKADLRFGVKNKVDMVFASFIRRGQDIKDIREVLGEDGKQIQIIAKIENRQGLNNFAEILAETDGVMVARGDLGIEIPAAEVFAAQKKIIAMCNIAGKPVICATQMLESMIKNPRPTRAEISDVGNAVTDGADCVMLSGETAKGAYPTEAVREMSEAVLKAENTIPYVSHFEELCSLAKRPVSIVESCAMASVRASLDLNAAAILVLSTSGESARLISKYRPVCPIIMITRNDSASRYAHLYRGVYPFLFPESKPDFSKVNWQEDVDRRIKWGLSHGIGLKVLNEGETVVVVQGWKGGMGNTNTFRIVKADVNHLGLGQP

SEQ ID NO: 8801 - DNA, 1506 bp, Saccharomyces castellii
  CDS (1)..(1506)
atggaatccagattagccagattaaccactttacaagttaccgccggtgacaacttaagaagaacctctattattggtactattggtccaaagaccaacaacccagaagtcttggttgctctaagaaaggctggtttgaacattgtccgtatgaacttctctcacggttcttacgaataccatcaatccgttattgaaaacgccagaaagtctgaagaactttacccaggtagaccattagctattgctttggacaccaagggtccagaaatcagaactggtaccaccaccggtgaagttgactacccaattccaccaaaccacgaaatgatcttctctactgatgaaaagtacgctaaggcttgtgatgacaaggttatgttcgtcgactacgctaacatcaccaaggttatctccaagggtaagatcatctacgtcgatgacggtgtgttgtctttcgaagttttggaagtcgttgatggtaagactttgaaggttaagtccttgaacgccggtaagatctgttctcacaagggtgttaacttaccaggtaccgatgtcgatttgccagctttgtccgaaaaggataaggctgatttgagattcggtgttaagaacggtgtccacatggtcttcgcttctttcattagaaccgctcaagatgttttgaccatcagagaagtcttaggtgaagatggtaaggacatcaagattgttgtcaagattgaaaaccaacaaggtgttaacaacttcgacgaaatcttgaaggtcactgatgccgttatggttgccagaggtgatttaggtattgaaattccagccccagaagtcttagctgtccaaaagaaattgattgctaagtctaacttggccggtaagccagttatctgtgctacccaaatgttggagtctatgacttacaacccaagaccaaccagagctgaagtttccgatgtcggtaacgctatcttggatggtgctgactgtgttatgttgtctggtgaaaccgccaagggtaactacccaatcaatgctgtcaccaccatggctgacactgctttgattgctgaacaagccattgcttaccaaccattgtacgatgacttgagaaacttgactccaaagccaacttctaccactgaaaccgttgctgcttccgctgttgccgctgtctacgaacaaaaggccaaggctatcattgtcttgtctacttccggtaccactccaagattggtctccaagtacagaccagactgtccaattatcttggttaccagaaacccaagagctgctagattctctcacttgtctagaggtgttttcccattcgtctacgaagctgactccgttgctgactggactgaagatgtcgaattgagattgaagttcggtattgaaaaggccatcgaaatgggtgtcatgaagaagggtgacacttacgtctccattcaaggtttcaaggctggtgaaggtcactccaacactttgcaagtctctaacgcttaa

SEQ ID NO: 8802 - protein, 501 aa, Saccharomyces castellii
MESRLARLTTLQVTAGDNLRRTSIIGTIGPKTNNPEVLVALRKAGLNIVRMNFSHGSYEYHQSVIENARKSEELYPGRPLAIALDTKGPEIRTGTTTGEVDYPIPPNHEMIFSTDEKYAKACDDKVMFVDYANITKVISKGKIIYVDDGVLSFEVLEVVDGKTLKVKSLNAGKICSHKGVNLPGTDVDLPALSEKDKADLRFGVKNGVHMVFASFIRTAQDVLTIREVLGEDGKDIKIVVKIENQQGVNNFDEILKVTDAVMVARGDLGIEIPAPEVLAVQKKLIAKSNLAGKPVICATQMLESMTYNPRPTRAEVSDVGNAILDGADCVMLSGETAKGNYPINAVTTMADTALIAEQAIAYQPLYDDLRNLTPKPTSTTETVAASAVAAVYEQKAKAIIVLSTSGTTPRLVSKYRPDCPIILVTRNPRAARFSHLSRGVFPFVYEADSVADWTEDVELRLKFGIEKAIEMGVMKKGDTYVSIQGFKAGEGHSNTLQVSNA

SEQ ID NO: 8803 - DNA, 1506 bp, Saccharomyces kluyveri
  CDS (1)..(1506)
atggaatctagactaggttggttaactgaattgcaaactgaaaccggtgctaacttgagaagaacctctatcatcggtaccattggtccaaagaccaacaacccagaaaccttggttgccttgagaaaggctggtttgaacattgttcgtatgaacttctctcacggttcttacgaataccaccaatctgtcattgacaacgctagaaagtctgaagagctatatccaggtagaccattggctattgctttggacaccaagggtccagaaatcagaactggtaccaccactaacgaagtcgactacccaatcccaccaaaccacgaaatgatcttctccattgacgacaaatacgccaaggcttgtgatgacaaggttatgtacattgactacaagaacatcaccaaggttatcgaaaagggtaagatcatctacgttgatgacggtgtcttgtctttcgaagttttggaagtcgttgacgaacaaactttgaaggttaagtccttgaacgctggtaagatctgctcccacaagggtgttaacttgccaggtaccgatgtcgacttgccagctttgtccgaaaaggacaagtctgacttgagattcggtgtcaagaacggtgtccacatggtcttcgcttctttcatcagaaccgctcaagatgttttgaccatcagagaagttttgggtgaagacggtaaggacgtcaagatcattgtcaagattgaaaaccaacaaggtgttaacaactttgacgaaatcttgaaggttactgacggtgtcatggttgccagaggtgacttgggtatcgaaatcccagctccacaagttttcgctgtccaaaagaagttgattgctaagtgtaacttggccggtaagccagttatctgtgccacccaaatgttggaatctatgacttacaacccaagaccaaccagagctgaagtttccgatgtcggtaacgctgttttggacggtgctgactgtgtcatgttgtctggtgaaaccgctaagggtaactacccaattaacgccgttaccatcatggctgaaaccgctttgattgctgaacaagctatcccatacgtcgccacttacgacgacttgagaaacttcactccaaagccaacttctaccactgaaaccatcgctgccgccgctgtctcttctgttttcgaacaaaaggccaaggctatcattgtcttgtctaccaccggtgacaccccaagattggtctccaaatacaagccaaacgttccaattgttatggttaccagaaacccaagagctgctagattctctcacttgtacagaggtgtcttcccattcgtctacgaatctgacactgaatccgaatggaccaaggatgttgaaagccgtttgaacttcggtattgccaaggccaaggaattcggtatgttgaaggaaggtgacaccattgtcactatccaaggtttcgctgctggtgttggtcactctaacactttgcgtgtcttgaccgtctaa

SEQ ID NO: 8804 - protein, 501 aa, Saccharomyces kluyveri
MESRLGWLTELQTETGANLRRTSIIGTIGPKTNNPETLVALRKAGLNIVRMNFSHGSYEYHQSVIDNARKSEELYPGRPLAIALDTKGPEIRTGTTTNEVDYPIPPNHEMIFSIDDKYAKACDDKVMYIDYKNITKVIEKGKIIYVDDGVLSFEVLEVVDEQTLKVKSLNAGKICSHKGVNLPGTDVDLPALSEKDKSDLRFGVKNGVHMVFASFIRTAQDVLTIREVLGEDGKDVKIIVKIENQQGVNNFDEILKVTDGVMVARGDLGIEIPAPQVFAVQKKLIAKCNLAGKPVICATQMLESMTYNPRPTRAEVSDVGNAVLDGADCVMLSGETAKGNYPINAVTIMAETALIAEQAIPYVATYDDLRNFTPKPTSTTETIAAAAVSSVFEQKAKAIIVLSTTGDTPRLVSKYKPNVPIVMVTRNPRAARFSHLYRGVFPFVYESDTESEWTKDVESRLNFGIAKAKEFGMLKEGDTIVTIQGFAAGVGHSNTLRVLTV

SEQ ID NO: 8805 - DNA, 1530 bp, Schizosaccharomyces pombe
  CDS (1)..(1530)
atgtcctcttctgctgtctctcctaagcaatgggtcgccggcctcaacagcgagcttgatatccccgctgtcaaccgtcgtacctccatcatttgcaccattggtcccaagtccaacaacgttgagaccttgtgcaagctccgtgatgctggtatgaacattgttcgtatgaacttctctcacggttcctacgaataccaccaatccgtcattgacaatgcccgtaaggcctctgccaccaaccctctcttccccttggccattgccttggatactaagggacctgagattcgtactggtctcaccgttggcggtactgactaccccatctcctctggtcacgagatgatcttcaccaccgacgatgcttatgccgagaagtgtaacgacaaggtcatgtacattgactacaagaacatcaccaaggtcattcaacctggccgtatcatctacgttgatgatggtatcctttccttcactgtcatcgagaaggttgatgacaagaatttgaaggtccgtgtcaacaacaacggtaagatctcttccaagaagggtgtcaacttgcctaagactgatgtcgatttgcccgctttgtccgagaaggacaaggccgatctccgcttcggtgtcaagaacggtgtcgacatgatctttgcttccttcatccgtcgtgctgaggacgttatccacatccgtgaagttttgggtgaggagggtaagaacatcaagatcatctgcaagatcgagaaccaacaaggtgttaacaactttgactctatccttgacgttaccgacggtatcatggttgcccgtggtgacttgggtattgaaatccctgcctctcaagttttcgtcgcccaaaagatgatgattgccaagtgcaacatcgctggtaagcccgttgcttgtgccactcaaatgcttgagtccatgacctacaaccctcgtcctactcgtgccgaggtttccgatgttggtaacgccgttctcgatggtgctgacttggtcatgctttccggtgagactaccaagggttcttaccccgttgaagccgttacctacatggctgagactgcccgtgttgctgaggcttccatcccttacggcagcctttaccaagagatgttcggcctcgtccgtcgtcctcttgagtgtgctaccgagaccactgctgtcgctgccatcggtgcctccattgagagtgatgccaaggccatcgttgtcttgtccaccagcggtaacactgctcgtctctgctccaagtaccgtccttctatccccattgttatggttactcgttgccctcaaagagctcgtcaatctcacctcaaccgtggtgtctaccccgtcatctacgagaaggagcctctttctgactggcaaaaggatgttgacgctcgtgttgcctacggttgccaacaagcttacaagatgaacatcctcaagaagggtgacaagatcattgtccttcaaggtgccgttggtggtaagggtcacacctccatcttccgtcttaccgttgccgagtaa

SEQ ID NO: 8806 - protein, 509 aa, Schizosaccharomyces pombe
MSSSAVSPKQWVAGLNSELDIPAVNRRTSIICTIGPKSNNVETLCKLRDAGMNIVRMNFSHGSYEYHQSVIDNARKASATNPLFPLAIALDTKGPEIRTGLTVGGTDYPISSGHEMIFTTDDAYAEKCNDKVMYIDYKNITKVIQPGRIIYVDDGILSFTVIEKVDDKNLKVRVNNNGKISSKKGVNLPKTDVDLPALSEKDKADLRFGVKNGVDMIFASFIRRAEDVIHIREVLGEEGKNIKIICKIENQQGVNNFDSILDVTDGIMVARGDLGIEIPASQVFVAQKMMIAKCNIAGKPVACATQMLESMTYNPRPTRAEVSDVGNAVLDGADLVMLSGETTKGSYPVEAVTYMAETARVAEASIPYGSLYQEMFGLVRRPLECATETTAVAAIGASIESDAKAIVVLSTSGNTARLCSKYRPSIPIVMVTRCPQRARQSHLNRGVYPVIYEKEPLSDWQKDVDARVAYGCQQAYKMNILKKGDKIIVLQGAVGGKGHTSIFRLTVAE

SEQ ID NO: 8807 - DNA, 1617 bp, Trichoderma reesei
  CDS (1)..(1617)
atgtcccagatctcccgcacgcagagcatcatggctaccacggcccaggagcacctggaaaccggcggccgcatcaattggctggcctcgctcaacacggcctttacgcctgcccgcaactttcgccgcacctccatcatctgcaccatcggccccaagaccaactcggtcgaggccctcaacaagctgcgtgatgccggcctcaacgtcgcccgcatgaacttctcccacggcagctacgagtaccaccagtccgtcatcgacaatgtgcgcgcctctgtcgccgcccaccctggccggcccgtcgccattgccctcgacaccaagggccccgagattcgaactggcaacacggccggcgacgtggacattcccatcagcgccggcaccgtcatgaacttcaccaccgacgagaagtacgcgacggcctgcgacactcagaacatgtacgtcgactacaagaacatcaccaaggtgatccagcctggccgtgtcatctacgtcgacgacggtgtcctcgcctttgacgtcctcagcatcaaggacgaccagaccgtcgaggtccgcgcccgcaacaacggcttcatctcctcccggaagggtgtcaacctgcccaacaccgatgtcgacctgcctgctctctccgagaaggacaaggccgatctccggtttggtgtcaagaacaatgtcgacatggtctttgcctcatttatccgccgtgcgcaggatatcaaggatatccgcgacgtgctgggccccgagggcaagcagatccagatcattgccaagatcgagaaccgacagggtctcaacaactttgccgagatccttgaggagaccgacggtgtcatggtcgcccgtggtgacctgggtattgagatccccgccgccgaggtgttcgccgcccagaagaagatgattgccatgtgcaacattgccggcaagcccgtcatctgcgctacccagatgctcgagtccatgatcaagaaccctcgacctacgcgtgccgagatcagcgatgtcggcaacgccgtcactgatggcgccgactgtgttatgctatctggcgagactgccaagggtaactaccctgccgagtccattcatgagatgcacgaggccagtctcaaggctgaaaacaccatcccctacgtctcccactttgaggagatgtgcactctggtcaagcgccccgtctcgaccgtcgagtcttgcgccatggctgccgtccgcgcctctctcgacctcggcgccggtggcatcattgtcctgtccacctctggcgactctgcccgcctgctgtccaagtaccgccccgtctgccccatcttcatggtgacccgaaaccccaccacctctcgattcagccacctgtaccgcggtgtctaccccttcctgtatcccgagcagaagcccgactttgatactgtcaactggcaggaggacgtcgacaagcgcatcaagtgggccgtcacccgcgccattgagctcaagacgctcactgccggcgacaccgttgtcgtcgtccagggctggaagggcggcatgggcaacacaaacaccctgcgcattgtccgcgctgaccccgaccacctgggcattggacagatggagtag

SEQ ID NO: 8808 - protein, 538 aa, Trichoderma reesei
MSQISRTQSIMATTAQEHLETGGRINWLASLNTAFTPARNFRRTSIICTIGPKTNSVEALNKLRDAGLNVARMNFSHGSYEYHQSVIDNVRASVAAHPGRPVAIALDTKGPEIRTGNTAGDVDIPISAGTVMNFTTDEKYATACDTQNMYVDYKNITKVIQPGRVIYVDDGVLAFDVLSIKDDQTVEVRARNNGFISSRKGVNLPNTDVDLPALSEKDKADLRFGVKNNVDMVFASFIRRAQDIKDIRDVLGPEGKQIQIIAKIENRQGLNNFAEILEETDGVMVARGDLGIEIPAAEVFAAQKKMIAMCNIAGKPVICATQMLESMIKNPRPTRAEISDVGNAVTDGADCVMLSGETAKGNYPAESIHEMHEASLKAENTIPYVSHFEEMCTLVKRPVSTVESCAMAAVRASLDLGAGGIIVLSTSGDSARLLSKYRPVCPIFMVTRNPTTSRFSHLYRGVYPFLYPEQKPDFDTVNWQEDVDKRIKWAVTRAIELKTLTAGDTVVVVQGWKGGMGNTNTLRIVRADPDHLGIGQME

SEQ ID NO: 8809 - DNA, 1533 bp, Oryza sativa
  CDS (1)..(1533)
atggcggtgatggaggagcagcaggagggagccgcgggggtgatgcggcggaggcccaagacgaagatcgtgtgcacgctggggccggcgtcgaggtcggtggagatgatcgggcggctgctccgcgccgggatgtgcgtcgcgcgcttcaacttctcccacggatcccacgagtaccaccaggagacgctcgacaacctccgcgccgccatggagagcaccggcatcctctgcgccgtcatgctcgacaccaaggggccagagatccgaactggatttctgaaagatggaaaacccgtacagttgaagaagggtcaagaaatcacagtttcaactgattatagcataaagggtgatgacaacatgatatcaatgagctacaagaagctagcggtggatctgaagccaggcagtgtaatattatgtgctgatggcaccatcactcttactgtccttcactgtgataaagagcaaggcttggttcgctgccgttgtgagaacactgctatgcttggtgagaggaagaatgttaaccttccaggagttattgttgatctcccgacacttactgagaaggacaaggaggatattcttaaatggggtgtcccaaacaagattgacatgattgctctgtcttttgttcgtaaaggctcagaccttgtagaggtcaggaaggtgcttgggaagcatgcaaagtcaataatgctgatgtcaaaggttgagaatcaagagggagtggctaactttgatgatatcctggcacaatctgatgcttttatggttgcaaggggtgatttgggaatggaaattccgatagagaagatcttttatgcacagaaggtgatgattttcaagtgcaatattcagggcaagccagttgtgactgcaacccagatgttggaatctatgatcaagtctccccgccctactagagcagaagcgactgatgttgccaatgcagttcttgatggcactgactgtgtcatgctcagtggtgagacagctgctggggcttacccggaactggctgtacggaccatggccaagatctgcctgcaagcggagtcatgcgtcgaccatgccgctgttttcaagtccattaccgcatcagctccaattcccatgagcccattggagagccttgcatcatcagctgtgcgtacagcgaactctgccaaggcggcgctcatcttggtcctgactaggggaggaacaactgctaggctggtggccaagtacaggccatccatgccgattctgtccgtcgtggttcctgagctgaaacagaccgactccttcgactggacctgcagcgacgaagctcctgcgcggcacagcctcatcgtcaggggagtgatcccgatgctgagtgcagccactgccaaggccttcgacaacgaagccactgaagaagctctcgggttcgccatcagcaacgccaaggcgatggggctctgcaactccggtgagtccgtcgtcgccctccaccggatcggaactgcatctgtcatcaagctcctgacagcgaactag

SEQ ID NO: 8810 - protein, 510 aa, Oryza sativa
MAVMEEQQEGAAGVMRRRPKTKIVCTLGPASRSVEMIGRLLRAGMCVARFNFSHGSHEYHQETLDNLRAAMESTGILCAVMLDTKGPEIRTGFLKDGKPVQLKKGQEITVSTDYSIKGDDNMISMSYKKLAVDLKPGSVILCADGTITLTVLHCDKEQGLVRCRCENTAMLGERKNVNLPGVIVDLPTLTEKDKEDILKWGVPNKIDMIALSFVRKGSDLVEVRKVLGKHAKSIMLMSKVENQEGVANFDDILAQSDAFMVARGDLGMEIPIEKIFYAQKVMIFKCNIQGKPVVTATQMLESMIKSPRPTRAEATDVANAVLDGTDCVMLSGETAAGAYPELAVRTMAKICLQAESCVDHAAVFKSITASAPIPMSPLESLASSAVRTANSAKAALILVLTRGGTTARLVAKYRPSMPILSVVVPELKQTDSFDWTCSDEAPARHSLIVRGVIPMLSAATAKAFDNEATEEALGFAISNAKAMGLCNSGESVVALHRIGTASVIKLLTAN

SEQ ID NO: 8811 - DNA, 1752 bp, Oryza sativa
  CDS (1)..(1752)
atggcgcaggtggtggctgcggcagggacggcggcggcggtggcggcggtggggaggccgctgggtggcggcggatctggggccgacgcgctccgcccggcggcgaggctgtcgttcgcgccgcgctggtgcggtgggagcgcgggggcagcaagggcgcgccgcgagtccgccgtcacgtccgtgattagccgcgccccgcgtctcgacgccgaggtgctgccggtgtcggccgacgacgacgcggacgtgaaggaagaagaaaacttccagcatctcaaggccattcagcaacttgcaacatcagccaatggtgtgtggtctaaaccaaatgtgagacgcaagacaaagatcgtgtgcaccattggtccttcaactaacacaaaggagatgatatggaaacttgctgaggctggcatgaatgtggctcggcttaatatgtcacatggagaccatgcatcacaccagaaagttattgacttagtaaaggaatataatgctcaaacaaaggataacgtgattgctattatgcttgacacgaagggaccagaagttaggagtggagatttgcctcaaccaataatgttggaaactggccaggagttcactttcacaattaagagaggagttgggactgagacatgtgttagcgttaactatgatgactttgttaatgatgtagaagtgggtgacatgctcctcgtagatggtggaatgatgtcgttgttggtcaagtccaaaactgaagattcggtaaaatgtgaagttattgatggaggtgaactgaaatccaggcgtcacctgaatgttcgtggaaagagcgcaaccttgccatcaataactgacaaggattgggatgatattaagtttggtgtggagaatcaagttgactactatgccgtttcttttgtcaaagatgctcaagttgtgcatgaattgaaggattatctcagaagctccaatgccgatatacatgtaattgtaaagattgaaagtgcagattccattccaaacctacactcaatcatcacagcatcggatggggctatggttgccagaggtgacttgggagctgaactccctattgaggaggtaccgctgctgcaggaagaaattattagaatgtgcaggagcatgggaaaagctgttattgttgccactaatatgctagaaagtatgattgttcatccaactccaacccgagcagaagtttcagacattgctatagctgttcgagaaggttctgatggcattatgctttctggggaaactgcacacggaaagtttcctttgaaagctgttaaggtcatgcatactgttgccctgagaactgaagccactatgtctggtggggaaacaccggctaaccttggtcaggtgttcaagaatcacatgagtgaaatgtttgcataccattcaacaatgatgtccaacactcttggaacatcaattgtggttttcaccaggacaggatttatggctatcctacttagtcattaccgcccttctggcaccatttttgcctttacggaccaggagagagttagacaacgattggctttgtaccaaggtgtatgtccagtccagatggaattttctgatgatgctgagaagacatttggtgacgctttgtcatacttgctgaaacatggtatggtgaaggaaggcgaggaggttgcacttgttcaaagtggcaggcaacctatctggcggtcgcagtccacccataatattcaggtcaggaaggtttga

SEQ ID NO: 8812 - protein, 583 aa, Oryza sativa
MAQVVAAAGTAAAVAAVGRPLGGGGSGADALRPAARLSFAPRWCGGSAGAARARRESAVTSVISRAPRLDAEVLPVSADDDADVKEEENFQHLKAIQQLATSANGVWSKPNVRRKTKIVCTIGPSTNTKEMIWKLAEAGMNVARLNMSHGDHASHQKVIDLVKEYNAQTKDNVIAIMLDTKGPEVRSGDLPQPIMLETGQEFTFTIKRGVGTETCVSVNYDDFVNDVEVGDMLLVDGGMMSLLVKSKTEDSVKCEVIDGGELKSRRHLNVRGKSATLPSITDKDWDDIKFGVENQVDYYAVSFVKDAQVVHELKDYLRSSNADIHVIVKIESADSIPNLHSIITASDGAMVARGDLGAELPIEEVPLLQEEIIRMCRSMGKAVIVATNMLESMIVHPTPTRAEVSDIAIAVREGSDGIMLSGETAHGKFPLKAVKVMHTVALRTEATMSGGETPANLGQVFKNHMSEMFAYHSTMMSNTLGTSIVVFTRTGFMAILLSHYRPSGTIFAFTDQERVRQRLALYQGVCPVQMEFSDDAEKTFGDALSYLLKHGMVKEGEEVALVQSGRQPIWRSQSTHNIQVRKV

SEQ ID NO: 8813 - DNA, 1584 bp, Oryza sativa
  CDS (1)..(1584)
atgcagggcgccaacatgctcctggacgagcccgtccgcctcacctccgtcctcacccccgtcaagcccaaagtattcccatcactcaccaagattgttgggacccttgggcccaactcacactccgtcgaggttattcaagaatgcctcactgctgggatggcagtcgcacggtttgatttctcatggatggatgcttcatatcatcaggagacccttaacaatctgaggaaagctgcacaaaatgtcaataagctgtgccctgtaatgctggatacactgggtccagaaattcaggttcacaattcaactggtggaccaattgagttgaaagctggaaatcatgtcaccataacaccagatctttctaaagctccctcttctgaaatcttgccaattaagtttggtggtcttgcaaaagctgtcaagaagggtgatactctttttattggtcaatatctcttcacaggaagtgaaacaacatcttcgtggcttgaggttgtggaaacttctggagaaaatgttgaatgtcttgtgaccaatacagctacacttgcaggccccatgttcactttgcatgtttcaaaagcccatgtcagtttaccaactttgagtgattatgataaagaggtcatttcaacttggggattacataacagtgttgatattatatcactttcccatacccgctctgccgaggatgtcagggagcttagatcttttcttcaatctcatggccttcaggacacacagatatatgccaaggttgaaaatactgagggtttggatcattttgatgaaattctccaagaagctgatggcgtcattatttcacggggagacctgggaattgaccttccaccagaagatgtgttcatatcccaaaaaacagctattaagaaatgcaatcttgctggcaaacctgtgatcatcactagagttgtggacagcatgattgacaatctacgcccaacacgtgcagaggccactgatgttgcaaatgctgtcctagatggaacggatggcattttgcttggtgcggagactcatcgaggcccttatccagttgatgcagtgagtactgttgggagaatatgtgcagaagctgagtctgtgtataaccagttggttcacttcaagaaattagtgaagcatgtaggtgatccaatgccccatgaagaatctgtggcatcttcagcggttcgcactgcaatgaaggtaaaagctgctgcaatcgttgtgttcactttctcaggaagagctgccaggttagttgccaagtacaagccaccaatgccagtgttggccgttgtcttcccacgtgagggctctgatccaacaaagtggcgttcttacggcacaactcaggcaaggcaatgttttgctgcaagaggtgtctaccctttgatggcgagtactgaggaggctgaaactggtgggctcaccagggaagagtacgggataaaacttgcacagaactatggtcgctcggttggtatgctaaagccctatgacaggttgatcattttccagaagatcggcgattcatctgttgtcaagatcatcgagtgtgacagttcgtaa

SEQ ID NO: 8814 - protein, 527 aa, Oryza sativa
MQGANMLLDEPVRLTSVLTPVKPKVFPSLTKIVGTLGPNSHSVEVIQECLTAGMAVARFDFSWMDASYHQETLNNLRKAAQNVNKLCPVMLDTLGPEIQVHNSTGGPIELKAGNHVTITPDLSKAPSSEILPIKFGGLAKAVKKGDTLFIGQYLFTGSETTSSWLEVVETSGENVECLVTNTATLAGPMFTLHVSKAHVSLPTLSDYDKEVISTWGLHNSVDIISLSHTRSAEDVRELRSFLQSHGLQDTQIYAKVENTEGLDHFDEILQEADGVIISRGDLGIDLPPEDVFISQKTAIKKCNLAGKPVIITRVVDSMIDNLRPTRAEATDVANAVLDGTDGILLGAETHRGPYPVDAVSTVGRICAEAESVYNQLVHFKKLVKHVGDPMPHEESVASSAVRTAMKVKAAAIVVFTFSGRAARLVAKYKPPMPVLAVVFPREGSDPTKWRSYGTTQARQCFAARGVYPLMASTEEAETGGLTREEYGIKLAQNYGRSVGMLKPYDRLIIFQKIGDSSVVKIIECDSS

SEQ ID NO: 8815 - DNA, 1533 bp, Brassica napus
  CDS (1)..(1533)
atgtcgaacatagacattgaagggatattgaaggagctacctaacgatgggaggatcccaaaaaccaagatcgtttgcactctaggaccagcttctcgcactgttcctatgatcgaaaagcttctcagagccggtatgaacgtcgctcgcttcaacttctcacatggcagccatgagtatcaccaaggcacactcgacaacctccgcaccgctatgcagaacacaggcattctcgccgccgtcatgcttgacacaaagggacctgagattcgtactggtttcttgaaagatgggaaccctatacaactcaaggaaggccaagagatcactatcaccactgactacgaaactttaggagatgagacgacgatctccatgagctataagaagcttcccttagatgtgaagcccggaaacaccatactctgtgcagatggaagcataagtctagctgtcttgtcatgtgatccagagtctggaactgttaggtgcaggtgcgaaaacacggcgatgcttggcgagagaaagaacgtgaatctccccggtgtcgttgttgatctccccactctgacagacaaggatattgaagatattatgggttggggtgttcctaacagcatcgatatgattgcgctttcttttgtccgtaaaggctcagatcttgttaatgtcaggagggttcttggttctcatgctaaaagcattatgctgatgtcaaaggttgagaaccaggaaggagtggtgaactttgatgagatactgcgcgaaacagatgcattcatggtcgctcgtggtgatctcgggatggagattcccatagagaagatcttcttagctcagaagctgatgatctacaagtgcaaccttgcaggcaaaccagtggtgacagccactcagatgcttgagtcaatgatcaagtcaccaaggccaacacgtgctgaagccacggacgttgccaacgccgtccttgacggcacagactgcgtgatgctcagcggagagagcgcagcaggagcttatccggagatagccgtgaaagtcatggccaagatctgcattgaagcggagagctctcttgactacaacacgatctttaaagagaggatcagagcaactccggttccaatgagcccgttagagagtcttgcatcgtcagctgtgagggctgcgaacaaagcgcatgcgaagctcatcattgtgttgactcgtggaggctcaacagctaagcttgtagctaagtacagaccctctgttccgattctttcggtggttgtaccagttatgaccacggattcctttgactggacttgtagtgacgagtcgcctgcaaggcatagtttgatatacagaggtttgatccctatgttggctgaaggatctgcaaaggcgacagatagtgagtccacagaggttatcattgaatccgctttgaagtcagctgtgcagagaggactgtgcaaccatggtgatgctgttgtggcgctgcaccgtattggagtcgcctcggttattaagatctgtgtggttaagtaa

SEQ ID NO: 8816 - protein, 510 aa, Brassica napus
MSNIDIEGILKELPNDGRIPKTKIVCTLGPASRTVPMIEKLLRAGMNVARFNFSHGSHEYHQGTLDNLRTAMQNTGILAAVMLDTKGPEIRTGFLKDGNPIQLKEGQEITITTDYETLGDETTISMSYKKLPLDVKPGNTILCADGSISLAVLSCDPESGTVRCRCENTAMLGERKNVNLPGVVVDLPTLTDKDIEDIMGWGVPNSIDMIALSFVRKGSDLVNVRRVLGSHAKSIMLMSKVENQEGVVNFDEILRETDAFMVARGDLGMEIPIEKIFLAQKLMIYKCNLAGKPVVTATQMLESMIKSPRPTRAEATDVANAVLDGTDCVMLSGESAAGAYPEIAVKVMAKICIEAESSLDYNTIFKERIRATPVPMSPLESLASSAVRAANKAHAKLIIVLTRGGSTAKLVAKYRPSVPILSVVVPVMTTDSFDWTCSDESPARHSLIYRGLIPMLAEGSAKATDSESTEVIIESALKSAVQRGLCNHGDAVVALHRIGVASVIKICVVK

SEQ ID NO: 8817 - DNA, 1716 bp, Brassica napus
  CDS (1)..(1716)
atggcggcgacaggtcaaatctcgacgagaatgacggtggatcgcactctgtcctcctccaggaacgctggactttccctttcaccatcaccccagagaacgctaatcggcgtcgccggtaggtctggtatcgctcaccgtcaactgtctctctccgtcagagcgattaacaccaatgaagatagccggaaagtcaaggtttatgcagagaacggcgctttcgatttgggagtgatggatccttcagtggagccatataaatttgcggagccaagaacaagtcataatgattcgaggaggaaaaccaagattgtgtgtaccattggaccttcctctagctctcgtgaaatgatttggaaactcgcggaagcaggaatgaatgtggctcgtttgaatatgtctcatggagatcatgcttctcatcagattactattgatcttgttaaagaatacaactctctctttgttgacaaagccattgctatcatgttggatacaaagggtcctgaggttcgaagtggggatgtacctcagccgatcttccttgaagagggtcaagagtttaattttaccatcaagagaggtgtctcaatgaaagacaccgtcagtgtcaactatgatgattttgttaacgatgtcgaagttggagacatacttttggtcgatggtggaatgatgtcactagctgttaagtccaagacgagcgatttggtgaaatgtgtagttattgacggtggagagcttcaatctagacgtcacttgaatgttcgaggaaagagtgctactcttccttccataacagacaaagattgggaagacatcaaatttggagtggacaaccaagttgatttctatgctgtctcttttgttaaggatgctaaagttgtccatgagttgaaaaactacctcaaaagctgcagtgcggatatctctgtgattgtgaaaattgaaagcgcagattctataaagaatcttccttccattatatctgcttgtgatggggcaatggttgctcgtggagatcttggagctgaacttcccattgaggaggttcccttgttacaggaggagataatcacaaggtgtaggaacattcataaaccagtgattgtcgccacaaacatgctagagagtatgattaatcatccaacacctacaagagctgaagtatctgacattgcaattgcagtgcgcgaaggagcagatgcaatcatgctttctggtgaaaccgcacacggaaagtttcctctgaaagctgttaacgtgatgcataccgtggctttgagaactgaggctagtctacctgttagaacctcagcaatccggaccactgcttacaagggtcgcatgggccaaatgtttgctttccatgcttctataatggcgaatacactgaacacaccgatcattgtgttcacaagaactggatccatggcagtgcttctgagtcactaccgcccgtcctcaacaattttcgccttcacaaaccagaggagaataatgcaaaggctggctctttaccaaggtgtcatgcctatatacatggagttttctgatgatgcagaagatacatatgcccgttccttgaaactcctacaggacgagaatatgcttaaggaaggacaacatgtaactcttgtccaaagtggtgcgcaacccatttggcgtgaagaatcaacacatctcatacaagtccgtaagattaagataggttga

SEQ ID NO: 8818 - protein, 571 aa, Brassica napus
MAATGQISTRMTVDRTLSSSRNAGLSLSPSPQRTLIGVAGRSGIAHRQLSLSVRAINTNEDSRKVKVYAENGAFDLGVMDPSVEPYKFAEPRTSHNDSRRKTKIVCTIGPSSSSREMIWKLAEAGMNVARLNMSHGDHASHQITIDLVKEYNSLFVDKAIAIMLDTKGPEVRSGDVPQPIFLEEGQEFNFTIKRGVSMKDTVSVNYDDFVNDVEVGDILLVDGGMMSLAVKSKTSDLVKCVVIDGGELQSRRHLNVRGKSATLPSITDKDWEDIKFGVDNQVDFYAVSFVKDAKVVHELKNYLKSCSADISVIVKIESADSIKNLPSIISACDGAMVARGDLGAELPIEEVPLLQEEIITRCRNIHKPVIVATNMLESMINHPTPTRAEVSDIAIAVREGADAIMLSGETAHGKFPLKAVNVMHTVALRTEASLPVRTSAIRTTAYKGRMGQMFAFHASIMANTLNTPIIVFTRTGSMAVLLSHYRPSSTIFAFTNQRRIMQRLALYQGVMPIYMEFSDDAEDTYARSLKLLQDENMLKEGQHVTLVQSGAQPIWREESTHLIQVRKIKIG

SEQ ID NO: 8819 - DNA, 1584 bp, Brassica napus
  CDS (1)..(1584)
atgcattcgagccatctccttctcgaggagccgatcaggatggcttctatcctcgagccatccaaatccagcttctttccggcgttaactaagatcgtcgggactctcggtcccaaatccagatccgttgagacactctccggctgtctcaaatccggcatgtctgtggctagattcgatttctcttggggagacgctgagtatcaccaagagacgcttgataatctgaagattgctgttaagagcaccaagaagctttgtgctgttatgcttgatacagtgggacctgagcttcaagtgatcaacaagtctgagaaagctattactcttaaagctgatggacttgttactttgactcctaatcaagaccgagaagcctcttctgaagtccttcccattaactttgatggccttgccaaggcggtgaagaaaggagacactatctttgttgggcagtacctattcactggtagtgaaacaacttcagtttggctcgaggttgatgaagttaaaggagatgatgtcatttgcctttcaaggaatgctgctactctcgctggttctatgttcaccttgcacgcctctcaagttcacatcgatatgccaactcttactgagaaagataaagaggttataagcacatggggagttcaaaacaaaatcgactttctctcgttgtcctattgtcgccatgcagaggatgttcgccagacccgtgagatgcttaaaaagttgggtgacctctctcaaacacaaatatttgccaagattgagaacgttgagggactaaaccactttgatgagattctacaagaagctgatggaattattctttctcgtgggaacttgggtattgatctacccccggagaaggtgtttttgtttcaaaaggcggctctttacaagtgcaacatggcaggaaagccagccgttcttactcgtgttgttgatagtatgactgacaacttgcgaccaactcgtgcagaggcaacagatgttgctaatgctgttttagatggaagtgatgcaattcttctcggtgctgagactcttcgcggtctgtaccctgtggagactatatcaactgtcggaaggatctgtgctgaggcagagaaggttttcaatcaagatttgtacttcaagaagactgtcaagtatgttggagagccgatgtctcacctcgaatccattgcttcttcagctgtaagggcagcaatcaaggttaaggcatccgtcattatatgctttacctcttctggaagagcagccaggttgattgctaaatacaggccaacaatgccggttatttctgtagtcattccacgggttaagacaaatcagctaaaatggagcttcagtggagcctttgaggctaggcagtcacttattgtcaggggcctcttccccatgcttgctgaccctcgtcaccctgcggaatcaacaagtgcgacgaacgagtcagtcctgaaggttgcgttagaccacgggaagcaagcaggagtgatcaagtcgcacgacagagtagtggtgtgtcagaaagttggtgatgcatctgtggtcaagatcatcgagcttgaggattga

SEQ ID NO: 8820 - protein, 527 aa, Brassica napus
MHSSHLLLEEPIRMASILEPSKSSFFPALTKIVGTLGPKSRSVETLSGCLKSGMSVARFDFSWGDAEYHQETLDNLKIAVKSTKKLCAVMLDTVGPELQVINKSEKAITLKADGLVTLTPNQDREASSEVLPINFDGLAKAVKKGDTIFVGQYLFTGSETTSVWLEVDEVKGDDVICLSRNAATLAGSMFTLHASQVHIDMPTLTEKDKEVISTWGVQNKIDFLSLSYCRHAEDVRQTREMLKKLGDLSQTQIFAKIENVEGLNHFDEILQEADGIILSRGNLGIDLPPEKVFLFQKAALYKCNMAGKPAVLTRVVDSMTDNLRPTRAEATDVANAVLDGSDAILLGAETLRGLYPVETISTVGRICAEAEKVFNQDLYFKKTVKYVGEPMSHLESIASSAVRAAIKVKASVIICFTSSGRAARLIAKYRPTMPVISVVIPRVKTNQLKWSFSGAFEARQSLIVRGLFPMLADPRHPAESTSATNESVLKVALDHGKQAGVIKSHDRVVVCQKVGDASVVKIIELED

SEQ ID NO: 8821 - DNA, 1584 bp, Brassica napus
  CDS (1)..(1584)
atgcattcgagtcatctccttctcgaggaaccgatcaggatggcatcaatcctcgagccatccaaatctagcttcttcccagcattgactaagatcgtcgggactctcggtcccaaatcccgatccgtcgagactctctccggttgcctcaaatccgggatgtccgtggctcgatttgatttctcttggggagatgctgagtatcaccaggagacgctggataatctgaaaattgctgtgaagagcactaagaagctttgtgctgttatgcttgatactgtgggacctgagctgcaagttatcaacaagtctgggaaagctattactcttaaagccgatggacttgttactttgacacccagtcaagatcgagaagcgtcttctgaagtccttccgattaactttaatgggcttgccaaggcagtgaagaagggagacactatctttgttgggcaatacctattcactggtagtgaaacaacttcagtttggctcgaggttgatgaagttaaaggagatgatgtcatttgcctgtcaaggaatgctgctactcttgctggttctctcttcactctgcacgcctctcaagttcacatcgatctgccaactcttacggagaaagataaggaggttataagcacatggggagttcagaataaaatcgattttctctctttgtcttattgtcgtcatgcggaggatgttcgccagacccgcgaaatgcttaagaagttgggtgacctctctcaaacacaaatatttgccaagattgagaatgtagagggacttaaccactttgatgagattctacaagaagctgatggaattattctttctcgtgggaatttgggtattgatctacccccggaaaaggtgtttttgtttcaaaaggcggctctttacaagtgcaacatggctggaaaaccagccgttcttacccgtgtcgttgatagtatgactgacaacttgcgaccaactcgtgcagaggcaacagatgttgctaatgctgttctagatggaagtgatgcaattcttcttggtgctgagacccttcgcggtttataccctgttgagacaatatccactgtcggtagaatctgtgctgaggcagaaaaggttttcaatcaggacttgtacttcaagaagactgtcaagtatgtaggagaaccgatgtctcacttggaatccattgcttcttcagctgtacgggcagcaatcaaggttaaggcatctgtcattatatgcttcacctcttctggaagagcagcaaggttaattgccaaatacaggccaacaatgcccgttatttctgttgtcattccccgggttaagacaaatcagctgaaatggagctttagtggagcctttgaggcgaggcagtcacttattgtcagaggccttttccccatgctcgctgatcctcgtcacccagcggaatcaacaagtgcgacgaacgagtcagtcctcaaggttgcactagaccatggaaagcaagcaggagtgatcaaatcgcatgacagagtagtggtgtgtcagaaagttggtgatgcttctgtggtgaagatcatcgagctagaggattaa

SEQ ID NO: 8822 - protein, 527 aa, Brassica napus
MHSSHLLLEEPIRMASILEPSKSSFFPALTKIVGTLGPKSRSVETLSGCLKSGMSVARFDFSWGDAEYHQETLDNLKIAVKSTKKLCAVMLDTVGPELQVINKSGKAITLKADGLVTLTPSQDREASSEVLPINFNGLAKAVKKGDTIFVGQYLFTGSETTSVWLEVDEVKGDDVICLSRNAATLAGSLFTLHASQVHIDLPTLTEKDKEVISTWGVQNKIDFLSLSYCRHAEDVRQTREMLKKLGDLSQTQIFAKIENVEGLNHFDEILQEADGIILSRGNLGIDLPPEKVFLFQKAALYKCNMAGKPAVLTRVVDSMTDNLRPTRAEATDVANAVLDGSDAILLGAETLRGLYPVETISTVGRICAEAEKVFNQDLYFKKTVKYVGEPMSHLESIASSAVRAAIKVKASVIICFTSSGRAARLIAKYRPTMPVISVVIPRVKTNQLKWSFSGAFEARQSLIVRGLFPMLADPRHPAESTSATNESVLKVALDHGKQAGVIKSHDRVVVCQKVGDASVVKIIELED

SEQ ID NO: 8823 - DNA, 1584 bp, Brassica napus
  CDS (1)..(1584)
atgcattcgagccatctccttctcgaggagccgatcaggatggcttctatcctcgagccatccaaatccagcttctttccggcgttaactaagatcgtcgggactctcggtcccaaatccagatccgttgagacactctccggctgtctcaaatccggcatgtctgtggctagattcgatttctcttggggagacgctgagtatcaccaagagacgcttgataatctgaagattgctgttaagagctccaagaagctttgtgctgttatgcttgatacagtgggacctgagcttcaagtgatcaacaagtctgagaaagctattactcttaaagctgatggacttgttactttgactcctaatcaagaccgagaagcctcttctgaagtccttcccattaactttgatggccttgccaaggcggtgaagaaaggagacactatctttgttgggcagtacctattcactggtagtgaaacaacttcagtttggctcgaggttgatgaagttaaaggagatgatgtcatttgcctttcaaggaatgctgctactctcgctggttctatgttcaccttgcacgcctctcaagttcacatcgatatgccaactcttactgagaaagataaagaggttataagcacatggggagttcaaaacaaaatcgactttctctcgttgtcctattgtcgccatgcagaggatgttcgccagacccgtgagatgcttaaaaagttgggtgacctctctcaaacacaaatatttgccaagattgagaacgttgagggactaaaccactttgatgagattctacaagaagctgatggaattattctttctcgtgggaacttgggtattgatctacccccggagaaggtgtttttgtttcaaaaggcggctctttacaagtgcaacatggcaggaaagccagccgttcttactcgtgttgttgatagtatgactgacaacttgcgaccaactcgtgcagaggcaacagatgttgctaatgctgttttagatggaagtgatgcaattcttctcggtgctgagactcttcgcggtctgtaccctgtggagactatatcaactgtcggaaggatctgtgctgaggcagagaaggttttcaatcaagatttgtacttcaagaagactgtcaagtatgttggagagccgatgtctcacctcgaatccattgcttcttcagctgtaagggcagcaatcaaggttaaggcatccgtcattatatgctttacctcttctggaagagcagccaggttgattgctaaatacaggccaacaatgccggttatttctgtagtcattccacgggttaagacaaatcagctaaaatggagcttcagtggagcctttgaggctaggcagtcacttattgtcaggggcctcttccccatgcttgctgaccctcgtcaccctgcggaatcaacaagtgcgacgaacgagtcagtcctgaaggttgcgttagaccacgggaagcaagcaggagtgatcaagtcgcacgacagagtagtggtgtgtcagaaagttggtgatgcatctgtggtcaagatcatcgagcttgaggattga

SEQ ID NO: 8824 - protein, 527 aa, Brassica napus
MHSSHLLLEEPIRMASILEPSKSSFFPALTKIVGTLGPKSRSVETLSGCLKSGMSVARFDFSWGDAEYHQETLDNLKIAVKSSKKLCAVMLDTVGPELQVINKSEKAITLKADGLVTLTPNQDREASSEVLPINFDGLAKAVKKGDTIFVGQYLFTGSETTSVWLEVDEVKGDDVICLSRNAATLAGSMFTLHASQVHIDMPTLTEKDKEVISTWGVQNKIDFLSLSYCRHAEDVRQTREMLKKLGDLSQTQIFAKIENVEGLNHFDEILQEADGIILSRGNLGIDLPPEKVFLFQKAALYKCNMAGKPAVLTRVVDSMTDNLRPTRAEATDVANAVLDGSDAILLGAETLRGLYPVETISTVGRICAEAEKVFNQDLYFKKTVKYVGEPMSHLESIASSAVRAAIKVKASVIICFTSSGRAARLIAKYRPTMPVISVVIPRVKTNQLKWSFSGAFEARQSLIVRGLFPMLADPRHPAESTSATNESVLKVALDHGKQAGVIKSHDRVVVCQKVGDASVVKIIELED

SEQ ID NO: 8825 - DNA, 1581 bp, Glycine max
  CDS (1)..(1581)
atgcattccagccctttgcttcttgaggaacccattaggatggcatccatccttgagccatccaagcctactttttttccggctatgacgaaaattgttggcacacttggtccaaagtcacgatcagttgatataatttcccattgccttgatgcaggaatgtctgtggcaaggtttgacttttcatggggtgatccagaataccatcaagagacattggaaaatttgagagttgctatcaaaagtaccaagaaactctgtgcggttatgctagatactgtgggtccagaattacagattgagaataagactgatcacccaatcacccttgaagcagacacattagttgtcttaactccagatcaaaataaagaagctagttcaaatctcttaccattaaattttaccgggctatcaaaggctgtgaagaagggtgatactatttttattggaaaatacttgtttactggaagtgaaacagcttctgtatggctggaggtcagtgaggtggaaggtgaggatgtcacctgtctggtaaaaaacactgccacactctctggatcattgtttactgtacatgtctctcagattcacatcgatcttcctactcttgctgataaagataaggaggtaataagcacatggggtgttcaaaacaatattgacttcctttcattatatacccggcacgttgaagatattcgtcatgcacgtgaatttctctctaaattgggtgacctgaagcagacacatatttatgcaaagattgaaaatatagagggaatgaaacattttgatgaaatattgagagaagcagatggtatcatcctcgctcgtggaaatttagggatagaactcccacctgagaaggttttcttattccaaaaggctgctatttacaagtgtaacatggttggaaagccagttgttgttacacgtgttgtggactctatgactgataatctaagacctactcgtgctgaagcaacagatgttgccaatgcagtgttggatggaagtgacgcaattctccttggagcagagaccctgcggggacaataccctgtagagaccatttctatagttggaaaaatatgtgctgaggcagagaaagttcataatcaagatttgtattttaagaaggctgtaaaatatgtgggagagccaatgagccatttggaatcaattgcttcctctgcggttcgggcagctatcaaggttaaggcctctgttattatttgcttcacttcatctggaagagctgcaagattgattgctaagtacagaccaaccatgcctgtgatatctgttgtcattcctcaattgaagacaaatcaactccgatggacgttcaccggtgcttttgaggctaggcaatctcttattgtgagaggtctttttcctatgctggcagatccacgacacccagctgagtccagaagtggaacaaatgaatcaattttgaaggttgctttagaccatggcaaggcttttggcatcataaagccacatgaccgagttgttgtctgccagaaagtagctgactcgtcagttgtgaagattcttgagctcgaagattga

SEQ ID NO: 8826 - protein, 526 aa, Glycine max
MHSSPLLLEEPIRMASILEPSKPTFFPAMTKIVGTLGPKSRSVDIISHCLDAGMSVARFDFSWGDPEYHQETLENLRVAIKSTKKLCAVMLDTVGPELQIENKTDHPITLEADTLVVLTPDQNKEASSNLLPLNFTGLSKAVKKGDTIFIGKYLFTGSETASVWLEVSEVEGEDVTCLVKNTATLSGSLFTVHVSQIHIDLPTLADKDKEVISTWGVQNNIDFLSLYTRHVEDIRHAREFLSKLGDLKQTHIYAKIENIEGMKHFDEILREADGIILARGNLGIELPPEKVFLFQKAAIYKCNMVGKPVVVTRVVDSMTDNLRPTRAEATDVANAVLDGSDAILLGAETLRGQYPVETISIVGKICAEAEKVHNQDLYFKKAVKYVGEPMSHLESIASSAVRAAIKVKASVIICFTSSGRAARLIAKYRPTMPVISVVIPQLKTNQLRWTFTGAFEARQSLIVRGLFPMLADPRHPAESRSGTNESILKVALDHGKAFGIIKPHDRVVVCQKVADSSVVKILELED

SEQ ID NO: 8827 - DNA, 1545 bp, Triticum aestivum
  CDS (1)..(1545)
atggccaacatcgacatggcggcggtgctggcggacctggagcgggacgcggcggcggacgcccgcaccccgcggaccaagctggtgtgcacgctcggcccggcctcccgctccgtgcccatgctcgagaagctgctccgcgccggcatgaacgtcgcgcgcttcaacttctcccacggcacccacgagtaccacaaggagaccctcgacgccctccgccaggccatgcacaacaccggcatcctctgcgccgtcatgctcgacaccaagggacctgagattcgtactggatttttgaaggatggtaaaccaatcaaactgacaaagggtcaagaaatcactgtttccaccgactatgatatcaagggcgacacgaacacgatctccatgagttacaagaaacttcctcaggatgtgaagcctgggcatgtcatactatgtgctgatggtaccatctccttggctgttctctcttgcgacccagcagctggaactgtcagatgtaggtgtgagaacactgcaatgcttggagagaggaagaattgtaatctgccaggaattgtcgtggaccttcctacactaacggagaaggataaggaggacattttggaatggggtgtgcctaatgacattgacatgattgctttgtcgtttgtccgcaaaggatcagatttggtgaccgtcaggcagcttcttggacagcatgcaaagcgcatcaagttaatgtcaaaggttgaaaaccaggagggcattgtgaactttgatgacattctgagggaaaccgatgcctttatggttgccagaggtgatcttggaatggagattccagttgagaagatattcctggcccaaaaaatgatgatttacaagtgcaaccttgctggcaagcctgttgtcacagcgacccagatgcttgagtcaatgatcaagtccccgaggccaacccgtgccgaggctactgacgtcgcaaatgcggtgcttgatggaaccgactgtgtcatgctcagtggtgaaagcgctgctggagcataccctgaggtggctgtgaagatcatggctcgcatctgcgtggaggcagagtcttccctggacaacgacgccgtcttcaaggagatgatcaaggccgcgcccctcccgatgagcccgctggagtcccttgcgtcttccgccgtgcggaccgccaacaaggccagggccactctgatcgtcgtcctgacccgtggcggcaccactgcgaagctggtggccaagtaccgccccagggtcccgatcctctcggtggttgtcccagtgctgacaaccgactcgttcgactggaccgtcagctccgagggcccggccaggcacagcctgatctacaggggcctgatcccgctcctcgccgagggctccgccaaggccaccgactcggagtcgacggaggagatcctccaggcggcgctcaagtcggccgtgaagaagcagctctgcaaggccggcgacgccgtagtcgtcctgcaccgcatcggcatggcctccgtcatcaagatctgcaccgtcaagtga

SEQ ID NO: 8828 - protein, 514 aa, Triticum aestivum
MANIDMAAVLADLERDAAADARTPRTKLVCTLGPASRSVPMLEKLLRAGMNVARFNFSHGTHEYHKETLDALRQAMHNTGILCAVMLDTKGPEIRTGFLKDGKPIKLTKGQEITVSTDYDIKGDTNTISMSYKKLPQDVKPGHVILCADGTISLAVLSCDPAAGTVRCRCENTAMLGERKNCNLPGIVVDLPTLTEKDKEDILEWGVPNDIDMIALSFVRKGSDLVTVRQLLGQHAKRIKLMSKVENQEGIVNFDDILRETDAFMVARGDLGMEIPVEKIFLAQKMMIYKCNLAGKPVVTATQMLESMIKSPRPTRAEATDVANAVLDGTDCVMLSGESAAGAYPEVAVKIMARICVEAESSLDNDAVFKEMIKAAPLPMSPLESLASSAVRTANKARATLIVVLTRGGTTAKLVAKYRPRVPILSVVVPVLTTDSFDWTVSSEGPARHSLIYRGLIPLLAEGSAKATDSESTEEILQAALKSAVKKQLCKAGDAVVVLHRIGMASVIKICTVK

SEQ ID NO: 8829 - DNA, 1584 bp, Triticum aestivum
  CDS (1)..(1584)
atgcattccaccaatctgctcctcgaggagcccatccggatggtctccatcctcgagccatccaagccgaacttcttcccggcgatgacgaagattgtggggacgctgggtccgaagtcccggtccgttgaggccatctccgcctgtctaaaggccggcatgtctgtggcccgtttcgatttctcgtggggggatgccgcgtaccaccaggagacactcgagaacctcaagctcgccatcaaggccaccaagaagctatgtgctgttatgctcgacactgttggccctgagttgcaagtggtgaacaagagtgaagtcacaatctcgcttgaagagaacgagtctgttgttctcacccctcaccagggccaggaggcctcttccaagttgctccctatcaacttcgctggactcgccaaggctgtgaagcccggagccacaatattcgttgggcaatatttgttcacgggcagtgagactacatcagtttggctggaggtttctgaagttcaaggggatgacgtggtttgcgtgatcaagaactcagctaccctggctgggtcactcttcacattgcactgctcccagatccatatcgacatgcccacgctgtctgatgaggataaagatgttatgaaaaaatggggtgctccaaacaagattgacttcctctctctttcttatacaaggcatgcagaagatgtgcggcaagcacgggagttcctctctaagttaggtgatcttagccaaactctgatttttgccaaaattgagaatgtggagggcttgaaccattttgatgagatcctggaggaagcggatggtatcattctgtcaagagggaaccttggaattgatcttccacctgaaaaggtgttcttatttcagaagtctgctctgcacaagtgcaacatggctggaaagcctgctgttgttactcgtgttgtggacagtatgacggacaacctaaggcctactcgtgcggaggcaactgatgtggcaaatgcggtgctggacggtagtgatgccattctccttggtgctgagactctccgtgggttgtatccagtcgagactatttcaacagtgggcagaatttgtgctgaggctgagaaggtcttcaaccaagatttgtatttcaagcgaaccgtgaaatatgtgggagaacccatgacccacttggagtctattgcttcctctgcagtgcgggctgctattaaagttaaggcttcggtcatcatttgcttcacttcatctggacgggctgcaaggctaattgccaagtacaggcccaccatgcctgtcctgtccgttgtcattcctcgtctgaaaacaaatcaattgaagtggagcttcacaggtgcatttgaggcaagacaatcactcatagttagaggcctctttcccatgcttgctgatccacgtcatccggctgattctactagcactacaaatgaatcagtgttgaaggttgctcttgaccacggcaaagcatctggtgtgatcaagtcgcatgaccgtgtcgtcgtgtgccagaaagtgggagattcctctgtcgtgaagatcattgagctagacgactag

SEQ ID NO: 8830 - protein, 527 aa, Triticum aestivum
MHSTNLLLEEPIRMVSILEPSKPNFFPAMTKIVGTLGPKSRSVEAISACLKAGMSVARFDFSWGDAAYHQETLENLKLAIKATKKLCAVMLDTVGPELQVVNKSEVTISLEENESVVLTPHQGQEASSKLLPINFAGLAKAVKPGATIFVGQYLFTGSETTSVWLEVSEVQGDDVVCVIKNSATLAGSLFTLHCSQIHIDMPTLSDEDKDVMKKWGAPNKIDFLSLSYTRHAEDVRQAREFLSKLGDLSQTLIFAKIENVEGLNHFDEILEEADGIILSRGNLGIDLPPEKVFLFQKSALHKCNMAGKPAVVTRVVDSMTDNLRPTRAEATDVANAVLDGSDAILLGAETLRGLYPVETISTVGRICAEAEKVFNQDLYFKRTVKYVGEPMTHLESIASSAVRAAIKVKASVIICFTSSGRAARLIAKYRPTMPVLSVVIPRLKTNQLKWSFTGAFEARQSLIVRGLFPMLADPRHPADSTSTTNESVLKVALDHGKASGVIKSHDRVVVCQKVGDSSVVKIIELDD

SEQ ID NO: 8831 - DNA, 1707 bp, Zea mays
  CDS (1)..(1707)
atggcggcagcggcggagatcggtggtttcgcggcggcgagagtggcggtggcgacgctcaggccggctgcgcacccagccccggcggcggcaccgcagcagcctaggagggcggtggcggcgcagtcgctgcggacgaccgccaccgaggcgctgacggcggatctcgccggcacgaccaacggcgctgtgcatgctcggatgaatagtaaggctacaagtgaaatcacttcacaggcagttactgcaaattctaggagaaagacaaagatagtctgcaccataggtccctcaaccaacactcgtgagatgatttggaagcttgcagagactggaatgaatgtagcacgccttaatatgtcccatggtgaccaccagtcgcaccagaaggttattgatttggtcaaggagtacaatgcacagaacactgatggcaatgttattgccattatgctggacacaaagggtcctgaagttagaagtggggatgttccagagccaatcatgctcaaggaaggtcaagagttcaacttcacgattaaaagaggggtgagcactgaagacactgtcagcgtgaactatgatgacttcataaatgatgttgaagctggcgacatactattagtggatggaggaatgatgtcgcttgctgtgaagtctaaaacaaccgatacagtcaagtgtaaagtagttgatggtggggaattgaaatcacggcgccacctaaatgtccgtggaaagagtgctactttgccatctatcactgagaaggattgggaagacataaaatttggtgtcgaaaacggtgttgatttctatgcagtttcctttgtgaaggatgccaaagttatccatgaattaaaagactaccttaaaagtgctaatgccgatatacatgtcattccaaaaattgaaagtgcagattcaataccaaacctgcagtccattattgctgcttcagatggggcaatggtggcgcgtggagaccttggtgctgaacttccgattgaggatgttcctttgctacaggcagagattgtccaaacatgtcgaagtatggagaaaccagtcattgtcgctacaaatatgttggaaagcatgattgaccatcctactcccactagggcagaagtttctgacatagctattgcagttcgggaaggtgctgatgccatcatgttatctggcgaaactgctcatggaaagtatccactaaaggcagtcaaggtgatgcacactgtggcactcagaacagaatccagcctttataacccaactacttctcctagtcttgttgcatctgcacagggtctacagaatgaggacttctccccaagccagctaagtaaaatgttcggatctcatgcaacgatgatggccaacacccttcgcacaccaatcattgtatttacacagacaggctccatggctgtcctcctgagccattatcgtccctcgtctacactatttgcatttacaaacgaggaacgagtgaagcaacggctagcactctaccagggcgtcatccctattcacatgcagttctctgacgacgcagaagaaactttctccagagcaattagcagcttgctgaaagcacaatatgtgaagaagggagactacgtcactcttgttcagagcggagtgacttcaatctggagagaggaatccactcaccacatccaagtgaggaaagttcaggtctga

SEQ ID NO: 8832 - protein, 568 aa, Zea mays
MAAAAEIGGFAAARVAVATLRPAAHPAPAAAPQQPRRAVAAQSLRTTATEALTADLAGTTNGAVHARMNSKATSEITSQAVTANSRRKTKIVCTIGPSTNTREMIWKLAETGMNVARLNMSHGDHQSHQKVIDLVKEYNAQNTDGNVIAIMLDTKGPEVRSGDVPEPIMLKEGQEFNFTIKRGVSTEDTVSVNYDDFINDVEAGDILLVDGGMMSLAVKSKTTDTVKCKVVDGGELKSRRHLNVRGKSATLPSITEKDWEDIKFGVENGVDFYAVSFVKDAKVIHELKDYLKSANADIHVIPKIESADSIPNLQSIIAASDGAMVARGDLGAELPIEDVPLLQAEIVQTCRSMEKPVIVATNMLESMIDHPTPTRAEVSDIAIAVREGADAIMLSGETAHGKYPLKAVKVMHTVALRTESSLYNPTTSPSLVASAQGLQNEDFSPSQLSKMFGSHATMMANTLRTPIIVFTQTGSMAVLLSHYRPSSTLFAFTNEERVKQRLALYQGVIPIHMQFSDDAEETFSRAISSLLKAQYVKKGDYVTLVQSGVTSIWREESTHHIQVRKVQV

SEQ ID NO: 8833 - DNA, 1497 bp, Helianthus annuus
  CDS (1)..(1497)
atggatcaccagatgaagaggccgaagacgaagatcgtctgcacgttaggacctgcatctagatcagttccaatggtggagaagctcttaaaagcaggtatgaacgttgctcgcttcaatttctctcacggatcctatgaatatcatcaggaaacgcttgataatctccgcactgctatggataacaccggtatactctgtgcggttatgctcgacaccaagggtccagagattcgaaccgggtttttaaaagatggcaagccagttcagcttaaacagggtcaagaaatcacaatctctatcgattacaccatcaaaggcgatgaaaacatgatctgcatgagctacaagaagctagctcacgatgttaaaccacaaagtgtgattctctgtgcagacggcaccatttcgtttactgttctgtcttgtgacattgaaaacgggctagttcgttgtcgttgtgagaacactgcggttcttggtgaacgaaaaaacgttaatctacctggtgtgattgtggatctaccaacgctgactgagaaagacaaagaagatatcatgaaatggggtgttcctaataagattgatatgattgctttgtcgtttgtccgaaagggttcagaccttgtggaggttcgtaagctgttgggagtacatgctaaaaacattctgcttatgtctaaggttgaaaatcaagaaggggttgccaactttgatgatatcctagcgaactcagacgcgtttatggtggcgcgtggtgatctcgggatggaaattccgattgagaaaatatttctagctcagaaagtaatgatatacaagtgcaacctacaaggaaagccggttgtaaccgccactcaaatgctggagtcaatgatcaagtctccaaggcccactcgagccgaagccacagacgttgctaacgcggtcctcgatggaaccgactgcgtcatgcttagtggagaaaccgcagccggggcttacccagagctcgcagttcaaaccatggctaaaatctgcatggaagccgaaagcacaatagactataaagacgttttcaaaaggatcactgccaatgcaccggtccccatgagcccacttgaaagcttagcctcttctgcggttcgaaccgcgatctcatcaaaagcgagtctgatattggttctaaccagaggtggaagcactgcgaaactagtggctaagtaccgccccgggatgcctatactgtctgttgtggttccagaaatcaagaccgattcttttgactggtcttgtagtgatgagtcaccggctagacatagtctaatctttaggggtttggtcccggttttgattgcggggtctgctagagcttctcatgatgagtccactgaagaagctattgaatttgctttgcaacatgctaaagataaaggactatgcaagaatggtgattcggttgtggctctacatcgtgttggaaccgcgtctataatcaagatcgtgacagttaagtga

SEQ ID NO: 8834 - protein, 498 aa, Helianthus annuus
MDHQMKRPKTKIVCTLGPASRSVPMVEKLLKAGMNVARFNFSHGSYEYHQETLDNLRTAMDNTGILCAVMLDTKGPEIRTGFLKDGKPVQLKQGQEITISIDYTIKGDENMICMSYKKLAHDVKPQSVILCADGTISFTVLSCDIENGLVRCRCENTAVLGERKNVNLPGVIVDLPTLTEKDKEDIMKWGVPNKIDMIALSFVRKGSDLVEVRKLLGVHAKNILLMSKVENQEGVANFDDILANSDAFMVARGDLGMEIPIEKIFLAQKVMIYKCNLQGKPVVTATQMLESMIKSPRPTRAEATDVANAVLDGTDCVMLSGETAAGAYPELAVQTMAKICMEAESTIDYKDVFKRITANAPVPMSPLESLASSAVRTAISSKASLILVLTRGGSTAKLVAKYRPGMPILSVVVPEIKTDSFDWSCSDESPARHSLIFRGLVPVLIAGSARASHDESTEEAIEFALQHAKDKGLCKNGDSVVALHRVGTASIIKIVTVK

SEQ ID NO: 8835 - DNA, 1584 bp, Brassica napus
  CDS (1)..(1584)
atgcattcgagtcatctccttctcgaggaaccgatcaggatggcatcaatcctcgagccatccaaatctagcttctttccggcgttaactaagatcgtcgggactctcggtcccaaatccagatccgttgagactctctccggctgtctcaaatccggcatgtccgtggctcgattcgatttctcttggggagacgctgagtatcaccaagagacgctggataatctgaaaattgctgtgaagagcactaagaagctttgtgctgttatgcttgatacagtgggacctgagcttcaagtgatcaacaagtctgagaaagctattactcttaaagctgatggacttgttactttgactcctaatcaagaccaagaagcctcttctgaagtccttcccattaactttgatgggcttgccaaggcagtgaagaaaggagacactatctttgttgggcaatacctattcactggtagtgaaacaacttcagtttggctcgaggttgatgaagttaaaggagatgatgtcatttgcctgtcaaggaatgctgctactcttgctggtgctctcttcactttgcacgcctctcaagttcacatcgatctgccaactcttactgagaaagataaggaggttataagcacatggggagttcaaaacaaaattgattttctctcactgtcctattgtcgacatgcggaggatgttcgccagactcgcgaaatgcttaaaaagttgggtgacctctctcaaacacaaatatttgccaagattgagaatgtagagggactaacccactttgatgagattctacaagaagccgatggaattattctttctcgtgggaatttgggtatagatctacccccggaaaaggtgtttttgtttcaaaaggcggctctttacaagtgcaacatggctggaaagccagccgttcttacccgtgtggttgatagtatgactgacaacttgcgaccaactcgtgcagaggcaaccgatgttgctaatgctgttttagatggaagtgatgcaattcttcttggtgctgagacccttcgcgggttgtaccctgtcgagaccatatcaactgtcggaaggatctgtgctgaggcagaaaaggttttcaatcaagacttgtacttcaagaagactgtcaagtatgtaggagaaccgatgtctcacctggaatccattgcttcctcagctgtaagggcagcaatcaaggttaaggcatcagtcattatatgcttcacctcttctggaagagcagcaaggttaattgccaaatacaggcccacaatgcccgttatttctgttgtcattccccgggttaagacaaatcagctgaaatggagctttagtggagcctttgaggcgaggcagtcacttattgtcagaggccttttccccatgctcgctgatcctcgtcacccagcggaatcaacaagtgcgacgaacgagtcagtcctcaaggttgcactagaccatggaaagcaagcaggagtgatcaaatcgcatgacagagtagtggtgtgtcagaaagttggtgatgcatctgtggtgaagatcatcgagctagaggattaa

SEQ ID NO: 8836 - protein, 527 aa, Brassica napus
MHSSHLLLEEPIRMASILEPSKSSFFPALTKIVGTLGPKSRSVETLSGCLKSGMSVARFDFSWGDAEYHQETLDNLKIAVKSTKKLCAVMLDTVGPELQVINKSEKAITLKADGLVTLTPNQDQEASSEVLPINFDGLAKAVKKGDTIFVGQYLFTGSETTSVWLEVDEVKGDDVICLSRNAATLAGALFTLHASQVHIDLPTLTEKDKEVISTWGVQNKIDFLSLSYCRHAEDVRQTREMLKKLGDLSQTQIFAKIENVEGLTHFDEILQEADGIILSRGNLGIDLPPEKVFLFQKAALYKCNMAGKPAVLTRVVDSMTDNLRPTRAEATDVANAVLDGSDAILLGAETLRGLYPVETISTVGRICAEAEKVFNQDLYFKKTVKYVGEPMSHLESIASSAVRAAIKVKASVIICFTSSGRAARLIAKYRPTMPVISVVIPRVKTNQLKWSFSGAFEARQSLIVRGLFPMLADPRHPAESTSATNESVLKVALDHGKQAGVIKSHDRVVVCQKVGDASVVKIIELED

SEQ ID NO: 8837 - DNA, 1743 bp, Brassica napus
  CDS (1)..(1743)
atggctcaggtcgttgctacaaggtcgattcaaggctcgatgttgagtcccaacggtggatctgtttccacgagatccgacaagcttctgaagccggcgagtttcgcagtgaaggttcttggcaacgaatccaagaagagcggaagagtgtccgtaagaggaggaagaaaggttgataccactgtgagatccgctcgtgtggagaccgaagtcattccagtgtctcccgaggatgttccaaacagagaggagcaactggagcggtttttggaaatgcagaagtttagtgacacatcggtagggatgtggtcgaaaccgacagtgaggaggaagactaagattgtgtgcaccgttggtccttctaccaacacacgagagatgatatggaaactagctgaagctgggatgaatgttgcaaggatgaacatgtctcatggggatcatgcttctcataagaaggttattgatttggtcaaagagtacaatgcgcagtctaaggacaacaccattgctatcatgctggatactaagggtccagaagttaggagtggagatttaccccagccgattatgttagaccctggtcaagagtttacttttacaattgagagaggagtcagcacaccaagctgtgtcagtgttaactatgatgattttgtcaacgatgtggaggccggagacatgctccttgttgatggtggtatgatgtcgtttatggtgaagtctaagactaaagagactgtcatatgtgaggttgttgatggtggagagctaaagtcaaggagacacttgaatgtccgaaggaaaagtgcaacattaccttcaatcactgagaaggattgggaggatattaagttcggagtggagaacaaagttgacttctatgctgtttcttttgtcaaagatgcacaagtggtgcatgaactgaagaattacctccaaggttgtggtgctgatattcacgtgatagtaaaaattgaaagcgcagactccatacctaacttgcattccattatcaccgcatcagatggggcaatggttgcaagaggtgatcttggtgcagagcttcctattgaagaagtacccattcttcaggaaaagatcattaacctatgccgtagcatgggaaaagctgttattgttgcaactaacatgcttgagagtatgatagttcatccgactccaacccgagcggaggtttctgatattgctatagctgttagagaaggtgctgatgcagtcatgctttcaggagaaactgctcacggaaagttcccattgaaagctgctggagtgatgcatacagttgcactgcgaacagaagcaaccattactactagtactgaaatgccacctaatcttggtcaagccttcaagaaccatatgagtgagatgtttgcataccatgcaaccatgatgtcaaacacacttggaacttcaactgttgtcttcacaagaactggtttcatggccatactactaagtcactatcgcccttccggcacaatctacgccttcacgaacgagaaaaaaatacagcaaagattagccttgtatcaaggtgtatgccccatatatatggagttctcagatgatgcagaagacactttcactaaagctttggctacactactgaaacaaggaatggtgaagaagggagaggaaatagcgattgtacagagcgggtcacaaccaatctggcggtctcaatcgactcataacatccaagtccgcaaggtgtaa

SEQ ID NO: 8838 - protein, 580 aa, Brassica napus
MAQVVATRSIQGSMLSPNGGSVSTRSDKLLKPASFAVKVLGNESKKSGRVSVRGGRKVDTTVRSARVETEVIPVSPEDVPNREEQLERFLEMQKFSDTSVGMWSKPTVRRKTKIVCTVGPSTNTREMIWKLAEAGMNVARMNMSHGDHASHKKVIDLVKEYNAQSKDNTIAIMLDTKGPEVRSGDLPQPIMLDPGQEFTFTIERGVSTPSCVSVNYDDFVNDVEAGDMLLVDGGMMSFMVKSKTKETVICEVVDGGELKSRRHLNVRRKSATLPSITEKDWEDIKFGVENKVDFYAVSFVKDAQVVHELKNYLQGCGADIHVIVKIESADSIPNLHSIITASDGAMVARGDLGAELPIEEVPILQEKIINLCRSMGKAVIVATNMLESMIVHPTPTRAEVSDIAIAVREGADAVMLSGETAHGKFPLKAAGVMHTVALRTEATITTSTEMPPNLGQAFKNHMSEMFAYHATMMSNTLGTSTVVFTRTGFMAILLSHYRPSGTIYAFTNEKKIQQRLALYQGVCPIYMEFSDDAEDTFTKALATLLKQGMVKKGEEIAIVQSGSQPIWRSQSTHNIQVRKV

SEQ ID NO: 8839 - DNA, 1743 bp, Brassica napus
  CDS (1)..(1743)
atggctcaggtcgttgctacaaggtcgattcaaggctcgatgttgagtcccaacggtggatctgtttccacgagatccgacaagcttctgaagccggcgagtttcgcagtgaaggttcttggcaacgaatccaagaagagcggaagagtgtccgtaagaggaggaagaaaggttgataccactgtgagatccgctcgtgtggagaccgaagtcattccagtgtctcccgaggatgttccaaacagagaggagcaactggagcggtttttggaaatgcagaagtttagtgacacatcggtagggatgtggtcgaaaccgacagtgaggaggaagactaagattgtgtgcaccgttggtccttctaccaacacacgagagatgatatggaaactagctgaagctgggatgaatgttgcaaggatgaacatgtctcatggggatcatgcttctcataagaaggttattgatttggtcaaagagtacaatgcgcagtctaaggacaacaccattgctatcatgctggatactaagggtccagaagttaggagtggagatttaccccagccgattatgttagaccctggtcaagagtttacttttacaattgagagaggagtcagcacaccaagctgtgtcagtgttaactatgatgattttgtcaacgatgtggaggccggagacatgctccttgttgatggtggtatgatgtcgtttatggtgaagtctaagactaaagagactgtcatatgtgaggttgttgatggtggagagcttaagtcaaggagacacttgaatgtccgagggaaaagtgcaacattaccgtcaatcactgagaaggattgggaggatattaagttcggagtggagaacaaagttgacttttatgcagtttcttttgtcaaagatgcacaagtggtacacgaactcaagaattacctcaaaggttgtggtgctgatattcacgtgatagtaaaaattgaaagcgcagactccatacctaacttgaattccattatcaccgcatcagatggggcaatggttgcaagaggtgatcttggtgcagagcttcctattgaagaagtacccattcttcaggagaggatcattaacctatgccgtagcatgggaaaagctgttattgttgcaactaacatgcttgagagtatgatagttcatccgactccaacccgagcggaggtttctgatattgctatagctgttagagaaggtgctgatgcagtcatgctttcaggagaaactgctcacggaaagttcccactgaaagctgctggagtgatgcatacagtcgcactgcgaacagaagcaaccattactactagtactgaaatgccacctaatcttggtcaagccttcaagaaccatatgagtgagatgtttgcataccatgcaaccatgatgtcaaacacgcttggaacttcaactgttgtcttcaccagaactggtttcatggccatacttttaagtcactatcgcccttctggcaccatctacgccttcacgaatgagaaaaaaatacagcaaagattagccttgtatcaaggggtgtgccccatatatatggagttctcagatgatgcagaggacactttcactaaagctttggctacactactgaaacaaggaatggtgaagaagggagaggaaatagcgattgtacagagcgggtcacaaccaatctggcggtctcaatcgactcataacatccaagtccgcaaggtgtaa

SEQ ID NO: 8840 - protein, 580 aa, Brassica napus
MAQVVATRSIQGSMLSPNGGSVSTRSDKLLKPASFAVKVLGNESKKSGRVSVRGGRKVDTTVRSARVETEVIPVSPEDVPNREEQLERFLEMQKFSDTSVGMWSKPTVRRKTKIVCTVGPSTNTREMIWKLAEAGMNVARMNMSHGDHASHKKVIDLVKEYNAQSKDNTIAIMLDTKGPEVRSGDLPQPIMLDPGQEFTFTIERGVSTPSCVSVNYDDFVNDVEAGDMLLVDGGMMSFMVKSKTKETVICEVVDGGELKSRRHLNVRGKSATLPSITEKDWEDIKFGVENKVDFYAVSFVKDAQVVHELKNYLKGCGADIHVIVKIESADSIPNLNSIITASDGAMVARGDLGAELPIEEVPILQERIINLCRSMGKAVIVATNMLESMIVHPTPTRAEVSDIAIAVREGADAVMLSGETAHGKFPLKAAGVMHTVALRTEATITTSTEMPPNLGQAFKNHMSEMFAYHATMMSNTLGTSTVVFTRTGFMAILLSHYRPSGTIYAFTNEKKIQQRLALYQGVCPIYMEFSDDAEDTFTKALATLLKQGMVKKGEEIAIVQSGSQPIWRSQSTHNIQVRKV

SEQ ID NO: 8841 - DNA, 1764 bp, Brassica napus
  CDS (1)..(1764)
atgtctcagtctatccaattctcaactccttcacgcactcctcaccttctccacctccctaactcacgcttccaccgtcctctcacttccttatccttccgccaattccctctcaagtacacctcaatcagagcctcctcctctccagatctcggctcctcctcatcctcccaggtccttcactctcctaacggcactggcgctgccaaaccggaagagcgatccgtcgtagccaccgcggtctccacggatacggcagcgatagacgtagataccgtgacggaagcggagctgaaggagaatggattcaggagcacgaggaggacgaagctgatctgcacgatcgggcctgccacgtgcgggttcgagcaactggaagcgctcgcggagggaggcatgaacgtggcgaggctcaacatgtgccacggcacgcgcgagtggcaccgcgatgtgatacgcagcgttaggaagcttaacgaggagaaaggattcgcggttgctatcatgatggacactgaaggcagggagattcacatgggagatctgggcggtggtgaatcttctgctaaatctgaggatggtgaggttgggacattcactgttagagcctttgattcttctcgacctgcacgtaccatcagtgtgagctatgatggttttgcggaagatgtaagagttggtgatgagcttctggttgatggtggaatggtgagatttgaagtgattgagaagattggtcctgatgtcaagtgtctatgcaccgaccctgggttgttgcttcctcgagctaacttgactttctggagagatgggagtcttgttcgtgagcgtaacgctatgcttccaacaatttcctccaaggactggttggatattgattttggaattgctgaaggtgtggacttcattgctgtatcctttgtcaagtctgctgaagtaattaatcatcttaaaagttatcttgcagctcgtcccggtggaggggacataggagtgattgcaaagatcgagagtatcgattcactgacaaacttggaagaaatcatcctagcatcagatggagccatggttgcaagaggagacctgggagctcagatacctctcgagcaagttccagcagctcagcaaagaatcgtcaaagtctgcagagcgctgaacaaacccgtcatcgttgcttcgcagctactcgagtccatgatcgagtacccaactccaaccagagcagaagtagccgacgtttccgaagcagtaaggcagagatcagacgcgttgatgctctctggagaatcagctatgggtcagttcccggacaaggctctcacggttctcaggagtgtcagtctaagaatcgaaagatggtggagggaagagaaacgctacgaggctacaccacttcaagccataagctctgcttcttcagacaaaatctctgaagaaatctgcaactctgcttctaaaatggctaacaatcttggagtcgacgccgtcttcgtgtacacaaagaacggacacatggcgtctctagtctcccgatgccgccctgactgtccgatctttgctttcacgaacacaacctcggtgagaagacgcttaaacctacaatggggactgatcccgttccgtctaagcttctcagaggacatggagagcaacttgaacaaaacattctctttactgaaatcaagaggtatgatcaagtcgggtgacctggtgatcgctgtctctgacatgctgcaatccatccaggtcatgaacgttccgtag

SEQ ID NO: 8842 - protein, 587 aa, Brassica napus
MSQSIQFSTPSRTPHLLHLPNSRFHRPLTSLSFRQFPLKYTSIRASSSPDLGSSSSSQVLHSPNGTGAAKPEERSVVATAVSTDTAAIDVDTVTEAELKENGFRSTRRTKLICTIGPATCGFEQLEALAEGGMNVARLNMCHGTREWHRDVIRSVRKLNEEKGFAVAIMMDTEGREIHMGDLGGGESSAKSEDGEVGTFTVRAFDSSRPARTISVSYDGFAEDVRVGDELLVDGGMVRFEVIEKIGPDVKCLCTDPGLLLPRANLTFWRDGSLVRERNAMLPTISSKDWLDIDFGIAEGVDFIAVSFVKSAEVINHLKSYLAARPGGGDIGVIAKIESIDSLTNLEEIILASDGAMVARGDLGAQIPLEQVPAAQQRIVKVCRALNKPVIVASQLLESMIEYPTPTRAEVADVSEAVRQRSDALMLSGESAMGQFPDKALTVLRSVSLRIERWWREEKRYEATPLQAISSASSDKISEEICNSASKMANNLGVDAVFVYTKNGHMASLVSRCRPDCPIFAFTNTTSVRRRLNLQWGLIPFRLSFSEDMESNLNKTFSLLKSRGMIKSGDLVIAVSDMLQSIQVMNVP

SEQ ID NO: 8843 - DNA, 1533 bp, Brassica napus
  CDS (1)..(1533)
atgtcgaacatagacatagaagggatactgaaggagctacctaacgatgggaggatcccaaagaccaagatcgtttgcactctgggaccagcttctcgcactgttcctatgatcgaaaagcttctccgagccggtatgaacgtggctcgcttcaacttctctcatggaagccatgaataccaccaggacacactcaacaacctccgcaccgccatgcagaacaccggcattctcgctgctgtcatgctcgacacaaaggggcctgagattcgtactggtttcttgaaagatgggaaccctatacaactaaaggaaggccaggagatcaccatcaccaccgactacgacattcaaggagacgagacaacgatctccatgagctacaagaagcttcccttggatgtgaagcccggaaacaccatactatgtgcagatggaagcataagtctagctgtggtgtcatgcgatccagagtctggaactgttaggtgcaggtgcgaaaacacggcgatgcttggcgagagaaagaacgtgaatctccccggtgtcgttgttgatctccccactctgacagacaaggatattgaagatattatgggttggggtgttccgaacagcatcgatatgattgcgctttcgtttgtccgtaaaggctcggatcttgttaatgtcaggagggttcttggttctcatgctaaaagcataatgttgatgtcaaaggttgagaaccaggaaggagtggtgaactttgatgagatactgcgcgaaacagacgcattcatggttgctcgtggtgatctcgggatggagattcccatagagaagatcttcttagctcagaagctgatgatctacaagtgcaacctcgcaggcaaaccagtggtcacagccactcagatgcttgagtcaatgatcaaatcaccaaggccaacacgtgctgaagccacggacgttgcaaacgccgtcctcgacggcacagactgcgtgatgctcagcggagagagcgcagcaggagcttatccggagatagccgtgaaagtcatggccaagatctgcatcgaagcggagagctctcttgactacaacacgatcttcaaagagaggatcagagcaactccgcttccaatgagcccgctagagagtcttgcatcgtcagctgtaaggactgcgaacaaagcgcatgcgaaactcatcattgtgttgactcgtggaggctcaacagctaagcttgtggctaagtacagacctgctgttccgattctgtcggtggttgttccggttatgaccaccgatacctttgactggagttgtagcgacgagtcgcctgcgaggcacagtctgatatacagagggttgatccctatgttggctgaaggatctgcaaaggcgactgatagcgagtccacagaggttatcattgaatctgctttgaagtcagcgacacagagaggactgtgcaaccatggtgatgcagtcgtggcgctgcaccgtattggagctgcctcggttattaagatctgtgtggtgaagtaa

SEQ ID NO: 8844 - protein, 510 aa, Brassica napus
MSNIDIEGILKELPNDGRIPKTKIVCTLGPASRTVPMIEKLLRAGMNVARFNFSHGSHEYHQDTLNNLRTAMQNTGILAAVMLDTKGPEIRTGFLKDGNPIQLKEGQEITITTDYDIQGDETTISMSYKKLPLDVKPGNTILCADGSISLAVVSCDPESGTVRCRCENTAMLGERKNVNLPGVVVDLPTLTDKDIEDIMGWGVPNSIDMIALSFVRKGSDLVNVRRVLGSHAKSIMLMSKVENQEGVVNFDEILRETDAFMVARGDLGMEIPIEKIFLAQKLMIYKCNLAGKPVVTATQMLESMIKSPRPTRAEATDVANAVLDGTDCVMLSGESAAGAYPEIAVKVMAKICIEAESSLDYNTIFKERIRATPLPMSPLESLASSAVRTANKAHAKLIIVLTRGGSTAKLVAKYRPAVPILSVVVPVMTTDTFDWSCSDESPARHSLIYRGLIPMLAEGSAKATDSESTEVIIESALKSATQRGLCNHGDAVVALHRIGAASVIKICVVK

SEQ ID NO: 8845 - DNA, 1497 bp, Brassica napus
  CDS (1)..(1497)
atggcgatgatagagcaaaggccgaagacgaagatcgtgtgtacccttggtcccgcttccagatccgttgagatggtggagaagcttctcagggctggcatgaacgtcgctaggtttaacttctctcacggatctcatgagtaccaccaggagactctcgataacctccgtcaagctatgctcaacactggtatcctctgcgccgtcatgctcgataccaagggtccagaaatccgaaccggattcttgaaagatgggaaaccaatccagttgaaacaaggccaagagatcaccatctccactgactacgacttgcagggcgacgaggaaacaatctgcatgagttacaagaagttggctgaagatgtgaacccagggatggttatcctctgtgccgacggtacaatctcgttactggtcctctcttgtgacacagagaatggcacagtccgttgccgctgcgagaactctgccatgctcggtgagaggaagaatgttaatctcccaggtgttgttgtggacctcccaactctaactgagaaagacaaagaagacatcatgaagtggggagtcccgaatcagatcgacatgatcgctctgtcttttgtcagaaaaggttcagacttggttcaggtcaggaaactactaggaaatcacgccaagaacattcttctcatgtcaaaggttgagaaccaagaaggtgtggcgaacttcgatgacattctggtcaactccgacgcctttatgattgcaagaggagatctcggcatggagatcccgatagagaagatcttcttagctcacaaagtgatgatctacaaatgcaacatccaggggaaacctgcggtcacagcgactcagatgctccagtccatgatcaaatctcctcgacccacaagagccgaagccactgatgtagcaaacgctgtcctcgacggcacggactgcgtcatgctcagtggcgaaaccgcagctggagcgtaccctgagctagctgtgcgtaccatggctaagatctgcgttgaagccgagaacacgcttgactacggagacgtcttcaagaggatcatgaagtactctccggttccaatgagcccacttgagtcactcgcgtcctctgctgtcagaacagctaactcggctagagccacactcatcatggtcctaaccaggggaggaagcacggcgaggcttgtggctaagtacagaccagggatgccgattttatcagtcgtggttccggagatcaaaaccgacttgttcgactggtcttgcagcgacgagtcacccgcgaggcatagtcttatcttccgtggtttgatccctgtgctgtacgcagggtcggcaagagcctcgcacgatgaatcaacagaagaagctattgagtttgcgactcagcaggggaaagagaaagagctgtgcaagactggagactccgttgttgctctactccgagttgggaacgcttccctaatcaagatcttgaccgttaagtga

SEQ ID NO: 8846 - protein, 498 aa, Brassica napus
MAMIEQRPKTKIVCTLGPASRSVEMVEKLLRAGMNVARFNFSHGSHEYHQETLDNLRQAMLNTGILCAVMLDTKGPEIRTGFLKDGKPIQLKQGQEITISTDYDLQGDEETICMSYKKLAEDVNPGMVILCADGTISLLVLSCDTENGTVRCRCENSAMLGERKNVNLPGVVVDLPTLTEKDKEDIMKWGVPNQIDMIALSFVRKGSDLVQVRKLLGNHAKNILLMSKVENQEGVANFDDILVNSDAFMIARGDLGMEIPIEKIFLAHKVMIYKCNIQGKPAVTATQMLQSMIKSPRPTRAEATDVANAVLDGTDCVMLSGETAAGAYPELAVRTMAKICVEAENTLDYGDVFKRIMKYSPVPMSPLESLASSAVRTANSARATLIMVLTRGGSTARLVAKYRPGMPILSVVVPEIKTDLFDWSCSDESPARHSLIFRGLIPVLYAGSARASHDESTEEAIEFATQQGKEKELCKTGDSVVALLRVGNASLIKILTVK

SEQ ID NO: 8847 - DNA, 1584 bp, Brassica napus
  CDS (1)..(1584)
atgcattcgagccatctccttctcgaggagccgatcaggatggcttctatcctcgagccatccaaatccagcttctttccggcgttaactaagatcgtcgggactctcggtcccaaatccagatccgttgagacactctccggctgtctcaaatccggcatgtctgtggctagattcgatttctcttggggagacgctgagtatcaccaagagacgcttgataatctgaagattgctgttaagagcaccaagaagctttgtgctgttatgcttgatacagtgggacctgagcttcaagtgatcaacaagtctgagaaagctattactcttaaagctgatggacttgttactttgactcctaatcaagaccgagaagcctcttctgaagtccttcccattaactttgatggccttgccaaggcggtgaagaaaggagacactatctttgttgggcaatacctattcactggtagtgaaacaacttcagtttggctcgaggttgatgaagttaaaggagatgatgtcatttgcctttcaaggaatgctgctactctcgctggttctatgttcaccttgcacgcctctcaagttcacatcgatatgccaactcttactgagaaagataaagaggttataagcacatggggagttcaaaacaaaatcgattttctctcattgtcctattgtcgacatgcggaggatgttcgccagactcgcgaaatgcttaaaaagttgggtgacctctctcaaacacaaatatttgccaagattgagaatgtagagggactaacccactttgatgagattctacaagaagccgatggaattattctttctcgtgggaatttgggtattgatctacccccggaaaaggtgtttttgtttcaaaaggcggctctttacaagtgcaacatggctggaaagccagccgttcttacccgtgttgttgatagtatgactgacaacttgcgaccaactcgtgcagaggcaaccgatgttgctaatgctgttttagatggaagtgatgcaattcttctcggtgctgagacccttcgcggattgtaccctgtcgagaccatatcaactgtcggaaggatctgtgctgaggcagagaaggttttcaatcaagatttgtacttcaagaagactgtcaagtatgttggagagccgatgtctcacctggaatccattgcttcctcagctgtaagggcagcaatcaaggttaaggcatcagtcattatatgctttacctcttctggaagagcagccaggttgattgccaaatacaggccaacaatgccggtaatttctgtagtcattccccgggttaagacaaatcagctgaaatggagctttagtggagcctttgaggctaggcagtcacttattgtcagaggccttttccccatgctcgctgatcctcgtcacccagcggaatcaacaagtgcgacgaacgagtcagtcctgaaggttgcactagaccatgggaagcaagcaggagtgataaagtcgcatgacagagtagtggtgtgtcagaaagttggtgatgcatctgtggtgaagatcatcgagctagaggattaa

SEQ ID NO: 8848 - protein, 527 aa, Brassica napus
MHSSHLLLEEPIRMASILEPSKSSFFPALTKIVGTLGPKSRSVETLSGCLKSGMSVARFDFSWGDAEYHQETLDNLKIAVKSTKKLCAVMLDTVGPELQVINKSEKAITLKADGLVTLTPNQDREASSEVLPINFDGLAKAVKKGDTIFVGQYLFTGSETTSVWLEVDEVKGDDVICLSRNAATLAGSMFTLHASQVHIDMPTLTEKDKEVISTWGVQNKIDFLSLSYCRHAEDVRQTREMLKKLGDLSQTQIFAKIENVEGLTHFDEILQEADGIILSRGNLGIDLPPEKVFLFQKAALYKCNMAGKPAVLTRVVDSMTDNLRPTRAEATDVANAVLDGSDAILLGAETLRGLYPVETISTVGRICAEAEKVFNQDLYFKKTVKYVGEPMSHLESIASSAVRAAIKVKASVIICFTSSGRAARLIAKYRPTMPVISVVIPRVKTNQLKWSFSGAFEARQSLIVRGLFPMLADPRHPAESTSATNESVLKVALDHGKQAGVIKSHDRVVVCQKVGDASVVKIIELED

SEQ ID NO: 8849 - DNA, 1533 bp, Brassica napus
  CDS (1)..(1533)
atgtcgaacatagacattgaagggatattgaaggagctacctaacgatgggaggatcccaaagaccaagatcgtttgcactctgggaccagcttctcgcactgttcctatgatcgaaaagcttctccgagccggtatgaacgtcgctcgcttcaacttctctcatggcagccatgaataccaccaggacacactcaacaacctccgcaccgctatgcagaacaccggcattctcgccgctgtcatgctcgacacaaagggacctgagattcgtactggtttcttgaaagatgggaaccctatacaactcaaggaaggccaggagattaccatcaccaccgactacgaaattttaggagatgagacgacgatctccatgagctataagaagcttcccttagatgtgaagcccggaaacaccatactctgtgcagatggaagcataagtctagctgtcttgtcatgtgatccagagtctggaactgttaggtgcaggtgcgaaaacacggcgatgcttggcgagagaaagaacgtgaatctccccggtgtcgttgttgatctccccactctgacagacaaggatattgaagatattatgggttggggtgttcctaacagcatcgatatgattgcgctttcttttgtccgtaaaggctcagatcttgttaatgtcaggagggttcttggttctcatgctaaaagcataatgctgatgtcaaaggttgagaaccaggaaggagtggtgaactttgatgagatactgcgcgaaacagatgcattcatggtcgctcgtggtgatctcgggatggagattcccatagagaagatcttcttagctcagaagctgatgatctacaagtgcaacctcgcaggcaaaccagtggtcacagccactcagatgcttgagtcaatgatcaagtcaccaaggccaacacgtgctgaagccacggacgttgccaacgccgtccttgacggcacagactgcgtgatgctcagcggagagagcgcagcaggagcttatccggagatagccgtgaaagtcatggccaagatctgcattgaagcggagagctctcttgactacaacacgatctttaaagagaggatcagagcaactccggttccaatgagcccgttagagagtcttgcatcgtcagctgtgagggctgcgaacaaagcgcatgcgaagctcatcattgtgttgactcgtggaggctcaacagctaagcttgtagctaagtacagaccctctgttccgattctttcggtggttgtaccagttatgaccacggattcctttgactggacttgtagtgacgagtcgcctgcaaggcatagtttgatatacagaggtttgatccctatgttggctgaaggatctgcaaaggcgacagatagtgagtccacagaggttatcattgaatccgctttgaagtcagctgtgcagagaggactgtgcaaccatggtgatgctgttgtggcgctgcaccgtattggagtcgcctcggttattaagatctgtgtggttaagtaa

SEQ ID NO: 8850 - protein, 510 aa, Brassica napus
MSNIDIEGILKELPNDGRIPKTKIVCTLGPASRTVPMIEKLLRAGMNVARFNFSHGSHEYHQDTLNNLRTAMQNTGILAAVMLDTKGPEIRTGFLKDGNPIQLKEGQEITITTDYEILGDETTISMSYKKLPLDVKPGNTILCADGSISLAVLSCDPESGTVRCRCENTAMLGERKNVNLPGVVVDLPTLTDKDIEDIMGWGVPNSIDMIALSFVRKGSDLVNVRRVLGSHAKSIMLMSKVENQEGVVNFDEILRETDAFMVARGDLGMEIPIEKIFLAQKLMIYKCNLAGKPVVTATQMLESMIKSPRPTRAEATDVANAVLDGTDCVMLSGESAAGAYPEIAVKVMAKICIEAESSLDYNTIFKERIRATPVPMSPLESLASSAVRAANKAHAKLIIVLTRGGSTAKLVAKYRPSVPILSVVVPVMTTDSFDWTCSDESPARHSLIYRGLIPMLAEGSAKATDSESTEVIIESALKSAVQRGLCNHGDAVVALHRIGVASVIKICVVK

SEQ ID NO: 8851 - DNA, 1584 bp, Brassica napus
  CDS (1)..(1584)
atgcattcgagccatctccttctcgaggagccgatcaggatggcttctatcctcgagccatccaaatccagcttctttccggcgttaactaagatcgtcgggactctcggtcccaaatccagatccgttgagacactctccggctgtctcaaatccggcatgtctgtggctagattcgatttctcttggggagacgctgagtatcaccaagagacgcttgataatctgaagattgctgttaagagcaccaagaagctttgtgctgttatgcttgatacagtgggacctgagcttcaagtgatcaacaagtctgagaaagctattactcttaaagctgatggacttgttactttgactcctaatcaagaccgagaagcctcttctgaagtccttcccattaactttgatggccttgccaaggcggtgaagaaaggagacgctatctttgttgggcaatacctattcactggtagtgaaacaacttcagtttggctcgaggttgatgaagttaaaggagatgatgtcatttgcctttcaaggaatgctgctactctcgctggttctatgttcaccttgcacgcctctcaagttcacatcgatatgccaactcttactgagaaagataaagaggttataagcacatggggagttcaaaacaaaatcgactttctctcgttgtcctattgtcgacatgcggaggatgttcgccagactcgcgaaatgcttaaaaagttgggtgacctctctcaaacacaaatatttgccaagattgagaatgttgagggactaacccactttgatgagattctacaagaagccgatggaattattctttctcgtgggaatttgggtattgatctacccccggaaaaggtgtttttgtttcaaaaggcggctctttacaagtgcaacatggctggaaagccagccgttcttactcgtgttgttgatagtatgactgacaacttgcgaccaactcgtgcagaggcaaccgatgttgctaatgctgttttagatggaagtgatgcaattcttctcggtgctgagacacttcgcggattgtaccctgtggagactatatcaactgtcggaaggatctgtgctgaggcagagaaggttttcaatcaagatttgtacttcaagaagactgtcaagtatgttggagagccgatgtctcacctcgaatccattgcttcttcagctgtaagggcagcaatcaaggttaaggcatccgtcattatatgctttacctcttctggaagagcagccaggttgattgctaaatacaggccaacaatgccggttatttctgtagtcattccacgggttaagacaaatcagctaaaatggagcttcagtggagcctttgaggctaggcagtcacttattgtcaggggcctcttccccatgcttgctgaccctcgtcaccctgcggaatcaacaagtgcgacgaacgagtcagtcctgaaggttgcgttagaccacgggaagcaagcaggagtgataaagtcgcacgacagagtagtggtgtgtcagaaagttggtgatgcatctgtggtcaagatcatcgagcttgaggattga

SEQ ID NO: 8852 - protein, 527 aa, Brassica napus
MHSSHLLLEEPIRMASILEPSKSSFFPALTKIVGTLGPKSRSVETLSGCLKSGMSVARFDFSWGDAEYHQETLDNLKIAVKSTKKLCAVMLDTVGPELQVINKSEKAITLKADGLVTLTPNQDREASSEVLPINFDGLAKAVKKGDAIFVGQYLFTGSETTSVWLEVDEVKGDDVICLSRNAATLAGSMFTLHASQVHIDMPTLTEKDKEVISTWGVQNKIDFLSLSYCRHAEDVRQTREMLKKLGDLSQTQIFAKIENVEGLTHFDEILQEADGIILSRGNLGIDLPPEKVFLFQKAALYKCNMAGKPAVLTRVVDSMTDNLRPTRAEATDVANAVLDGSDAILLGAETLRGLYPVETISTVGRICAEAEKVFNQDLYFKKTVKYVGEPMSHLESIASSAVRAAIKVKASVIICFTSSGRAARLIAKYRPTMPVISVVIPRVKTNQLKWSFSGAFEARQSLIVRGLFPMLADPRHPAESTSATNESVLKVALDHGKQAGVIKSHDRVVVCQKVGDASVVKIIELED

SEQ ID NO: 8853 - DNA, 1497 bp, Brassica napus
  CDS (1)..(1497)
atggcgatgatagagcaaaggccgaagacgaagatcgtgtgtaccgttggtcccgcttccagatccgttgagatggtcgagaagcttctcagggctggcatgaacgtcgctaggtttaacttctctcacggatctcatgagtaccaccaggagactctcgataatctccgtcaagctatgctcaacactggtatcctctgcgccgtcatgctcgataccaagggtccagagatccgaaccggattcttgaaagatgggaaaccaatccagttgaaacaaggccaagagatcaccatctccactgactacgacttgcagggagacgaggaaacaatctgcatgagctacaagaagttggctgaggatgtgaacccagggatggttatcctctgtgctgacggtacaatctcgttactggtcctctcctgtgacacagagaacggcacagtccgttgccgctgcgagaactctgccatgcttggtgagaggaagaacgttaatctcccaggtgttgttgtggacctcccaactctaactgagaaagacaaagaagacatcatgaagtggggagtcccgaatcagatcgatatgatcactttgtcttttgtcagaaaaggttcggacttggttcaggtcaggaaactgttaggagatcatgccaagaacattcttctcatgtcaaaggttgagaaccaagaaggtgtggcgaacttcgatgacattcttgtcaactccgacgcgtttatgattgcaagaggagatctcggcatggagatcccaatcgagaagatcttcctagctcagaaagtgatgatctacaaatgcaacatccagggaaaaccagtggtcacagcgactcagatgctcgagtccatgatcaaatcccctcgacccacaagagctgaagccactgacgtagcaaacgcagtcctcgacggcaccgactgtgtcatgctcagcggagaaaccgcagctggagcttaccctgagctagctgtacgcacgatggccaagatctgcgttgaagccgagagcacgcttgactacggagacgtcttcaagaggatcatgcagtactctccggttccaatgtccccgctggagtcactggcctcctctgcagtcagaacagctaactcggctagagccacgctcatcatggtcctaaccaggggaggaagcacggcgaggcttgtggctaaatacagaccagggatgcctattttgtcagtcgttgttcccgagatgaaaacagacttctttgactggtcttgcagcgacgaatcgccggcgaggcacagtctcatcttccgtgggttgatcccggtgctgtacgcagggtctgcaagagcctcgcatgatgagtccacagaagaagctattgagtttgcgactcagcatgggaaagagaagcagctgtgtaagactggagactctgttgttgctctgctccgagttggtaatgcttctctaatcaagatcttgaccgtcaagtga

SEQ ID NO: 8854 - protein, 498 aa, Brassica napus
MAMIEQRPKTKIVCTVGPASRSVEMVEKLLRAGMNVARFNFSHGSHEYHQETLDNLRQAMLNTGILCAVMLDTKGPEIRTGFLKDGKPIQLKQGQEITISTDYDLQGDEETICMSYKKLAEDVNPGMVILCADGTISLLVLSCDTENGTVRCRCENSAMLGERKNVNLPGVVVDLPTLTEKDKEDIMKWGVPNQIDMITLSFVRKGSDLVQVRKLLGDHAKNILLMSKVENQEGVANFDDILVNSDAFMIARGDLGMEIPIEKIFLAQKVMIYKCNIQGKPVVTATQMLESMIKSPRPTRAEATDVANAVLDGTDCVMLSGETAAGAYPELAVRTMAKICVEAESTLDYGDVFKRIMQYSPVPMSPLESLASSAVRTANSARATLIMVLTRGGSTARLVAKYRPGMPILSVVVPEMKTDFFDWSCSDESPARHSLIFRGLIPVLYAGSARASHDESTEEAIEFATQHGKEKQLCKTGDSVVALLRVGNASLIKILTVK

SEQ ID NO: 8855 - DNA, 1497 bp, Brassica napus
  CDS (1)..(1497)
atggcgatgatagagcaaaagccgaagacgaagatcgtgtgtaccctgggtccagcttcgagatccgttgagatggtggagaagcttctgaaggcgggcatgaacgtggctaggtttaacttttcacacggatctcatgagtaccaccaagagactctcgataacctccgtcaagctatgctcaacactggcatcctttgcgccgtcatgctcgataccaagggtcctgaaatccgaaccgggttcttgaaagatgggaaaccaatacagttgaaacaaggccaagagatcaccatttcgactgattatgacttgcagggcgacgagaacactatttgcatgagttacaagaagctggctgtagatgtgaaccctgggatggtcattctctgtgccgatggtactatttccttactcgtcctctcttgtgacacagagaatggtaccgtccgttgccgctgcgagaactccgccatgctcggtgagaggaagaatgtcaatctccctggtgttgtcgtggatctccctactctcaccgagaaagacaaagaagacatcatgaagtggggagtccctaatcagatcgacatgattgctctgtcttttgttagaaaaggttcagacttggtgcaggtcaggaaactacttggaaaacacgccaagaacattcttctcatgtcaaaggttgagaaccaagaaggtgtggcgaacttcgatgacattctggtcaactccgacgcctttatgattgcaagaggagatctcggcatggagatcccgatcgagaagatcttcttagctcagaaagtgatgatctacaaatgcaacatccaggggaaacctgtggtcacagcgactcagatgctcgagtccatgatcaaatctcctcgacccacaagagccgaagccactgatgtagcaaacgctgtcctcgacggcacggactgcgtcatgctcagtggcgaaaccgcagctggagcgtaccctgagctagctgtgcgtaccatggctaagatctgcgttgaagccgagaacacgcttgactacggagacgtcttcaagaggatcatgaagtactctccggttccaatgagcccacttgagtcactcgcgtcctctgctgtcagaacagctaactcggctagagccacactgatcatggtcctaaccaggggaggaagcacggcgaggcttgtggctaagtacagaccagggatgccgattttatcagtcgtggttccggagatcaaaaccgacttgttcgactggtcttgcagcgacgagtcacccgcgaggcatagtcttatcttccgtggtttgatccctgtgctgtacgcagggtcggcaagagcctcgcacgatgaatcgacagaagaagctattgagtttgcgactcagcaggggaaagagaaagagctgtgcaagactggagactccgttgttgctctactccgagttggtaacgcttccctaatcaagatcttgaccgttaagtga

SEQ ID NO: 8856 - protein, 498 aa, Brassica napus
MAMIEQKPKTKIVCTLGPASRSVEMVEKLLKAGMNVARFNFSHGSHEYHQETLDNLRQAMLNTGILCAVMLDTKGPEIRTGFLKDGKPIQLKQGQEITISTDYDLQGDENTICMSYKKLAVDVNPGMVILCADGTISLLVLSCDTENGTVRCRCENSAMLGERKNVNLPGVVVDLPTLTEKDKEDIMKWGVPNQIDMIALSFVRKGSDLVQVRKLLGKHAKNILLMSKVENQEGVANFDDILVNSDAFMIARGDLGMEIPIEKIFLAQKVMIYKCNIQGKPVVTATQMLESMIKSPRPTRAEATDVANAVLDGTDCVMLSGETAAGAYPELAVRTMAKICVEAENTLDYGDVFKRIMKYSPVPMSPLESLASSAVRTANSARATLIMVLTRGGSTARLVAKYRPGMPILSVVVPEIKTDLFDWSCSDESPARHSLIFRGLIPVLYAGSARASHDESTEEAIEFATQQGKEKELCKTGDSVVALLRVGNASLIKILTVK

SEQ ID NO: 8857 - DNA, 1584 bp, Zea mays
  CDS (1)..(1584)
atgcattcgaccaacctgctgctggaggagcccatccggatggcctccatcctggagccatccaagaccagcttcttcccggcgatgaccaagatcgtcggcacgctcggccccaagtcgcgctccgtcgacaccatctcctcctgcctcaaggccggcatgtccgtcgcgcggttcgatttctcgtggggagacgccgcctaccaccaggagacgctcgagaacctcaagctcgccatcaagtccaccaagaagctgtgcgctgttatgcttgacacggttggaccggagctgcaggtggtcaacaagagtgaaacccccatctccctcgaggagaacgggactgtcgtgctcacgccgcatcagggccaagaagcctcctccaccttgctgcccatcaacttcgatggactcgccaaggctttgacaccaggtgcaacgatatttgtgggccaatacttgttcactggtagcgagactacttcagtttggttggaggtttctgaagttaaaggagatgatgtggtttgtatcatcaagaacacagctaccttggctgggtcgctcttcacgctgcattgttcccagattcatattgacttgcccacgctgtctgatgaggataaggatgttatcaaaaaatggggtgctccaaataagattgacttcctctctctgtcttacacaagacatgcagaagatgtgcggcaggcacgtgagttcctctcgaaattgggtgatcttagccaaactcagatctttgccaaaattgagaatgttgagggcttgaaccattttgatgaaatactggcagaggcagatggtatcattctgtcaagaggaaaccttggaattgaccttccacctgagaaggtctttttgtttcaaaagtctgcgcttcacaagtgcaacatggctggaaagcctgctgttgttactcgtgtcgtggacagcatgactgacaacctcagacctactcgcgcagaggcaactgatgtggcaaatgcagttcttgatgggagtgacgccattctccttggtgctgagactctccgtggtttatatccggtggagactatttcaacagtgggcagaatttgtgctgaggctgagaaggtattcaaccaagatttatactacaagcggactgtgaagtatgtgggagaacctatgacccacttggagtctattgcttcttcagcagtgcgagctgcaatcaaagttaaggcatcagtcatcatttgcttcacctcttctggacgagctgcaaggctcattgctaagtacaggcccagcatgcctgttctatctgttgtcattcctcgtctaaagacaaaccaactgaagtggagtttcacaggtgcttttgaggcaagacaatcactcatagttagaggcctcttccctatgcttgctgatccacgacacccagctgaatctaccagtgctacaaatgagtctgtgttgaaggttgctcttgaccatggcaaagcctcgggcgtgatcaagtcccacgaccgcgtcgtcgtttgccagaaagtgggtgattcctctgtggtgaagatcattgagctggatgattag

SEQ ID NO: 8858 - protein, 527 aa, Zea mays
MHSTNLLLEEPIRMASILEPSKTSFFPAMTKIVGTLGPKSRSVDTISSCLKAGMSVARFDFSWGDAAYHQETLENLKLAIKSTKKLCAVMLDTVGPELQVVNKSETPISLEENGTVVLTPHQGQEASSTLLPINFDGLAKALTPGATIFVGQYLFTGSETTSVWLEVSEVKGDDVVCIIKNTATLAGSLFTLHCSQIHIDLPTLSDEDKDVIKKWGAPNKIDFLSLSYTRHAEDVRQAREFLSKLGDLSQTQIFAKIENVEGLNHFDEILAEADGIILSRGNLGIDLPPEKVFLFQKSALHKCNMAGKPAVVTRVVDSMTDNLRPTRAEATDVANAVLDGSDAILLGAETLRGLYPVETISTVGRICAEAEKVFNQDLYYKRTVKYVGEPMTHLESIASSAVRAAIKVKASVIICFTSSGRAARLIAKYRPSMPVLSVVIPRLKTNQLKWSFTGAFEARQSLIVRGLFPMLADPRHPAESTSATNESVLKVALDHGKASGVIKSHDRVVVCQKVGDSSVVKIIELDD

SEQ ID NO: 8859 - DNA, 1728 bp, Glycine max
  CDS (1)..(1728)
atgtctcatgtagtggtcactcgatccattcacacctccctcacgcgccccacctcaggatctgcacaccacagagcccaaacgttgttgaagcctccaacttttgcttccaaagtgttcccacaacaaaggaacaacccctccaaagtttgctcccgaagttgcctcgtcaatgcgaggaaatctgcacccactgaagttgttcccgtctcacccgaggatgattcaaagattgaggaagagttgcagcactcgcgtggtatgcggcaacttggtgacacttctgttggaatgtggtcaaaacccacttttaggaggaagacaaaggttgtttgcaccattggtccttctaccaacaccagggaaatgatttggaagctggctgaggctgggatgaatgttgcccgattgaatatgtctcatggagaccatgcttctcatcagaaaattattgatttggttaaagaatataatgctcaatccaaggacaatgtaattgcaattatgcttgataccaagggtcctgaggttaggagtggggatttgccacaaccaatcaatttaacaactgggcaggaattcacatttaccatccggaggggtgttggaactgcagattgtgttagtgtgaactatgacgatttcgtcaatgatgtggatgtgggagacatgcttcttgttgatggtggtatgatgtctttggtggttaagtctaagacagaggattctgtgaaatgtgaagttgttgatggaggagagctcaagtcaaggagacatttgaacgttagaggaaaaagtgcaacactgccttcaatcactgagaaggattgggatgacatcaaatttggagtggataacaaagttgacttctatgctgtttcttttgttaaggatgcacaagtagttcatgaactgaagaattatttgaaaagctgtgatgctgatatacacgtcattgtaaaaattgaaagtgcagactctataccaaacttgcattcaattattacagcgtctgatggggccatggttgcaagaggagatcttggtgcagaactccctattgaagaggttccacttttgcaggaagaaataatcaccatatgtcgtagcatgggaaaggccgttattgtggcaacaaatatgctggaaagcatgattgttcacccgacaccaaccagagccgaggtatccgatattgcaattgctgttcgagaaggttctgatgcaataatgctttctggggaaactgctcatggaaagttcccactaaaagccgtgaaagtaatgcacaccgtagcattacggacagaagccactatacctggtggtcaaatgccaccaaatattggtcaagtattcaagaaccacatgagtgagatgtttgcttaccatgcaaccatgatgtctaatacccttggaacctcaactgttgtcttcactagatcaggcttcatggctatccttttgagccactatcgaccttcaggcaccatatttgcttttacagatcaaaagaggatacaacagaggttggctttgtatcaaggagtctgtcctatttacatggaattctctgaagatgctgaagagactttcacaagggccttggatttgctgcagaagcaaggaatggtgaaatcaggagaagaagtagcactagtacaaagtggcacgcaacccatatggaggttccaatccactcacaatatccaggtccgaacagtgtaa

SEQ ID NO: 8860 - protein, 575 aa, Glycine max
MSHVVVTRSIHTSLTRPTSGSAHHRAQTLLKPPTFASKVFPQQRNNPSKVCSRSCLVNARKSAPTEVVPVSPEDDSKIEEELQHSRGMRQLGDTSVGMWSKPTFRRKTKVVCTIGPSTNTREMIWKLAEAGMNVARLNMSHGDHASHQKIIDLVKEYNAQSKDNVIAIMLDTKGPEVRSGDLPQPINLTTGQEFTFTIRRGVGTADCVSVNYDDFVNDVDVGDMLLVDGGMMSLVVKSKTEDSVKCEVVDGGELKSRRHLNVRGKSATLPSITEKDWDDIKFGVDNKVDFYAVSFVKDAQVVHELKNYLKSCDADIHVIVKIESADSIPNLHSIITASDGAMVARGDLGAELPIEEVPLLQEEIITICRSMGKAVIVATNMLESMIVHPTPTRAEVSDIAIAVREGSDAIMLSGETAHGKFPLKAVKVMHTVALRTEATIPGGQMPPNIGQVFKNHMSEMFAYHATMMSNTLGTSTVVFTRSGFMAILLSHYRPSGTIFAFTDQKRIQQRLALYQGVCPIYMEFSEDAEETFTRALDLLQKQGMVKSGEEVALVQSGTQPIWRFQSTHNIQVRTV

SEQ ID NO: 8861 - DNA, 1584 bp, Glycine max
  CDS (1)..(1584)
atgccttccagtcacttgcttctcgaggaacctattaggatggtctccatccttgagccatccaagcctagttttttctctgcaatgacaaagattgttggtaccctgggacctaaatctagatccgtcgaaaccatttctggttgcctcaaggctggcatgtctgtggctcgttttgacttttcatggcatgaccctgagtaccaccaggagactttggagaatttgaaggctgctatcaagagtactaagaagctctgtgctgttatgctggacacagtgggcgctgagatgcaggttgttaacaaaagtgagagagcaatctcgctcgaggcaaatggtcaggttgttctaactcctgatcagggacaagaagcctcttcagagatattgcctatcaattttgatggactggctaaggcagtgaagaagggagacaccatttttattggtcaatacttgttcacgggaagtgaaactacttctgtatggctagaggtatctgaagtcaaagggcaagatgttgtttgtattataaagaacacagctacattggctgggtcattgttcactttgcatgcctctcaaattcatattgatttgcctactctcactgagaaagacaaggaggttataagcacctggggtgttaaaaacaaaattgattttctgtcattgtcatatactcgacacgccgaagatgttcgccaggctcgtgaatttctttcaaagttaggtgatctcagccaaactcaaatttttgcaaagattgaaaatgttgagggattgacccattttgatgagattctacaagaagctgatggtattatcctttcccgtgggaatttgggtattgatcttccaccagagaaggtgtttttgtttcaaaaatctgccctttacaagtgtaatatggctgggaaacctgctgtgcttacacgtgttgtggatagcatgactgacaacttgagaccaactcgtgctgaagccacagatgttgccaatgctgttttagatggaagtgatgccatacttctgggtgctgagactttacgtgggttgtaccctattgagactatttctactgttggcagaatttgttctgaggctgagaaagttttcaatcaagacctttattttaagaggacagtcaagtatgttggagaacccatgacccacttggaatctattgcatcctctgcggtacgggctgcaattaaggtgaaagcatctattataatttgtttcacttcatcaggaagggctgcaagattgatcgcaaagtataggccaacaatgccagtactatctgttgtgatcccccgactcaagacaaatcagctaaagtggagctttagtggagcttttgaggcaagacaatcacttatcgtgagaggtctctttcctatgcttgcagatccacgacatcctgctgagtcaacaagtgcaacaaatgagtctattcttaaggttgcccttgatcatggaaaatcattgggagttattaagtcacatgaccgggtagttgtttgccagaaacttggtgatgcatctgtggttaagattattgagcttgaagattaa

SEQ ID NO: 8862 - protein, 527 aa, Glycine max
MPSSHLLLEEPIRMVSILEPSKPSFFSAMTKIVGTLGPKSRSVETISGCLKAGMSVARFDFSWHDPEYHQETLENLKAAIKSTKKLCAVMLDTVGAEMQVVNKSERAISLEANGQVVLTPDQGQEASSEILPINFDGLAKAVKKGDTIFIGQYLFTGSETTSVWLEVSEVKGQDVVCIIKNTATLAGSLFTLHASQIHIDLPTLTEKDKEVISTWGVKNKIDFLSLSYTRHAEDVRQAREFLSKLGDLSQTQIFAKIENVEGLTHFDEILQEADGIILSRGNLGIDLPPEKVFLFQKSALYKCNMAGKPAVLTRVVDSMTDNLRPTRAEATDVANAVLDGSDAILLGAETLRGLYPIETISTVGRICSEAEKVFNQDLYFKRTVKYVGEPMTHLESIASSAVRAAIKVKASIIICFTSSGRAARLIAKYRPTMPVLSVVIPRLKTNQLKWSFSGAFEARQSLIVRGLFPMLADPRHPAESTSATNESILKVALDHGKSLGVIKSHDRVVVCQKLGDASVVKIIELED

SEQ ID NO: 8863 - DNA, 1584 bp, Glycine max
  CDS (1)..(1584)
atgcattccagtcacttacttctcgaagaacccattcgcatggtttccatcctcgaaccatccaagcccaatttctttcccgcaatgacgaagatcgttggtaccctgggtcctaaatctcggtcggtcgaggttatttctgcttgtcttaaagctggaatgtcagtggctcgtttcgacttctcttgggatgaccctgaatatcatcaggaaactttggagaatctgaagaatgctatcaagactactaagaaactctgtgctgttatgctggacaccgttggtgcagagatgcaggttgttaacaaaagtgagaaagcgatctcgcttgaggccgatggccaggttgttctgactcctgaccgaggacaagaagcatcgtcgcagatactgcctatcaactttgatggactggcaaagtcaatgaagaagggagacaccattttcattggtcaatacttgttcactggaagtgaaactacttctgtatggctagaggtatccgaagttaaagggcaggatgtcatttgtactataaagaattccgcaacattggctgggtcattgttcactttgcatgcctctcaagttcatattgacttgcctaccctcactgataaagacaaggaggttataagcacctggggagtaaaaaacaaaattgattttctatcattgtcatatactaggcatgctgaagatgttcgccaggcccgtgaattcctttctaagttaggtgatctaagccagactcaaatatttgcaaaaactgaaaatgttgagggattgacccattttgatgagattctacaagaagctgatggtattatcctttcccgtgggaatttgggcattgatcttcccccagagaaggtatttttctttcaaaaatctgccctttacaagtgtaatatggctgggaaacctgccgtgcttacacgtgttgtggatagcatgactgacaacttaagaccaactcgtgcagaagccactgatgttgccaatgctgttttagatggaagtgatgcaatacttctaggtgctgagaccttacgtgggttataccctgttgagactatttccacagttggaaaaatttgtgcagaagctgagaaagtttttaatcaagacctttattttaagaaaaccgtcaaatatgttggagaacccatgacccacttggaatctattgcatcctctgcggtacgagcagctattaaggtgaaggcttctgttattatttgcttcacttcttctggaagggctgcaagattaatagcaaaatataggccaaccatgccagttctctctgttgtgatcccccgactcaagacaaatcagctgaaatggagcttcagtggagcttttgaggctaggcaatcacttattgttagaggcctctttcccatgcttgccgatccccgacatcctgccgagtcgacaagtggcacaaacgagtctattctaaaggttgcccttgatcatggaaaagcatcaggagttataaagtcacacgaccgagtagttgtttgccagaaagttggtgatgcgtctgtggttaagattatcgagcttgaagattaa

SEQ ID NO: 8864 - protein, 527 aa, Glycine max
MHSSHLLLEEPIRMVSILEPSKPNFFPAMTKIVGTLGPKSRSVEVISACLKAGMSVARFDFSWDDPEYHQETLENLKNAIKTTKKLCAVMLDTVGAEMQVVNKSEKAISLEADGQVVLTPDRGQEASSQILPINFDGLAKSMKKGDTIFIGQYLFTGSETTSVWLEVSEVKGQDVICTIKNSATLAGSLFTLHASQVHIDLPTLTDKDKEVISTWGVKNKIDFLSLSYTRHAEDVRQAREFLSKLGDLSQTQIFAKTENVEGLTHFDEILQEADGIILSRGNLGIDLPPEKVFFFQKSALYKCNMAGKPAVLTRVVDSMTDNLRPTRAEATDVANAVLDGSDAILLGAETLRGLYPVETISTVGKICAEAEKVFNQDLYFKKTVKYVGEPMTHLESIASSAVRAAIKVKASVIICFTSSGRAARLIAKYRPTMPVLSVVIPRLKTNQLKWSFSGAFEARQSLIVRGLFPMLADPRHPAESTSGTNESILKVALDHGKASGVIKSHDRVVVCQKVGDASVVKIIELED

SEQ ID NO: 8865 - DNA, 1638 bp, Glycine max
  CDS (1)..(1638)
atggcaaccattaacctttcttccgctactacgtctctcttccaatccaaacaccgaacgaaacgcattccacgcctccctacaatcgccagaataacaaaccacatcgaaggaactcatcttaactcccccaacggctctcccatccttggcaacgcaaacaattcccttgaggttccctccaataactatatctcgctacactcttcagacgtgcgtaggaaaactaagatcgtgtgcacgataggtccttctacgagctcacgtgatatgatatggaacctggctcaagctggaatgaacgtggcgcgtttgaacatgtcgcatggggaccacgcctcgcacctccaaaccattgatttggtgaaagaatacaattctcagtttcaagataaggttgtagccatcatgctcgacaccaagggtcctgaagttagaagtggggatgtagctcaacctattttacttaaagagggacaagaattctgtttcaccactatgagaggggttagcacacatgacacggttagcgtgaactacgatggctttgtgaatgatgtggagttcggagatgtgttgctggttgatggaggaatgatgtctcttgctgttaagtcaaagacaaaagacttggttaaatgtgaagttattgatggtggtgaactgaaatctaggcgtcatttaaatgtccgtggaaaaagtgcaacacttccttccataactgacaaggactgggaagatatcaagtttggggtggacaatcaagtagacttctttgctgtctcatttgtcaaggatgctagagtggtgcacgagttaaaacactacctcaaaagtcataatgccgatatacacgtgattgtaaaaattgaaagtgcagattccataccaaatctccattcgatactttctgcttcagatggggccatggtcgctcgtggggatcttggagctgaacttccaatagaggaagttcctttattgcaggaagacatcattcgaagatgtcaaattatgcaaaagcctgttattgtggcaacaaatatgcttgaaagcatgattaatcatcccacaccaacaagggcagaagtttcagacatcgcaattgcagtaagacaaggtgctgatgctatcatgctttcaggagaaactgcacatggaaaatttccattgaaagctgttaaagttatgcacacggtggctcttaggaatgaatccagtgttcaaagtggtgtttcttatccgagtcaactgagttcccatgaaagtcatatgggagaaatgtttgctttccatgcgacaacaatgtctaacactcttaatactcctattattgttttcaccagaacaggatccatggcaattcttttgagccattataggccttactcaacaatctttgcattcacaaatgaagcaagaattaagcagaggttggcgctttatcatggggttatgtccatatacatgcaattttcaaatgatgtagaagagaccttctctagagccctcaagctactattgagtaagagtcatttacacgagggacaacatgtcacacttgttcaaagtggagcacaaccaatctggcgtgaggaatccactcaccacatacaagttcgcaaggttcatggataa

SEQ ID NO: 8866 - protein, 545 aa, Glycine max
MATINLSSATTSLFQSKHRTKRIPRLPTIARITNHIEGTHLNSPNGSPILGNANNSLEVPSNNYISLHSSDVRRKTKIVCTIGPSTSSRDMIWNLAQAGMNVARLNMSHGDHASHLQTIDLVKEYNSQFQDKVVAIMLDTKGPEVRSGDVAQPILLKEGQEFCFTTMRGVSTHDTVSVNYDGFVNDVEFGDVLLVDGGMMSLAVKSKTKDLVKCEVIDGGELKSRRHLNVRGKSATLPSITDKDWEDIKFGVDNQVDFFAVSFVKDARVVHELKHYLKSHNADIHVIVKIESADSIPNLHSILSASDGAMVARGDLGAELPIEEVPLLQEDIIRRCQIMQKPVIVATNMLESMINHPTPTRAEVSDIAIAVRQGADAIMLSGETAHGKFPLKAVKVMHTVALRNESSVQSGVSYPSQLSSHESHMGEMFAFHATTMSNTLNTPIIVFTRTGSMAILLSHYRPYSTIFAFTNEARIKQRLALYHGVMSIYMQFSNDVEETFSRALKLLLSKSHLHEGQHVTLVQSGAQPIWREESTHHIQVRKVHG

SEQ ID NO: 8867 - DNA, 1638 bp, Glycine max
  CDS (1)..(1638)
atggcaaccattaacctttcttccgctactacgtctctcttccaatccaaacaccgaacgaaacgcattccacgcctccctacaatcgccagaataacaaaccacatcgaaggaactcatcttaactcccccaacggctctcccatccttggcaacgcaaacaattcccttgaggttccctccaataactatatctcgctacactcttcagacgtgcgtaggaaaactaagatcgtgtgcacgataggtccttctacgagctcacgtgatatgatatggaacctggctcaagctggaatgaacgtggcgcgtttgaacatgtcgcatggggaccacgcctcgcacctccaaaccattgatttggtgaaagaatacaattctcagtttcaagataaggttgtagccatcatgctcgacaccaagggtcctgaagttagaagtggggatgtagctcaacctattttacttaaagagggacaagaattctgtttcaccactatgagaggggttagcacacatgacacggttagcgtgaactacgatggctttgtgaatgatgtggagttcggagatgtgttgctggttgatggaggaatgatgtctcttgctgttaagtcaaagacaaaagacttggttaaatgtgaagttattgatggtggtgaactgaaatctaggcgtcatttaaatgtccgtggaaaaagtgcaacacttccttccataactgacaaggactgggaagatatcaagtttggggtggacaatcaagtagacttctttgctgtctcatttgtcaaggatgctagagtggtgcacgagttaaaacactacctcaaaagtcataatgccgatatacacgtgattgtaaaaattgaaagtgcagattccataccaaatctccattcgatactttctgcttcagatggggccatggtcgctcgtggggatcttggagctgaacttccaatagaggaagttcctttattgcaggaagacatcattcgaagatgtcaaattatgcaaaagcctgttattgtggcaacaaatatgcttgaaagcatgattaatcatcccacaccaacaagggcagaagtttcagacatcgcaattgcagtaagacaaggtgctgatgctatcatgctttcaggagaaactgcacatggaaaatttccattgaaagctgttaaagttatgcacacggtggctcttaggaatgaatccagtgttcaaagtggtgtttcttatccgagtcaactgagttcccatgaaagtcatatgggagaaatgtttgctttccatgcgacaacaatgtctaacactcttaatactcctattattgttttcaccagaacaggatccatggcaattcttttgagccattataggccttactcaacaatctttgcattcacaaatgaagcaagaattaagcagaggttggcgctttatcatggggttatgtccatatacatgcaattttcaaatgatgtagaagagaccttctctagagccctcaagctactattgagtaagagtcatttacacgagggacaacatgtcacacttgttcaaagtggagcacaaccaatctggcgtgaggaatccactcactacatacaagttcgcaaggttcatggataa

SEQ ID NO: 8868 - protein, 545 aa, Glycine max
MATINLSSATTSLFQSKHRTKRIPRLPTIARITNHIEGTHLNSPNGSPILGNANNSLEVPSNNYISLHSSDVRRKTKIVCTIGPSTSSRDMIWNLAQAGMNVARLNMSHGDHASHLQTIDLVKEYNSQFQDKVVAIMLDTKGPEVRSGDVAQPILLKEGQEFCFTTMRGVSTHDTVSVNYDGFVNDVEFGDVLLVDGGMMSLAVKSKTKDLVKCEVIDGGELKSRRHLNVRGKSATLPSITDKDWEDIKFGVDNQVDFFAVSFVKDARVVHELKHYLKSHNADIHVIVKIESADSIPNLHSILSASDGAMVARGDLGAELPIEEVPLLQEDIIRRCQIMQKPVIVATNMLESMINHPTPTRAEVSDIAIAVRQGADAIMLSGETAHGKFPLKAVKVMHTVALRNESSVQSGVSYPSQLSSHESHMGEMFAFHATTMSNTLNTPIIVFTRTGSMAILLSHYRPYSTIFAFTNEARIKQRLALYHGVMSIYMQFSNDVEETFSRALKLLLSKSHLHEGQHVTLVQSGAQPIWREESTHYIQVRKVHG

SEQ ID NO: 8869 - DNA, 1728 bp, Glycine max
  CDS (1)..(1728)
atgtctcatgtagtggtcactcgatccattcacacctccctcacgcgccccacctcaggatctgcacaccacagagcccaaacgttgttgaagcctccaacttttgcttccaaagtgttcccacaacaaaggaacaacccctccaaagtttgctcccgaagttgcctcgtcaatgcgaggaaatctgcacccgctaaagttgttcccgtctcacccgaggatgattcaaagattgaggaagagttgcagcactcgcgtggtatgcagcaacttggcgacacttctgttggaatgtggtcaaaacccacgtttaggaggaagacaaaggttgtttgcaccattggtccttctaccaacaccagggaaatgatttggaagctggctgaggctgggatgaatgttgcccgattgaatatgtctcacggagaccatgcttctcatcagaaaattattgatttggttaaagaatataatgctcaatccaaggacaacgtaattgcaattatgcttgataccaagggtcctgaggttaggagtggggatttgccacaaccaatcaatttaacaactgggcaggaattcacatttaccatccggaggggtgttggaactgcagattgtgttagtgtgaactatgacgatttcgtcaatgatgtggatgtgggagacatgcttcttgttgatggtggtatgatgtctttggtggttaagtctaagacagaggattctgtgaaatgtgaagttgttgatggaggagagctcaagtcaaggagacatttgaatgttagaggaaaaagtgcaacactgccttccataactgagaaggattgggatgacatcaaatttggagtggataacaaagttgacttctatgctgtttcttttgttaaggatgcacaagtagttcatgaactgaagaattatttgaaaagctgtgatgctgatatacacgtcattgtaaaaattgaaagtgcagactctataccaaacttgcattcaattattacagcgtctgatggggccatggttgcaagaggagatcttggtgcagaactccctattgaagaggttccacttttgcaggaagaaataatcaccatatgtcgtagcatgggaaaggccgttattgtggcaacaaatatgctggaaagcatgattgttcacccgacaccaaccagagccgaggtatccgatattgcaattgctgttcgagaaggttctgatgcaataatgctttctggggaaactgctcatggaaagttcccactaaaagccgtgaaagtaatgcacaccgtagcattacggacagaagccactatacctggtggtcaaatgccaccaaatattggtcaagtattcaagaaccacatgagtgagatgtttgcttaccatgcaaccatgatgtctaatacccttggaacctcaactgttgtcttcactagatcaggcttcatggctatccttttgagccactatcgaccttcaggcaccatatttgcttttacagatcaaaagaggatacaacagaggttggctttgtatcaaggagtctgtcctatttacatggaattctctgaagatgctgaagagactttcacaagggccttggatttgctgcagaagcaaggaatggtgaaatcaggagaagaagtagcactagtacaaagtggcacgcaacccatatggaggttccaatccactcacaatatccaggtccgaacagtgtaa

SEQ ID NO: 8870 - protein, 575 aa, Glycine max
MSHVVVTRSIHTSLTRPTSGSAHHRAQTLLKPPTFASKVFPQQRNNPSKVCSRSCLVNARKSAPAKVVPVSPEDDSKIEEELQHSRGMQQLGDTSVGMWSKPTFRRKTKVVCTIGPSTNTREMIWKLAEAGMNVARLNMSHGDHASHQKIIDLVKEYNAQSKDNVIAIMLDTKGPEVRSGDLPQPINLTTGQEFTFTIRRGVGTADCVSVNYDDFVNDVDVGDMLLVDGGMMSLVVKSKTEDSVKCEVVDGGELKSRRHLNVRGKSATLPSITEKDWDDIKFGVDNKVDFYAVSFVKDAQVVHELKNYLKSCDADIHVIVKIESADSIPNLHSIITASDGAMVARGDLGAELPIEEVPLLQEEIITICRSMGKAVIVATNMLESMIVHPTPTRAEVSDIAIAVREGSDAIMLSGETAHGKFPLKAVKVMHTVALRTEATIPGGQMPPNIGQVFKNHMSEMFAYHATMMSNTLGTSTVVFTRSGFMAILLSHYRPSGTIFAFTDQKRIQQRLALYQGVCPIYMEFSEDAEETFTRALDLLQKQGMVKSGEEVALVQSGTQPIWRFQSTHNIQVRTV

SEQ ID NO: 8871 - DNA, 1749 bp, Glycine max
  CDS (1)..(1749)
atggtcttgaagtcaatggttgcttccgcgagcgatctaagtctcgtgtctgttgcagggaactctccccttgatttcaagaatcgggttttcggtggccgactcattagcctcggatttcgtttcaacaaaggtagtaaatgcaaggggaatgaaaggtttaactttgaggttcgtgcagctgtggaagtgggtgtggagagatcgaagagcaaggctttggagggtggttttgggttggatgtggtttcagaggcagagttaacggtgaagggttttgcggggttgaggaagaccaagctcgtgtgcactgttggtcctgcttgcagctctatggaggatcttgagaacttggctcttggaggcatgagtgttgccaggctcaacatgtgccatgggaccagggagtggcaccgtgatgtgattaggaagatcaagaagttgaatgaggagaaagggttctgtgtttctgtaatgattgacactgagggtagtcagattcatgttgttgatcatggagctccttcctccgttaaagttgaggaaggttcaaattgggtgtttactgctgaacattatgagggttctcgtccattcactgttcaaacgaactatagaggtttttctgaaggtaccgaagtgggtgatgaacttgtaattgatggtggaatggcatgctttgaagtcacagaaaagactggtaatgatttgcattgcaaatgcatagatgctggtcttttcctgcctggagccaaatttagtttttggagagatggaaagcttgtgagggggaataacaagctccccactctatcgacaaaggattgggctgacattgactttggtatagcagagggagttgatttttttgccttatcctttgtcaatcatgctgattctgttaaggatctaaagatgtacctctctacgaagtcaactaaatccattaaagttttggcaaagatagaaagcttagaatcccttcataaactggaggaaatagtgcaagcttctgatgggatcatggtggctcggggtgaccttggtgtcgaaataccacttgaacagattcctacagtccaagaggatataatttacgtatgcagacaattaaacaagccagtgattgtagcttctcagcttcttgagtcaatggtcgagtatccaacgccaacacgtgctgaggtagcagatgtttctgaagcagttcgacagtatgctgatgctttgatgttgtctggagagtcagctattggatcatatggacgaaaagctttggcagtcttggatatggctagcagtagaatggaatcatggagtcgggaggaaaatagacaaagtcttgttagccaccatcaacttggagaatcattgccagaatgcataactgagcaaatatgcaattgtgccgttgaaatggccaacaaccttggtgtggatgccatctttgtgtacacaaagtatggacacatggcatcgcttctatcgcgcaaccgcccgaatcctcccatctttgctttcaccaacgatgacagtacccgcatggctctgactttgcaatggggtgttgtgcccattctggttgatttgtccgatgatgctgaatctaacatctcaaagtctgtgcaacttatgaaatctagagggttgatcagccaaggagatgttgttctagtggtctcagatgttgctccgacacgtgcctctcctatggctttccagtctattcaggtgaagactattatctaa

SEQ ID NO: 8872 - protein, 582 aa, Glycine max
MVLKSMVASASDLSLVSVAGNSPLDFKNRVFGGRLISLGFRFNKGSKCKGNERFNFEVRAAVEVGVERSKSKALEGGFGLDVVSEAELTVKGFAGLRKTKLVCTVGPACSSMEDLENLALGGMSVARLNMCHGTREWHRDVIRKIKKLNEEKGFCVSVMIDTEGSQIHVVDHGAPSSVKVEEGSNWVFTAEHYEGSRPFTVQTNYRGFSEGTEVGDELVIDGGMACFEVTEKTGNDLHCKCIDAGLFLPGAKFSFWRDGKLVRGNNKLPTLSTKDWADIDFGIAEGVDFFALSFVNHADSVKDLKMYLSTKSTKSIKVLAKIESLESLHKLEEIVQASDGIMVARGDLGVEIPLEQIPTVQEDIIYVCRQLNKPVIVASQLLESMVEYPTPTRAEVADVSEAVRQYADALMLSGESAIGSYGRKALAVLDMASSRMESWSREENRQSLVSHHQLGESLPECITEQICNCAVEMANNLGVDAIFVYTKYGHMASLLSRNRPNPPIFAFTNDDSTRMALTLQWGVVPILVDLSDDAESNISKSVQLMKSRGLISQGDVVLVVSDVAPTRASPMAFQSIQVKTII

SEQ ID NO: 8873 - DNA, 1584 bp, Glycine max
  CDS (1)..(1584)
atgccttccagtcacttgcttctcgaggaacctattaggatggtctccatccttgagccatccaagcctagttttttctctgcaatgacaaagattgttggtaccctgggacctaaatctagatccgtcgaaaccatttctggttgcctcaaggctggcatgtctgtggctcgttttgacttttcatggcatgaccctgagtaccaccaggagactttggagaatttgaaggctgctatcaagagtactaagaagctctgtgctgttatgctggacacagtgggcgctgagatgcaggttgttaacaaaagtgagagagcaatctcgctcgaggcaaatggtctggttgttctaactcctgatcagggacaagaagcctcttcagagatattgcctatcaattttgatggactggctaaggcagtgaagaagggagacaccatttttattggtcaatacttgttcacgggaagtgaaactacttctgtatggctagaggtatctgaagtcaaagggcaagatgttgtttgtattataaagaacacagctacattggctgggtcattgttcactttgcatgcctctcaaattcatattgatttgcctactctcactgagaaagacaaggaggttataagcacctggggtgttaaaaacaaaattgattttctgtcattgtcatatactcgacacgccgaagatgttcgccaggctcgtgaatttctttcaaagttaggtgatctcagccaaactcaaatttttgcaaagattgaaaatgttgagggattgacccattttgatgagattctacaagaagctgacggtattatcctttcccgtgggaatttgggtattgatcttccaccagagaaggtgtttttgtttcaaaaatctgccctttacaagtgtaacatggctgggaaacctgctgtgcttacacgtgttgtggatagcatgactgacaacttgagaccaactcgtgctgaagccacagatgttgccaatgctgttttagatggaagtgatgccatacttctgggtgctgagactttacgtgggttgtaccctattgagactatttctactgttggcagaatttgttctgaggctgagaaagttttcaatcaagacctttattttaagaggacagtcaagtatgttggagaacccatgacccacttggaatctattgcatcctctgcggtacgggctgcaattaaggtgaaagcatctattataatttgtttcacttcatcaggaagggctgcaagattgatcgcaaagtataggccaacaatgccagtactatctgttgtgatcccccgactcaagacaaatcagctaaagtggagctttagtggagcttttgaggcaagacaatcacttatcgtgagaggtctctttcctatgcttgcagatccacgacatcctgctgagtcaacaagtgcaacaaatgagtctattcttaaggttgcccttgatcatggaaaatcattgggagttattaagtcacatgaccgggtagttgtttgccagaaacttggtgatgcatctgtggttaagattattgagcttgaagattaa

SEQ ID NO: 8874 - protein, 527 aa, Glycine max
MPSSHLLLEEPIRMVSILEPSKPSFFSAMTKIVGTLGPKSRSVETISGCLKAGMSVARFDFSWHDPEYHQETLENLKAAIKSTKKLCAVMLDTVGAEMQVVNKSERAISLEANGLVVLTPDQGQEASSEILPINFDGLAKAVKKGDTIFIGQYLFTGSETTSVWLEVSEVKGQDVVCIIKNTATLAGSLFTLHASQIHIDLPTLTEKDKEVISTWGVKNKIDFLSLSYTRHAEDVRQAREFLSKLGDLSQTQIFAKIENVEGLTHFDEILQEADGIILSRGNLGIDLPPEKVFLFQKSALYKCNMAGKPAVLTRVVDSMTDNLRPTRAEATDVANAVLDGSDAILLGAETLRGLYPIETISTVGRICSEAEKVFNQDLYFKRTVKYVGEPMTHLESIASSAVRAAIKVKASIIICFTSSGRAARLIAKYRPTMPVLSVVIPRLKTNQLKWSFSGAFEARQSLIVRGLFPMLADPRHPAESTSATNESILKVALDHGKSLGVIKSHDRVVVCQKLGDASVVKIIELED

SEQ ID NO: 8875 - DNA, 1749 bp, Glycine max
  CDS (1)..(1749)
atggttttgaaatcaatggttgcttccgcgagcgatctaagtctcgtgagtgttgcagggaaccctccccttgatttgaagaatcgggttttcggtagccgcgtcatcagcctcggatttcgtttcaacaaaggtagtaaatggaaggggaatgaaaggtttaactttaaggttcgtgcagctgtggaagtgggtgtggagagatcgaagagcaaggctttggagggtggttttgggttggatgtggtttcagaggcagagttaacggtgaagggttttgcggggttgaggaagaccaagctcgtgtgcactgttggtcctgcttgcagctctatggaggatcttgagaacttggctcttggaggcatgagtgttgccaggctcaacatgtgccatgggaccagggagtggcaccgtgatgtgattaggaagatcaagaagttgaatgaggagaaagggttctgtgtttctgtaatgattgacactgagggtagtcagattcatgttgttgatcatggagctccttcctccgttaaagttgaggaaggttcaaattgggtgtttactgctgaacattatgagggttctcgtccattcactgttcaaacgaactatagaggtttttctgaaggtaccgaagtgggtgatgaacttgtaattgatggtggaatggcatgctttgaagtcacagaaaagactggtaatgatttgcattgcaaatgcatagatgctggtcttttcctgcctggagccaaatttagtttttggagagatggaaagcttgtgagggggaataacaagctccccactctatcgacaaaggattgggctgacattgactttggtatagcagagggagttgatttttttgccttatcctttgtcaatcatgctgattctgttaaggatctaaagatgtacctctctacgaagtcaactaaatccattaaagttttggcaaagatagaaagcttagaatcccttcataaactggaggaaatagtgcaagcttctgatgggatcatggtggctcggggtgaccttggtgtcgaaataccacttgaacagattcctacagtccaagaggatataatttacgtatgcagacaattaaacaagccagtgattgtagcttctcagcttcttgagtcaatggtcgagtatccaacgccaacacgtgctgaggtagcagatgtttctgaagcagttcgacagtatgctgatgctttgatgttgtctggagagtcagctattggatcatatggacgaaaagctttggcagtcttggatatggctagcagtagaatggaatcatggagtcgggaggaaaatagacaaagtcttgttagccaccatcaacttggagaatcattgccagaatgcataactgagcaaatatgcaattgtgccgttgaaatggccaacaaccttggtgtggatgccatctttgtgtacacaaagtatggacacatggcatcgcttctatcgcgcaaccgcccgaatcctcccatctttgctttcaccaacgatgacagtacccgcatggctctgactttgcaatggggtgttgtgcccattctggttgatttgtccgatgatgctgaatctaacatctcaaagtctgtgcaacttatgaaatctagagggttgatcagccaaggagatgttgttctagtggtctcagatgttgctccgacacgtgcctctcctatggctttccagtctattcaggtgaagactattatctaa

SEQ ID NO: 8876 - protein, 582 aa, Glycine max
MVLKSMVASASDLSLVSVAGNPPLDLKNRVFGSRVISLGFRFNKGSKWKGNERFNFKVRAAVEVGVERSKSKALEGGFGLDVVSEAELTVKGFAGLRKTKLVCTVGPACSSMEDLENLALGGMSVARLNMCHGTREWHRDVIRKIKKLNEEKGFCVSVMIDTEGSQIHVVDHGAPSSVKVEEGSNWVFTAEHYEGSRPFTVQTNYRGFSEGTEVGDELVIDGGMACFEVTEKTGNDLHCKCIDAGLFLPGAKFSFWRDGKLVRGNNKLPTLSTKDWADIDFGIAEGVDFFALSFVNHADSVKDLKMYLSTKSTKSIKVLAKIESLESLHKLEEIVQASDGIMVARGDLGVEIPLEQIPTVQEDIIYVCRQLNKPVIVASQLLESMVEYPTPTRAEVADVSEAVRQYADALMLSGESAIGSYGRKALAVLDMASSRMESWSREENRQSLVSHHQLGESLPECITEQICNCAVEMANNLGVDAIFVYTKYGHMASLLSRNRPNPPIFAFTNDDSTRMALTLQWGVVPILVDLSDDAESNISKSVQLMKSRGLISQGDVVLVVSDVAPTRASPMAFQSIQVKTII

SEQ ID NO: 8877 - DNA, 1728 bp, Glycine max
  CDS (1)..(1728)
atgtctcaggtagtggccactcgatccattcactcctccctcacgcgccccacctcaggatctgcacaccacagggcccaaacgttgttgaagcctccaacttttgcttccaaattgttcggagcacaaaggaacaacccctccaaagtttgctcccgaagttgcctcgtcaatgcgaggaaatctgcacccgctaaagttgttcccgtgtcacccgaggatgattcaaagattgaggaagagttgcagcacttgcgtggtatgcagcaacttggcgacacttctgttggaatgtggtcaaaacccacgtttaggaggaagacaaaggttgtttgcaccattggtccttctaccaacaccagggaaatgatttggaagctggctgagactgggatgaatgttgcccgattgaatatgtctcacggagaccatgcttctcatcagaaaattattgatttggttaaagaatataatgctcaatccaaggacaacgtaattgcaattatgcttgataccaagggtcctgaggttaggagtggggatttgccacaaccaatcaatttaacaactgggcaggaattcacttttaccatccggaggggtgttggaactgcagattgtgttagtgtgaactatgacgatttcgtcaatgatgtggatgtgggagacatgcttcttgttgatggtggtatgatgtctttggtggttaagtctaagacagaggattctgtgaaatgtgaagttgttgatggaggagagctcaagtcaaggagacatttgaatgttagaggaaaaagtgcaacactgccttccataactgagaaggattgggatgacatcaaatttggagtggataacaaagttgacttctatgctgtttcttttgttaaggatgcacaagtagttcatgaactgaagaattatttgaaaagctgtgatgctgatatacacgtcattgtaaaaattgaaagtgcagactctataccaaacttgcattcaattattacagcgtctgatggggccatggttgcaagaggagatcttggtgcagaactccctattgaagaggttccacttttgcaggaagaaataatcaccatatgtcgtagcatgggaaaggccgttattgtggcaacaaatatgctggaaagcatgattgttcacccgacaccaaccagagccgaggtatccgatattgcaattgctgttcgagaaggttctgatgcaataatgctttctggggaaactgctcatggaaagttcccactaaaagccgtgaaagtaatgcacaccgtagcattacggacagaagccactatacctggtggtcaaatgccaccaaatattggtcaagtattcaagaaccacatgagtgagatgtttgcttaccatgcaaccatgatgtctaatacccttggaacctcaactgttgtcttcactagatcaggcttcatggctatccttttgagccactatcgaccttcaggcaccatatttgcttttacagatcaaaagaggatacaacagaggttggctttgtatcaaggagtctgtcctatttacatggaattctctgaagatgctgaagagactttcacaagggccttggatttgctgcagaagcaaggaatggtgaaatcaggagaagaagtagcactagtacaaagtggcacgcaacccatatggaggttccaatccactcacaatatccaggtccgaacagtgtaa

SEQ ID NO: 8878 - protein, 575 aa, Glycine max
MSQVVATRSIHSSLTRPTSGSAHHRAQTLLKPPTFASKLFGAQRNNPSKVCSRSCLVNARKSAPAKVVPVSPEDDSKIEEELQHLRGMQQLGDTSVGMWSKPTFRRKTKVVCTIGPSTNTREMIWKLAETGMNVARLNMSHGDHASHQKIIDLVKEYNAQSKDNVIAIMLDTKGPEVRSGDLPQPINLTTGQEFTFTIRRGVGTADCVSVNYDDFVNDVDVGDMLLVDGGMMSLVVKSKTEDSVKCEVVDGGELKSRRHLNVRGKSATLPSITEKDWDDIKFGVDNKVDFYAVSFVKDAQVVHELKNYLKSCDADIHVIVKIESADSIPNLHSIITASDGAMVARGDLGAELPIEEVPLLQEEIITICRSMGKAVIVATNMLESMIVHPTPTRAEVSDIAIAVREGSDAIMLSGETAHGKFPLKAVKVMHTVALRTEATIPGGQMPPNIGQVFKNHMSEMFAYHATMMSNTLGTSTVVFTRSGFMAILLSHYRPSGTIFAFTDQKRIQQRLALYQGVCPIYMEFSEDAEETFTRALDLLQKQGMVKSGEEVALVQSGTQPIWRFQSTHNIQVRTV

SEQ ID NO: 8879 - DNA, 1509 bp, Glycine max
  CDS (1)..(1509)
atggctacgacgaggattgaggcagagaagaagccgaagacgaagatcgtgtgcactctgggccccgcatcacggtcggtcccaatgatcgagaagcttctgcgagcaggcatgaacgtggcgcgcttcaacttctcccatgggtcccacgagtaccaccaggaaaccctcgacaacctccgcgccgccatggagaacaccggtattctctgcgccgtcatgctcgacaccaaggggcctgagattcgaactggttttctcaaggacggtaagcctatccaactgatacaaggtaatgaaataaccatttccactgactatgacctaaagggagatgagaagacgatttgtatgagctacaaaaagctgcctgaggatgtgaagcccgggatggtcatactctgtgcggatggcaccatatcatttacagttttatcatgtgacaaacaagcaggcttggttcaatgccgatgtgagaactctgccactcttggcgagaggaagaatgttaatttgcctggagtgatagtggatctcccaactttgacagacaaggacaaggaagatatcttggcctggggaattccgaataaaattgacatgattgctctttcttttgttcgaaaaggttctgacctggtggaagtcaggaaagttctgggaaaacatgctaagaacattatgctcatgtctaaggttgaaaaccaagaaggggttgcaaattttgatgaaatccttgcaaattcagatgcatttatggtggcacgtggtgaccttggaatggaaattccaatagagaagatatttctcgcacagaaagtgatgatttacaagtgcaacatccaaggaaaaccagttgtcactgcaacccagatgttggagtcaatgatcaaatctcccaggccaaccagggccgaagctactgatgttgccaatgcagttctggatggcacagactgtgtgatgcttagtggtgaaaccgctgctggagcctatccagaccttgctgttcaaacaatggctaaaatatgcattgaagcagagagcacccttgactatggtgatgtgttcaaaaggattatggagcactcaccggtacccatgagcccattagagagtctagcttcttctgctgttagaacagccaactcggctagagcggctcttatcttggttttaactagaggagggagtactgcaaaattggtggcgaaatacaggccagggatgccaattctttccgtggttgttcccgagctcaagactgatagctttgattgggcatgcagtgatgaggcccctgcgagacatagccttatattccgcgggttggttcccgtgttgagtgcagcttctgctagagcttctcatgctgaaacaacagaagaagcaatagaattcgccatgcaacatgccaagtccaagggtctctgccacaacggggattcagtggtggcactgcatcgtgtgggcactgcatctatcatcaagatcttgactgtgaaatga

SEQ ID NO: 8880 - protein, 502 aa, Glycine max
MATTRIEAEKKPKTKIVCTLGPASRSVPMIEKLLRAGMNVARFNFSHGSHEYHQETLDNLRAAMENTGILCAVMLDTKGPEIRTGFLKDGKPIQLIQGNEITISTDYDLKGDEKTICMSYKKLPEDVKPGMVILCADGTISFTVLSCDKQAGLVQCRCENSATLGERKNVNLPGVIVDLPTLTDKDKEDILAWGIPNKIDMIALSFVRKGSDLVEVRKVLGKHAKNIMLMSKVENQEGVANFDEILANSDAFMVARGDLGMEIPIEKIFLAQKVMIYKCNIQGKPVVTATQMLESMIKSPRPTRAEATDVANAVLDGTDCVMLSGETAAGAYPDLAVQTMAKICIEAESTLDYGDVFKRIMEHSPVPMSPLESLASSAVRTANSARAALILVLTRGGSTAKLVAKYRPGMPILSVVVPELKTDSFDWACSDEAPARHSLIFRGLVPVLSAASARASHAETTEEAIEFAMQHAKSKGLCHNGDSVVALHRVGTASIIKILTVK

SEQ ID NO: 8881 - DNA, 1749 bp, Glycine max
  CDS (1)..(1749)
atggtcctgaagtcagtggttgcttccgcgagcgatctaagtctcgtgtctgttgcagggaactctccccttgatttcaagaatcgggttttcggtggccgactcattagcctcggatttcgtttcaacaaaggtagtaaatgcaaggggaatgaaaggtttaactttgaggttcgtgcagctgtggaagtgggtgtggagagatcgaagagtaaggctttggagggtggttttgggttggatgtggtttcagaggcagagttaacagtgaagggttttgcggggttgaggaagaccaaactcgtgtgcactgttggtcctgcttgcagctctatggaggatcttgagaacttggctcttggaggcatgagtgttgccaggctcaacatgtgccatgggaccagggagtggcaccgtgatgtgattaggaagatcaagaagttgaatgaggagaaagggttctgtgtttctgtaatgattgacactgagggtagtcagattcatgttgttgatcatggagctccttcctccgttaaagttgaggaaggttcaaattgggtgtttactgctgaacattatgagggttctcgtccattcactgttcaaacgaactatagaggtttttctgaaggtaccgaagtgggtgatgaacttgtaattgatggtggaatggcatgctttgaagtcacagaaaagactggtaatgatttgcattgcaaatgcatagatgctggtcttttcctgcctggagccaaatttagtttttggagagatggaaagcttgtgagggggaataacaagctccccactctatcgacaaaggattgggctgacattgactttggtatagcagagggagttgatttttttgccttatcctttgtcaatcatgctgattctgttaaggatctaaagatgtacctctctacgaagtcaactaaatccattaaagttttggcaaagatagaaagcttagaatcccttcataaactggaggaaatagtgcaagcttctgatgggatcatggtggctcggggtgaccttggtgtcgaaataccacttgaacagattcctacagtccaagaggatataatttacgtatgcagacaattaaacaagccagtgattgtagcttctcagcttcttgagtcaatggtcgagtatccaacgccaacacgtgctgaggtagcagatgtttctgaagcagttcgacagtatgctgatgctttgatgttgtctggagagtcagctattggatcatatggacgaaaagctttggcagtcttggatatggctagcagtagaatggaatcatggagtcgggaggaaaatagacaaagtcttgttagccaccatcaacttggagaatcattgccagaatgcataactgagcaaatatgcaattgtgccgttgaaatggccaacaaccttggtgtggatgccatctttgtgtacacaaagtatggacacatggcatcgcttctatcgcgcaaccgcccgaatcctcccatctttgctttcaccaacgatgacagtacccgcatggctctgactttgcaatggggtgttgtgcccattctggttgatttgtccgatgatgctgaatctaacatctcaaagtctgtgcaacttatgaaatctagagggttgatcagccaaggagatgttgttctagtggtctcagatgttgctccgacacgtgcctctcctatggctttccagtctattcaggtgaagactattatctaa

SEQ ID NO: 8882 - protein, 582 aa, Glycine max
MVLKSVVASASDLSLVSVAGNSPLDFKNRVFGGRLISLGFRFNKGSKCKGNERFNFEVRAAVEVGVERSKSKALEGGFGLDVVSEAELTVKGFAGLRKTKLVCTVGPACSSMEDLENLALGGMSVARLNMCHGTREWHRDVIRKIKKLNEEKGFCVSVMIDTEGSQIHVVDHGAPSSVKVEEGSNWVFTAEHYEGSRPFTVQTNYRGFSEGTEVGDELVIDGGMACFEVTEKTGNDLHCKCIDAGLFLPGAKFSFWRDGKLVRGNNKLPTLSTKDWADIDFGIAEGVDFFALSFVNHADSVKDLKMYLSTKSTKSIKVLAKIESLESLHKLEEIVQASDGIMVARGDLGVEIPLEQIPTVQEDIIYVCRQLNKPVIVASQLLESMVEYPTPTRAEVADVSEAVRQYADALMLSGESAIGSYGRKALAVLDMASSRMESWSREENRQSLVSHHQLGESLPECITEQICNCAVEMANNLGVDAIFVYTKYGHMASLLSRNRPNPPIFAFTNDDSTRMALTLQWGVVPILVDLSDDAESNISKSVQLMKSRGLISQGDVVLVVSDVAPTRASPMAFQSIQVKTII

SEQ ID NO: 8883 - DNA, 1542 bp, Hordeum vulgare
  CDS (1)..(1542)
atggtgtccaacggagagctgtcgcagccgcaggcgggggagtacggcaccgccgtgatgcggcgccggcccaagaccaagatcgtttgcacgctcggcccggcctcgcgctccgtcgatatgatcgagaagctgctgcgcgccgggatgtgcgtcgcccgcttcaacttctcccacggctcccacgaataccaccaggagacgctcgacaacctgcacgccgccatggagcgcaccgggatcctctgcgccgtcatgctcgacaccaagggtccagagatccgtactggatttttgaaagatgggaagcctatccagttgaaaaagggccaagaaattgtaatctccacagattataccataaagggggacgacaagatgatatcgatgagctataagaagctagcagttgatctgaagccaggcagtgttatattatgcgctgatggtactatcactcttactgtgcttcactgtgacaaagagcaaggtctcgttcgttgctgttgtgagaacactgctatgcttggtgagaggaagaatgtcaatcttccaggggtcgttgttgatctcccaacactcactgaaaaggacagggaggatatccttcaatggggtgtcccgaacaagattgacatgattgctttgtcgtttgttcgcaagggttcagatcttgtggaggtccggaaggtacttggggagcatgccaagtcaataatgctgatgtcaaaggttgagaaccaagaaggagtagctaactttgacgatatcctggcacagtctgatgcttttatggtggcaagaggtgatttgggaatggaaatccctgtagagaagatcttttatgcacagaaggtgatgattttcaagtgcaacattcagggcaagccagttgtgactgcaacccagatgttggagtctatgatcaagtctcctcgccctacccgagcggaagcaaccgacgtggccaacgcagttcttgatggcactgactgtgtcatgctcagtggcgagacagctgccggtgcttatccagaactggcagtgcaaactatggccaagatctgcttgcaggctgagtcatgcgtggactattctgctgtttttaaatcaatcatgtcatcagccccgattcccatgagcccattggagagccttgcctcatcagctgtccgcacagcgaactcagctaaggcgacgcttatcttggtactgaccaggggaggaacaactgcaaggcttgtagccaagtataggccatccatgccgatactgtctgtcgtggttcctgagctcaagacagtcgagtttgattggatctgcagcgacgaggggcctgccaggcaaagccttatcgtgaggggcgtgatcccaatgctgagtgctggcactgcgaaggcgtttgacagcgaagccacggaagaggcactgaggtttgccgtgaagagcgccaaggagacggggctttgcaacgctggtgagtccattgtggcccttcaccgcatcgggaatgcatctgtcatcaagctcttgaccgtgtaa

SEQ ID NO: 8884 - protein, 513 aa, Hordeum vulgare
MVSNGELSQPQAGEYGTAVMRRRPKTKIVCTLGPASRSVDMIEKLLRAGMCVARFNFSHGSHEYHQETLDNLHAAMERTGILCAVMLDTKGPEIRTGFLKDGKPIQLKKGQEIVISTDYTIKGDDKMISMSYKKLAVDLKPGSVILCADGTITLTVLHCDKEQGLVRCCCENTAMLGERKNVNLPGVVVDLPTLTEKDREDILQWGVPNKIDMIALSFVRKGSDLVEVRKVLGEHAKSIMLMSKVENQEGVANFDDILAQSDAFMVARGDLGMEIPVEKIFYAQKVMIFKCNIQGKPVVTATQMLESMIKSPRPTRAEATDVANAVLDGTDCVMLSGETAAGAYPELAVQTMAKICLQAESCVDYSAVFKSIMSSAPIPMSPLESLASSAVRTANSAKATLILVLTRGGTTARLVAKYRPSMPILSVVVPELKTVEFDWICSDEGPARQSLIVRGVIPMLSAGTAKAFDSEATEEALRFAVKSAKETGLCNAGESIVALHRIGNASVIKLLTV

SEQ ID NO: 8885 - DNA, 1584 bp, Oryza sativa
  CDS (1)..(1584)
atgcattcgacgaatctgctgctggaggagcccatcaggatggcatccatcctggagccatccaagcccagcttcttcccggcgatgaccaagatcgtggggacgctggggccaaagtcgcgctccgtcgacaccatctcctcctgcctcaaggccggcatgtcggtggcccgatttgatttctcgtggggagacgccgagtaccaccaggaaacccttgagaacctcaaggtcgccatcaagtccaccaagaagctctgcgcggtcatgcttgacacggtcggcccagagttgcaggtggtgaacaagagcgaagcctccatctccctcgaggagaacggcactgttattctcacccctgaccaggggcaggaggcctcctcacaagtgctgccaattaacttcgctgggcttgctaaggctgtgaagccaggtgacacaatatttgttgggcaatacttgttcacaggcagtgagactacttcagtttggttagaggtttctcaaattaaaggagatgatgtggtctgtgtgataaaaaacacagcaactctggctgggtcgctcttcacattgcattgctcgcagattcacatcgacttacctaccctatctgatgaggacaaggaggttatcagaaaatggggtgccccaaacaagattgacttcctctctctttcttatacaagacatgtagaagatgtgcgacaggcacgtgaattcctctcaaagttaggtgaccttagccagacccagatttttgcaaaaatcgagaatgtggaggggttgaataattttgatgaaatcctccaagaagctgatggtatcatcctgtcaagaggaaaccttggaattgatcttccacctgaaaaggtgtttttatttcaaaagtctgctctgcacaagtgcaacatggctggaaagcctgctgttgttactcgtgttgtagacagtatgactgacaacctcaggcctactcgtgcagaggctacggatgtggcaaatgcagtgcttgacgggagtgatgccattctccttggtgctgagactctgcgtggtttatacccagttgagactatttcaatagtgggcaaaatttgcgctgaggcagagaaggtattcaaccaagatttatacttcaagcggactgtgaaatatgttggggagcccatgacccacttggagtctatcgcttcttctgcggtgcgagctgctatcaaagtgaaggcttctgtcattatttgcttcacatcatctggacgcgctgcaagactaattgccaagtacaggcccaccatgcctgttctatctgttgtcattcctcgtctgaaaacaaaccaactgaggtggagtttcactggcgcatttgaagcaagacaatcactcatagttagaggtctctttccgatgcttgctgatcctcgccatccagctgaatcgaccagcgctaccaatgagtcagttttgaaggttgctcttgaccatggcaaagcttccggtgtgatcaagtcgcatgatcgcgttgttgtctgccagaaagtgggtgattcctcggttgtgaagatcattgagctggacgattag

SEQ ID NO: 8886 - protein, 527 aa, Oryza sativa
MHSTNLLLEEPIRMASILEPSKPSFFPAMTKIVGTLGPKSRSVDTISSCLKAGMSVARFDFSWGDAEYHQETLENLKVAIKSTKKLCAVMLDTVGPELQVVNKSEASISLEENGTVILTPDQGQEASSQVLPINFAGLAKAVKPGDTIFVGQYLFTGSETTSVWLEVSQIKGDDVVCVIKNTATLAGSLFTLHCSQIHIDLPTLSDEDKEVIRKWGAPNKIDFLSLSYTRHVEDVRQAREFLSKLGDLSQTQIFAKIENVEGLNNFDEILQEADGIILSRGNLGIDLPPEKVFLFQKSALHKCNMAGKPAVVTRVVDSMTDNLRPTRAEATDVANAVLDGSDAILLGAETLRGLYPVETISIVGKICAEAEKVFNQDLYFKRTVKYVGEPMTHLESIASSAVRAAIKVKASVIICFTSSGRAARLIAKYRPTMPVLSVVIPRLKTNQLRWSFTGAFEARQSLIVRGLFPMLADPRHPAESTSATNESVLKVALDHGKASGVIKSHDRVVVCQKVGDSSVVKIIELDD

SEQ ID NO: 8887 - DNA, 1803 bp, Zea mays
  CDS (1)..(1803)
atgggacctcgagccggcgggaccgcaccgcatctccctcccattccactccagtccaccaccgctcccattccccagccgccgtcggccgtcgccatggccaccgccgcccactccctcctgcacacaccggaggcccacagggccgccacccgctcgcccttctctcctcccgcgcccactcccttcctccatctccgccctcaccgcctccccctccgcctccgctccacctccccgaccgcctccgacctcaccgccttccccccgaacccgaacgggatcttcgcgtccgaccggcccatcgacgtggacgccgccacggaggccgagctgcgggagaacgggttccggagcacgcgccgcaccaagctcgtctgcaccgtgggccccgccacctcgcgcccggaccagctcgaggcgctcgccgtcggcgggatgaacgtggcccggctcaacatgtgccacggcgacagggagtggcatagggccgccatccgcgccgtcaggagcctcaacgaggagaagggcttcgccgtcgccgtcatgatggacaccgagggcagcgagatccacatgggggacctcggcggcgcatcctcggtcaaggcggaggatggagaagtatggacgttcagtgttagatcatttgaattgcctctcccagaacgaactattaatgtgaactatgatggatttgctgaagatgtgagagttggtgatgagctccttgtggatggtggaatggctcggtttgaggtgattgagaagataggaccagatgttaagtgccgttgcacagatcctggtttattgttgccacgtgccaatcttacattctggcgtgacggcagtatcgtccgtgagaggaatgctatgcttcctacaatttcatcaaaggattggcttgacatagactttgggattgccgaaggtgtagatttcatcgctgtttcatttgtcaagtctgcagaagtaattaggcacttgaaaagctacatagctgcaaggagccgtggaagtgacatggcagtcattgcgaaaatcgagagcatcgactctctaaagaacctggaggagatcatccgagcgtcagacggcgccatggtagccagaggggacatgggggcgcaggttcccctggagcaggtcccctcgatacagcaaaagatcgttcagctctgcaggcagctgaacaagccggtcatcgtcgcctcccagctcctcgagtcgatgatagagtaccccacgcccaccagggccgaggtcgcggacgtctccgaagccgtccgccagcgcgccgacgccctgatgctttccggcgagtcggcaatggggaggtacccggacaaggctctcagcgttctgaggagcgtcagcctgaggatcgagaagtggtggagggaggagaagcggcacgaggcgctggagctccggagcgtctcgtcctccttctccgacaagatatcggaggagatctgcaactcagcagctaaaatggctaatggcctgggagtggacgccgtctttgtgttcaccaagaccgggcacatggcctccctgctctcgcggtgccgccccgactgcccggtcttcgccttcacgacgtcgacgtccgtcaggaggcggctgaacctgcagtggggcctgatccccttccgcctcgccttctcggacgacatggagagcaacctgaaccgcaccttctccctgctcaaggccaggggcatgatccagtctggggacctcgtgatcgccctctcggacatgctgcagtccatccaggtgatgaacgtaccctga

SEQ ID NO: 8888 - protein, 600 aa, Zea mays
MGPRAGGTAPHLPPIPLQSTTAPIPQPPSAVAMATAAHSLLHTPEAHRAATRSPFSPPAPTPFLHLRPHRLPLRLRSTSPTASDLTAFPPNPNGIFASDRPIDVDAATEAELRENGFRSTRRTKLVCTVGPATSRPDQLEALAVGGMNVARLNMCHGDREWHRAAIRAVRSLNEEKGFAVAVMMDTEGSEIHMGDLGGASSVKAEDGEVWTFSVRSFELPLPERTINVNYDGFAEDVRVGDELLVDGGMARFEVIEKIGPDVKCRCTDPGLLLPRANLTFWRDGSIVRERNAMLPTISSKDWLDIDFGIAEGVDFIAVSFVKSAEVIRHLKSYIAARSRGSDMAVIAKIESIDSLKNLEEIIRASDGAMVARGDMGAQVPLEQVPSIQQKIVQLCRQLNKPVIVASQLLESMIEYPTPTRAEVADVSEAVRQRADALMLSGESAMGRYPDKALSVLRSVSLRIEKWWREEKRHEALELRSVSSSFSDKISEEICNSAAKMANGLGVDAVFVFTKTGHMASLLSRCRPDCPVFAFTTSTSVRRRLNLQWGLIPFRLAFSDDMESNLNRTFSLLKARGMIQSGDLVIALSDMLQSIQVMNVP

SEQ ID NO: 8889 - DNA, 1698 bp, Triticum aestivum
  CDS (1)..(1698)
atggcggcggcggcggcggagatggtgcgcgggttcgccgcgacggcgcgcgcggccaggccggccgcgacggtggcggcgcccccgcagcccaggcgggcggtcgccgcgcgggtgctgcggacctccgcctccgagaaggtggcggcggatctctccgtcgccgggaccaacggctccctctccgccctgagcaatactgatgtcagtactgacgccacctcacaagcagtggatgcgactcccaggaggaagacaaagatagtctgcaccataggcccctcgaccaacactcgtgagatgatatggaagcttgcagagactggaatgaatgttgcgcgtatgaatatgtcccatggagaccaccagtcacaccaaaaagtgattgatttggtcaaggagtacaacgcacagaacactgatggcaatactgttgctattatgctggacacaaagggtccggaagtgcgaagtggggatcttcctgagccaatcatgcttgcggaaggtcaagagttcaatttcacgattaaaagaggggtgagcaccgaagacactgtcagcgtgaattatgatgacttcataagcgatgttgaagctggtgacatactgttggtggatggaggaatgatgtcgcttgctgtgaagtcgaaaacagctgacacagtcaagtgtgtagtagtcgatggtggggagttgaaatcaaggcgccaccttaatgtgcgcggaaagagcgcaactctgccatctataacagagaaggattgggaagatatcaagtttggcgtcgaaaatggtgttgatttctatgctgtttcgtttgtgaaggatgccaaagttattcatgaactcaaggcttacctgaaaagtgctaatgcggatatacatgttattccaaaaattgagagtgctgattcaatcccaaacctccagtccattattgctgcttcagatggggcaatggtggctcgtggagatcttggtgctgaacttccaattgaggaagttcctttactacaggaggagattatcagaacatgccgaagcatgcagaaaccagtaattgttgcaacaaatatgttagaaagcatgatagatcatccaactccaacaagggctgaagtctctgatatagccattgctgttcgggaggctgctgatgccattatgctatctggtgaaactgcccatgggaagtacccattgaaggcagtgaaggtgatgcacactgtggcacttagaacagaatccagcctgtacgacccaactaaagctcccagtcttgttgcacgcccaaaggcgctgctcaatgatgacttctgcaaaagccaattaagtaaaatgtttggatctcatgctacaatgatggcgaacacccttcgtacaccgatcattgtgtttacacgtgtgggctccatggctgtccttctgagccactaccgtccctcgtccaccatatatgcattcactaatgaagtacgagtgaagcaacgactggcactctatcagggcgtggttcctattctcatggagttctcagatgacgcggaagagactttctcaagagcaattaccagcttgctggatgcgaaatacatgaatgaaggggactatgtcaccctcgttcagagcgggtcgcagtcgatctggagagaagaatctacccaccacatacaagtgaggaaagtccagtgctga

SEQ ID NO: 8890 - protein, 565 aa, Triticum aestivum
MAAAAAEMVRGFAATARAARPAATVAAPPQPRRAVAARVLRTSASEKVAADLSVAGTNGSLSALSNTDVSTDATSQAVDATPRRKTKIVCTIGPSTNTREMIWKLAETGMNVARMNMSHGDHQSHQKVIDLVKEYNAQNTDGNTVAIMLDTKGPEVRSGDLPEPIMLAEGQEFNFTIKRGVSTEDTVSVNYDDFISDVEAGDILLVDGGMMSLAVKSKTADTVKCVVVDGGELKSRRHLNVRGKSATLPSITEKDWEDIKFGVENGVDFYAVSFVKDAKVIHELKAYLKSANADIHVIPKIESADSIPNLQSIIAASDGAMVARGDLGAELPIEEVPLLQEEIIRTCRSMQKPVIVATNMLESMIDHPTPTRAEVSDIAIAVREAADAIMLSGETAHGKYPLKAVKVMHTVALRTESSLYDPTKAPSLVARPKALLNDDFCKSQLSKMFGSHATMMANTLRTPIIVFTRVGSMAVLLSHYRPSSTIYAFTNEVRVKQRLALYQGVVPILMEFSDDAEETFSRAITSLLDAKYMNEGDYVTLVQSGSQSIWREESTHHIQVRKVQC

SEQ ID NO: 8891 - DNA, 1584 bp, Zea mays
  CDS (1)..(1584)
atgcattccacgaacctcctgctcgaggagcccatccggatggcctccatcctcgagccctccaagcccagctacttcccggcgatgaccaagatcgtcggcactctcggccccaagtcgcgctccgtcgacacgatctccgcctgcctcaaggccggcatgtccgtcgcccggttcgatttctcgtggggggacgccgcgtaccaccaggagacgctggagaacctcaagctctccatcaagtccaccaagaagctctgcgctgtcatgctcgacaccgtgggcccggagctgcaggtggtgaacaagagcgagaccccgatctccctcgaggagaatggcacggtcgttctcacccctcaccggggccaagacgcctcctccagcttgctgcccatcaacttctctggactcgccaaggcggtgacaccaggggcaacaatattcgtgggacaatacttgttcactggcagtgagaccacctcagtttggttggaggtttctgaagtgaaaggagatgatgtggtgtgtataatcaagaacacagccaccttggctgggtcactgttcacgctgcattgctcccagattcacattgacttgcccaccctgtctgatgaggataaggatgtcattagaaaatggggtactcccaataagattgacttcctttctctgtcctacacaagacatgcagaggatgtgcgccaggcacgggaattcctgtcaaaattgggcgatctaagccagactctgatttttgccaaaattgagaatgtcgagggcttgaaccaatttgatgaaatactggctgaggcagatggtatcattttatcaagagggaacctgggaattgatcttccacctgagaaggtctttttgtttcaaaaatctgctcttcacaagtgcaacatggctggaaagcctgctgttgtcactcgtgttgtggacagtatgactgacaacctcaggcctactcgagcggaggcaactgatgtggcaaatgcagtacttgatgggagtgatgccattctccttggtgctgagactctccgaggtttatatccagttgagactatttcgacagtgggcagaatttgtgctgaggctgagaaggtattcaaccaagatttatacttcaagcaaactgtgaaatatgtcggagaacccatgacccatttggagtccattgcttcctcagctgtgcgagctgctatcaaagttaaggcttcggtgatcatttgcttcacctcttctgggagggctgcaaggctcatcgccaagtacaggcccaccatgcctgttctttctgttgtcattcctcgtctgaagacaaaccaactgagatggagtttcactggtgcttttgaggcaagacagtcgctgatagttagaggcctctttccgatgcttgcagatcctcggcatccagccgaatcaaccagtaatacaaatgagtcagttctgaaggttgctctagaccatggcaaggcatgtggtgtgatcaagtcccatgaccgtgttgtcgtttgccagaaggtgggagattcatcggttgtgaagatcattgagctggacgactag

SEQ ID NO: 8892 - protein, 527 aa, Zea mays
MHSTNLLLEEPIRMASILEPSKPSYFPAMTKIVGTLGPKSRSVDTISACLKAGMSVARFDFSWGDAAYHQETLENLKLSIKSTKKLCAVMLDTVGPELQVVNKSETPISLEENGTVVLTPHRGQDASSSLLPINFSGLAKAVTPGATIFVGQYLFTGSETTSVWLEVSEVKGDDVVCIIKNTATLAGSLFTLHCSQIHIDLPTLSDEDKDVIRKWGTPNKIDFLSLSYTRHAEDVRQAREFLSKLGDLSQTLIFAKIENVEGLNQFDEILAEADGIILSRGNLGIDLPPEKVFLFQKSALHKCNMAGKPAVVTRVVDSMTDNLRPTRAEATDVANAVLDGSDAILLGAETLRGLYPVETISTVGRICAEAEKVFNQDLYFKQTVKYVGEPMTHLESIASSAVRAAIKVKASVIICFTSSGRAARLIAKYRPTMPVLSVVIPRLKTNQLRWSFTGAFEARQSLIVRGLFPMLADPRHPAESTSNTNESVLKVALDHGKACGVIKSHDRVVVCQKVGDSSVVKIIELDD

SEQ ID NO: 8893 - DNA, 1542 bp, Zea mays
  CDS (1)..(1542)
atggcgaacatcgacatggcgaagatcctggcggacctggaccgcggcgccggcgacgcgcggctgcccaagaccaagctcgtctgcacgcttggcccggcctcccgctccgtgcccatgctcgagaagctgctccgcgccggcatgaacgtcgcgcgcttcaacttctcccacggcacccaccagtaccaccaggagacgctcgacagcctccgccaggccatgcacaacaccggcatcctctgcgccgtcatgctcgacaccaagggtcctgagattcgtacagggtttttgaaggatggtaaaccaattaagctaaccaagggtcaagagatcactgttaccactgattatgatatcaagggtgacgaaaaaatgatcgctatgagttacaagaaactgcctgttgacgtgaagcctggaaatgtcatactctgcgcagatggtactatctctctggccgttctgtcttgcgatcctgatgctggaactgtgcgttgtaggtgtgagaacactgcaatgcttggtgagagaaagaactgcaatttgccaggaattgttgtggatcttcctacattgactgagaaagataaagaagatattttgggctggggtgttccaaatgacattgacatgattgctctatcctttgtccgtaaaggatcagatttggtgactgtcagacaggttcttgggcagcatgccaagcgcattaagttgatgtcaaaggttgagaaccaagagggtgttgtaaactttgatgagatcttgagggagactgatgcttttatggttgctagaggtgatctgggaatggagattccagtcgagaagattttccttgcgcagaagatgatgatctacaagtgcaacattgctggcaaacctgttgttactgctacccagatgctcgagtcgatgatcaaatctcctcggccgacacgtgctgaggccactgacgttgcaaatgccgttcttgatggaactgactgtgtcatgctcagcggagagagtgccgctggagcctaccccgaggtggctgtgaagatcatggctcgtatttgcatcgaggcagaatcttccctggaccacgaggcagttttcaaggccatgatcaggtccgcgcctcttccaatgagccctctggagtcccttgcatcatctgctgtgaggactgccaacaaggccaaggctgcactgattgtcgtcctgactcgcggtggcaccacggccaaactggtcgccaagtaccgccccagggtccccatcctctccgttgtcgtacccgtgcttacgaccgactctttcgactggaccatcagctccgagggcccagctaggcacagcctgatctacagaggcctcattcccctcctcgccgagggctccgcgaaggctacggattcagagtcgacggaggtgatccttgaggccgcgttgaagtcggccgtgcagaagcagctctgcaagcctggtgatgccatcgtggctcttcatcgtattggcgtcgcctccgtcatcaagatctgcatcgtgaagtga

SEQ ID NO: 8894 - protein, 513 aa, Zea mays
MANIDMAKILADLDRGAGDARLPKTKLVCTLGPASRSVPMLEKLLRAGMNVARFNFSHGTHQYHQETLDSLRQAMHNTGILCAVMLDTKGPEIRTGFLKDGKPIKLTKGQEITVTTDYDIKGDEKMIAMSYKKLPVDVKPGNVILCADGTISLAVLSCDPDAGTVRCRCENTAMLGERKNCNLPGIVVDLPTLTEKDKEDILGWGVPNDIDMIALSFVRKGSDLVTVRQVLGQHAKRIKLMSKVENQEGVVNFDEILRETDAFMVARGDLGMEIPVEKIFLAQKMMIYKCNIAGKPVVTATQMLESMIKSPRPTRAEATDVANAVLDGTDCVMLSGESAAGAYPEVAVKIMARICIEAESSLDHEAVFKAMIRSAPLPMSPLESLASSAVRTANKAKAALIVVLTRGGTTAKLVAKYRPRVPILSVVVPVLTTDSFDWTISSEGPARHSLIYRGLIPLLAEGSAKATDSESTEVILEAALKSAVQKQLCKPGDAIVALHRIGVASVIKICIVK

SEQ ID NO: 8895 - DNA, 1728 bp, Zea mays
  CDS (1)..(1728)
atggcggcgcaggtggtcgcagcggcgggcaccccggtggccaggccgctgggcggcggatctggggccgacgcgctccggccagcggcaacgatgccaagggagagaaggaccggtgctgtggccgcgagaggacgccgcgagtctcaggtggtatccgtcataagccgcgccccacgccccgatgccggggtgctgccggtgtcgcccgacgacgacgcggccgtaaaggaagaagcaaacttccagcaccttaaggctatccagcaacttgcaactgcagcaaatggcgtgtggtctaaaccaaatgtaaggcgcaagacaaagattgtgtgtacaatcggtccttcaaccaacacaagggacatgatatggaaactcgctgagactggcatgaatgtggctcggcttaatatgtcacatggagaccatgcatcacaccagaaagttattgatctggtaaaggagtacaatgcatcacatgctgacaatgtgattgctatcatgcttgacacaaagggaccagaagttcgaagtggagatttgcctcaaccgatatttctggaaagcggacaagaatttacttttacaatcaaaaggggagttgggactgatacgtgtgttagcgttaactatgacgactttgttaatgatgttgaagtgggcgacatgctccttgtagatggaggaatgatgtcattcttggtcaaatcaaaaactgaagattctgtgaaatgtgaagttattgacggtggtgaattgaaatctaggcgccatctgaatgttcgtggaaagagtgcaaccttgccatcaataactgacaaggactgggacgacattaagtttggtgtggataatcaagttgattactatgctgtttcttttgtgaaggatgctcaagttgtccacgaactcaaggattatctaaaaagttgcaatgctgacatacatgttatcgtaaaaatagaaagtgcagactccatccccaacttacattcaatcatcacagcatctgatggggctatggttgccaggggtgaccttggagctgagctgcccattgaggaggtgccgctgttgcaggaagaaattattagaatgtgcaggagcatggggaaggctgttattgttgctacaaatatgctcgaaagtatgattgttcatccaactccaacccgagcagaagtttcagacattgctatagctgtccgagagggtgctgatgcagttatgctttcaggagaaactgcacatgggaaatttcccttgaaagctgttaaggtcatgcacactgttgccctgagaaccgaggcaactattcctggtggggaaacacctgcagaccttggtcaggctttcaagaaccacatgagcgaaatgttcgcataccatgcgacaatgatgtcaaatacccttcgaacatcaatagtggttttcactaggacgggatttatggctatactgcttagtcactaccgtccatctggcactatttttgccttcacagacgaggagagagttaggcaacgattggctttgtaccaaggtgtatgtccggttcaaatggaattttctgatgatgctgagaagacatttggcaatgctttgtcttatttgctgaaacatggtatggttaaggacggtaaggaggttgcacttgttcaaagtggtaaacatcccatctggagatcacaatcaacacacaacattcaggtgaggaagatctga

SEQ ID NO: 8896 - protein, 575 aa, Zea mays
MAAQVVAAAGTPVARPLGGGSGADALRPAATMPRERRTGAVAARGRRESQVVSVISRAPRPDAGVLPVSPDDDAAVKEEANFQHLKAIQQLATAANGVWSKPNVRRKTKIVCTIGPSTNTRDMIWKLAETGMNVARLNMSHGDHASHQKVIDLVKEYNASHADNVIAIMLDTKGPEVRSGDLPQPIFLESGQEFTFTIKRGVGTDTCVSVNYDDFVNDVEVGDMLLVDGGMMSFLVKSKTEDSVKCEVIDGGELKSRRHLNVRGKSATLPSITDKDWDDIKFGVDNQVDYYAVSFVKDAQVVHELKDYLKSCNADIHVIVKIESADSIPNLHSIITASDGAMVARGDLGAELPIEEVPLLQEEIIRMCRSMGKAVIVATNMLESMIVHPTPTRAEVSDIAIAVREGADAVMLSGETAHGKFPLKAVKVMHTVALRTEATIPGGETPADLGQAFKNHMSEMFAYHATMMSNTLRTSIVVFTRTGFMAILLSHYRPSGTIFAFTDEERVRQRLALYQGVCPVQMEFSDDAEKTFGNALSYLLKHGMVKDGKEVALVQSGKHPIWRSQSTHNIQVRKI

SEQ ID NO: 8897 - DNA, 1707 bp, Zea mays
  CDS (1)..(1707)
atggcggcagcggcggagatcggtggtttcgcggcggcgagagtggcggtggcgacgctcaggccggctgcgcacccagccccggcggcggcaccgcagcagcctaggagggcggtggcggcgcagtcgctgcggacgaccgccaccgaggcgctgacggcggatctcgccggcacgaccaacggcgctgtgcatgctcggatgaatagtaaggctacaagtgaaatcacttcacaggcagttactgcaaattctaggagaaagacaaagatagtctgcaccataggtccctcaaccaacactcgtgagatgatttggaagcttgcagagactggaatgaatgtagcacgccttaatatgtcccatggtgaccaccagtcgcaccagaaggttattgatttggtcaaggagtacaatgcacagaacactgatggcaatgttattgccattatgctggacacaaagggtcctgaagttagaagtggggatgttccagagccaatcatgctcaaggaaggtcaagagttcaacttcacgattaaaagaggggtgagcactgaagacactgtcagcgtgaactatgatgacttcataaatgatgttgaagctggcgacatactattagtggatggaggaatgatgtcgcttgctgtgaagtctaaaacagccgatacagtcaagtgtaaagtagttgatggtggggaattgaaatcacggcgccacctaaatgtccgtggaaagagtgctactttgccatctatcactgagaaggattgggaagacataaaatttggtgtcgaaaacggtgttgatttctatgcagtttcctttgtgaaggatgccaaagttatccatgaattaaaagactaccttaaaagtgctaatgccgatatacatgtcattccaaaaattgaaagtgcagattcaataccaaacctgcagtccattattgctgcttcagatggggcaatggtggcgcgtggagaccttggtgctgaacttccgattgaggatgttcctttgctacaggcagagattgtccaaacatgtcgaagcatggagaaaccagtcattgtcgctacaaatatgttggaaagcatgattgaccatcctactcccactagggcagaagtttctgacatagctattgcagttcgggaaggtgctgatgccatcatgttatctggcgaaactgctcatggaaagtatccactaaaggcagtcaaggtgatgcacactgtggcactcagaacagaatccagcctttataacccaactacttctcctagtcttgttgcatctgcacagggtctacagaatgaggacttctccccaagccagctaagtaaaatgttcggatctcatgcaacgatgatggccaacacccttcgcacaccaatcattgtatttacacagacaggctccatggctgtcctcctgagccattatcgtccctcgtctacactatttgcatttacaaacgaggaacgagtgaagcaacggctagcactctaccagggcgtcatccctattcacatgcagttctctgacgacgcagaagaaactttctccagagcaattagcagcttgctgaaagcacaatatgtgaagaagggagactacgtcactcttgttcagagcggagtgacttcaatctggagagaggaatccactcaccacatccaagtgaggaaagttcaggtctga

SEQ ID NO: 8898 - protein, 568 aa, Zea mays
MAAAAEIGGFAAARVAVATLRPAAHPAPAAAPQQPRRAVAAQSLRTTATEALTADLAGTTNGAVHARMNSKATSEITSQAVTANSRRKTKIVCTIGPSTNTREMIWKLAETGMNVARLNMSHGDHQSHQKVIDLVKEYNAQNTDGNVIAIMLDTKGPEVRSGDVPEPIMLKEGQEFNFTIKRGVSTEDTVSVNYDDFINDVEAGDILLVDGGMMSLAVKSKTADTVKCKVVDGGELKSRRHLNVRGKSATLPSITEKDWEDIKFGVENGVDFYAVSFVKDAKVIHELKDYLKSANADIHVIPKIESADSIPNLQSIIAASDGAMVARGDLGAELPIEDVPLLQAEIVQTCRSMEKPVIVATNMLESMIDHPTPTRAEVSDIAIAVREGADAIMLSGETAHGKYPLKAVKVMHTVALRTESSLYNPTTSPSLVASAQGLQNEDFSPSQLSKMFGSHATMMANTLRTPIIVFTQTGSMAVLLSHYRPSSTLFAFTNEERVKQRLALYQGVIPIHMQFSDDAEETFSRAISSLLKAQYVKKGDYVTLVQSGVTSIWREESTHHIQVRKVQV

SEQ ID NO: 8899 - DNA, 1629 bp, Zea mays
  CDS (1)..(1629)
atggctgcctccgccaggactaccagctcgttgccctacctagtcgccgtctcctcccccgcggctcaccgccacggggccagccacccgatccgcgcctcggtgggggaggcgacaatggacgtggtgtcggaggcggagctgcgggagaaagggttcttggggatgcggaaaacgaaactggtgtgcacggtggggcccgcctgcgtcgaggcgctgccggcgctggcgcgcggcgggatgggcgtggcgcggatcaacctctgccacggtggccgggagtggcatcgtgccgccatgcgctctgtgcggaggctcaacgaggagggaggattctgcgtgacgcttatggtcgacaccgagggttcccagctcctcgtcgcggaccacggaggcgccacctcagtcaaggccgaggatgggtcagagtggatatttacaaacaaaaaagctgatgaagcccatcagttcacaatgcatgtgaattttgataagttttctgaaggcattttggttggtgatgagcttgtaatagatggtggaatggcaacatttgaagttactgagaaaataggaaatgatttgcgctgtaagtgcacggacccaggtttgcttcttcctcgagccaaattgtcattctggaggaacggaaaaatagttcaaaggaactttggccttcctacattgtcaacaaaggattgggctgacatcgaatttgggatagctgaaggagttgattgcattgctctatcatttgtaaatgatgctaatgatataaagcagttgaaagcttacctctctagaagatcgttagagcacatcaaagtatttgcaaagattgagagtctagaatctctcaagaacctgaaagacatcatagaggcatctgatggagttatggtagcacgaggggatcttggagttcagattcctcttgaacagatcccagccattcaagaatcaattgttaaactatgtagacacctgaacaagcctgtgatagttgcttctcagcttctcgaatcaatggttgaatacccaacaccaactcgagcagaggtggccgatgtttcggaagcagtgcggcaatatgcagacgctgtgatgctatcagcagagtcagctataggtgcatatccccaaaaagcgctatctgtacttcgtgcagccagtgaaaggatggaatcatggagccgtgaggaaaacatgcagaaacttcttccacggcatcagcttgcaattgcattgcctgaccggatctcagagcagatttgcagctgtgctgtagaaatggcaaacaaccttgctgtggatgccatatttgtctacacaaagcatggtcacatggcatcacttctatcgcgcaaccgacccaaccctcccatattcgcgttcactgataatgccaattcaagaaagagcatgaacctctactggggagtgattccacttcatctaccattgtcaaatagcatggaggataacttcaacaaaaccatcagcctgatgaggtcgaagggttcagtgaaacccggagacacggtcttggtggtatcagattctgatctaaaccaaccttgtgctgccacctcggtgttccaatccattcaggtccggctagtggagtag

SEQ ID NO: 8900 - protein, 542 aa, Zea mays
MAASARTTSSLPYLVAVSSPAAHRHGASHPIRASVGEATMDVVSEAELREKGFLGMRKTKLVCTVGPACVEALPALARGGMGVARINLCHGGREWHRAAMRSVRRLNEEGGFCVTLMVDTEGSQLLVADHGGATSVKAEDGSEWIFTNKKADEAHQFTMHVNFDKFSEGILVGDELVIDGGMATFEVTEKIGNDLRCKCTDPGLLLPRAKLSFWRNGKIVQRNFGLPTLSTKDWADIEFGIAEGVDCIALSFVNDANDIKQLKAYLSRRSLEHIKVFAKIESLESLKNLKDIIEASDGVMVARGDLGVQIPLEQIPAIQESIVKLCRHLNKPVIVASQLLESMVEYPTPTRAEVADVSEAVRQYADAVMLSAESAIGAYPQKALSVLRAASERMESWSREENMQKLLPRHQLAIALPDRISEQICSCAVEMANNLAVDAIFVYTKHGHMASLLSRNRPNPPIFAFTDNANSRKSMNLYWGVIPLHLPLSNSMEDNFNKTISLMRSKGSVKPGDTVLVVSDSDLNQPCAATSVFQSIQVRLVE

SEQ ID NO: 8901 - DNA, 1548 bp, Zea mays
  CDS (1)..(1548)
atggcgaacatcgacatggcgaagatcctggcggacctggaccgcggcgccagcggcggcgacgcgcgggtgcccaagaccaagctagtctgcacgctcggcccggcctcccgcaccgtgcccatgctcgagaagctgctccgcgccggcatgaacgtcgcgcgcttcaacttctcccacggcacccacgagtaccaccaggagacgctcgacaacctccgccaggccatgcacaacaccggcatcctctgcgccgtcatgctcgacaccaagggtcctgagatccgtacagggtttttgaaggatggtaaaccaattaagctaaccaagggtcaagaaatcactgtcaccactgattatgatatcaagggtgacgaaaatatgattgctatgagttacaagaaactgcctgttgacgtgaagcctggaaatgtcatactctgcgcagatggtactatctctctggccgttctatcttgtgatcctgatgctggaactgtgaggtgtagatgcgagaacactgcaatgcttggtgagagaaagaactgcaatctgccaggaattgttgtggatcttcctacattgactgagaaagataaagaagacattttgggctggggtgttccaaatgatattgacatgattgctctatcctttgtccgtaaaggatcagatttggtgactgtgagacaggttcttgggcagcatgccaagcgcattaagttgatgtcaaaggttgaaaaccaagagggtgttgtaaactttgatgagatcttgagggagactgatgcttttatggttgctagaggtgatcttggaatggagattcctgttgagaagattttccttgcgcagaagatgatgatctacaagtgcaacattgctggcaaacctgttgttaccgctacccagatgctcgaatcgatgatcaaatcccctaggccaacccgcgcagaggccactgacgttgcaaatgctgttcttgatggaactgactgtgtcatgctcagtggtgaaagtgctgctggagcctaccccgaggtggctgtgaagatcatggctcgtatctgcatcgaggcagagtcttccctggaccacgaggcagttttcaaggccatgatcaggtccgcgcctcttccaatgagccctctggagtctcttgcgtcatctgctgtgcgaactgccaacaaggccaaggccgcactgatcgtcgtcttgactcgcggtggcaccacggccaagctggtcgccaagtaccgccccagggttcccatcctctctgttgtggtacccgtgctaacgacggattctttcgactggaccatcagctccgagggcccagccaggcacagcctgatctatagaggcctcattcccctcctcgctgagggctccgcgaaggctacggattcagagtcaaccgaggtgatcctggaggctgcgctcaagtcggccgtgcagaagcaactttgcaagcctggtgatgccattgtggctctccatcgtatcggcgtcgcctccgtcatcaagatctgcatcgtgaagtga

SEQ ID NO: 8902 - protein, 515 aa, Zea mays
MANIDMAKILADLDRGASGGDARVPKTKLVCTLGPASRTVPMLEKLLRAGMNVARFNFSHGTHEYHQETLDNLRQAMHNTGILCAVMLDTKGPEIRTGFLKDGKPIKLTKGQEITVTTDYDIKGDENMIAMSYKKLPVDVKPGNVILCADGTISLAVLSCDPDAGTVRCRCENTAMLGERKNCNLPGIVVDLPTLTEKDKEDILGWGVPNDIDMIALSFVRKGSDLVTVRQVLGQHAKRIKLMSKVENQEGVVNFDEILRETDAFMVARGDLGMEIPVEKIFLAQKMMIYKCNIAGKPVVTATQMLESMIKSPRPTRAEATDVANAVLDGTDCVMLSGESAAGAYPEVAVKIMARICIEAESSLDHEAVFKAMIRSAPLPMSPLESLASSAVRTANKAKAALIVVLTRGGTTAKLVAKYRPRVPILSVVVPVLTTDSFDWTISSEGPARHSLIYRGLIPLLAEGSAKATDSESTEVILEAALKSAVQKQLCKPGDAIVALHRIGVASVIKICIVK

SEQ ID NO: 8903 - DNA, 1530 bp, Zea mays
  CDS (1)..(1530)
atggcggcgggcggtgagttggcgtggggggaggagcccgtggcgcggcgccggcctaagaccaagatcgtctgcacgctcggcccggcgtcgcgatccgtcgagatgatctcgcgcctgctgcgcgccgggatgtgcgtcgcgcgcttcaacttctcccatggctcccacgagtaccaccaggagacgctcgacaacctgcacgccgccatggagctcaccgggatcctctgcgccgttatgctcgacaccaagggtccagagattagaactggatttttgaaagatgggaagcctattcaattgataaaaggccaagaaatcacaatttctacagactatagcattcagggtgatgagaaaatgatatcaatgagctacaagaagcttgctgttgatctgaagccaggcagtgtcatattgtgtgctgatggtaccatcactcttactgttcttcactgtgataaagaacaaggcttggttcgctgccgctgtgagaacactttcaagcttggcgagaggaagaatgttaatcttccaggagttattgttgatctccccacactcacagacaaggacaaggaggacatccttaaatggggtgttccaaacaagattgacatgattgccttgtcatttgttcggaagggttcggatcttgtggaggttaggaaggtacttggtgagcatgccaagtccataatgctgatgtcaaaggttgagaatcaagagggagtagctaactttgatgatatcctggcaaactctgatgcttttatggtggcaagaggtgatttaggaatggaaattcctatagagaagattttctttgcacagaaggtgatgattttcaagtgcaatattcaaggcaagcctgttgtgactgcaacccagatgttggaatctatgatcaagtctcctcgccctactcgggcagaagcaacggatgttgcaaacgcagttcttgatggcacagactgtgttatgctcagtggtgagactgctgctggggcttatccagagttggcggtgcagactatggctaagatctgcctgcaagcagagtcttgcgtagaccatgctgctattttcaaatcaatcatggcttcagctccaattccaatgagtccattggagagccttgcatcatcagctgttcgcacagcaaactctgccagggcagcacttatcttggtcctgaccaggggaggaactactgctaggcttgtagccaagtataggccatccatgccgattctgtccgttgtggttcctgagctgaagacagactcgttcgactgggcctgcagtgacgagggtccggcaaggcacagcctcattgtgaggggtgtcatcccaatgctgagtgccgccactgccaaggcctttgacaacgaagccactgacgaagctattggttttgccattgaaaatgcgaagacgatggggctatgcaacaccgatcaatccgttgtggccctgcaccgcatcgggatttcatccgtcatcaagcttcttactgtgaagtag

SEQ ID NO: 8904 - protein, 509 aa, Zea mays
MAAGGELAWGEEPVARRRPKTKIVCTLGPASRSVEMISRLLRAGMCVARFNFSHGSHEYHQETLDNLHAAMELTGILCAVMLDTKGPEIRTGFLKDGKPIQLIKGQEITISTDYSIQGDEKMISMSYKKLAVDLKPGSVILCADGTITLTVLHCDKEQGLVRCRCENTFKLGERKNVNLPGVIVDLPTLTDKDKEDILKWGVPNKIDMIALSFVRKGSDLVEVRKVLGEHAKSIMLMSKVENQEGVANFDDILANSDAFMVARGDLGMEIPIEKIFFAQKVMIFKCNIQGKPVVTATQMLESMIKSPRPTRAEATDVANAVLDGTDCVMLSGETAAGAYPELAVQTMAKICLQAESCVDHAAIFKSIMASAPIPMSPLESLASSAVRTANSARAALILVLTRGGTTARLVAKYRPSMPILSVVVPELKTDSFDWACSDEGPARHSLIVRGVIPMLSAATAKAFDNEATDEAIGFAIENAKTMGLCNTDQSVVALHRIGISSVIKLLTVK

SEQ ID NO: 8905 - DNA, 1542 bp, Zea mays
  CDS (1)..(1542)
atggcgaacatcgacatggcgaagatcctggcggactggacgcggcccaggggcgacgcgcgggtgcccaagaccaagctagtctgcacgctcggcccggcctcccgcaccgtgcccatgctcgagaagctgctccgcgccggcatgaacgtcgcgcgcttcaacttctcccacggcacccacgagtaccaccaggagacgctcgacaacctccgccaggccatgcacaacaccggcatcctctgcgccgtcatgctcgacaccaagggtcctgagatccgtacagggtttttgaaggatggtaaaccaattaagctaaccaagggtcaagaaatcactgtcaccactgattatgatatcaagggtgacgaaaatatgattgctatgagttacaagaaactgcctgttgacgtgaagcctggaaatgtcatactctgcgcagatggtactatctctctggccgttctatcttgtgatcctgatgctggaactgtgaggtgtagatgcgagaacactgcaatgcttggtgagagaaagaactgcaatctgccaggaattgttgtggatcttcctacattgactgagaaagataaagaagacattttgggctggggtgttccaaatgatattgacatgattgctctatcctttgtccgtaaaggatcagatttggtgactgtgagacaggttcttgggcagcatgccaagcgcattaagttgatgtcaaaggttgaaaaccaagagggtgttgtaaactttgatgagatcttgagggagactgatgcttttatggttgctagaggtgatcttggaatggagattcctgttgagaagattttccttgcgcagaagatgatgatctacaagtgcaacattgctggcaaacctgttgttactgctacccagatgctcgaatcgatgatcaaatctcctaggccaacccgtgcagaggccactgacgttgcaaatgctgttcttgatggaactgactgtgtcatgctcagtggtgaaagtgctgctggagcctaccccgaggtggctgtgaagatcatggctcgtatctgcatcgaggcagagtcttccctggaccacgaggcagttttcaaggccatgatcaggtccgcgcctcttccaatgagccctctggagtctcttgcgtcatctgctgtgcgaactgccaacaaggccaaggccgcactgatcgtcgtcttgactcgcggtggcaccacggccaagctggtcgccaagtaccgccccagggttcccatcctctctgttgtggtacccgtgctaacgacggattctttcgactggaccatcagctccgagggcccagccaggcacagcctgatctatagaggcctcattcccctcctcgctgagggctccgcgaaggctacggattcagagtctacggaggtgatcctggaggctgcgctcaagtcggccgtgcagaagcaactttgcaagcctggtgatgccattgtggctctccatcgtatcggcgtcgcctccgtcatcaagatctgcatcgtgaagtga

SEQ ID NO: 8906 - protein, 513 aa, Zea mays
MANIDMAKILADWTRPRGDARVPKTKLVCTLGPASRTVPMLEKLLRAGMNVARFNFSHGTHEYHQETLDNLRQAMHNTGILCAVMLDTKGPEIRTGFLKDGKPIKLTKGQEITVTTDYDIKGDENMIAMSYKKLPVDVKPGNVILCADGTISLAVLSCDPDAGTVRCRCENTAMLGERKNCNLPGIVVDLPTLTEKDKEDILGWGVPNDIDMIALSFVRKGSDLVTVRQVLGQHAKRIKLMSKVENQEGVVNFDEILRETDAFMVARGDLGMEIPVEKIFLAQKMMIYKCNIAGKPVVTATQMLESMIKSPRPTRAEATDVANAVLDGTDCVMLSGESAAGAYPEVAVKIMARICIEAESSLDHEAVFKAMIRSAPLPMSPLESLASSAVRTANKAKAALIVVLTRGGTTAKLVAKYRPRVPILSVVVPVLTTDSFDWTISSEGPARHSLIYRGLIPLLAEGSAKATDSESTEVILEAALKSAVQKQLCKPGDAIVALHRIGVASVIKICIVK

SEQ ID NO: 8907 - DNA, 1584 bp, Zea mays
  CDS (1)..(1584)
atgctttcgaccaacctgctgctggaggagcccatccggagggcctccatcctggagccatccaagaccagcttcttcccggcgaagaccaagatcgtcggcacgctcggccccaagtcgcgctccgtcgacaccatctcctcctgcctcaaggccggcatgtccgtcgcgcggttcgatttctcgtggggagacgccgcctaccaccaggagacgctcgagaacctcaagctcgccatcaagtccaccaagaagctgtgcgctgttatgctcgacacggttggaccggagctgcaggtggtcaacaagagtgaaacccccatctccctcgaggagaacgggactgtcgtgctcacgccgcatcagggccaagaagcctcctccaccttgctgcccatcaacttcgatggactcgccaaggctttgacaccaggtgcaacgatatttgtgggccaatacttgttcactggtagcgagactacttcagtttggttggaggtttctgaagttaaaggagatgatgtggtttgtatcatcaagaacacagctaccttggctgggtcgctcttcacgcagcattgttcccagattcatattgacttgcccacgctgtctgatgaggataaggatgttatcaaaaaatggggtgctccaaataagattgacttcctctctctgtcttacacaagacatgcagaagatgtgcggcaggcacgtgagttcctctcgaaattgggtgatcttagccaaactcagatctttgccaaaattgagaatgttgagggcttgaaccattttgatgaaatactggcagaggcagatggtatcattctgtcaagaggaaaccttggaattgaccttccacctgagaaggtctttttgtttcaaaagtctgcgcttcacaagtgcaacatggctggaaagcctgctgttgttactcgtgtcgtggacagcatgactgacaacctcagacctactcgcgcagaggcaactgatgtggcaaatgcagttcttgatgggagtgacgccattctccttggtgctgagactctccgtggtttatatccggtggagactatttcaacagtgggcagaatttgtgctgaggctgagaaggtattcaaccaagatttatactacaagcggactgtgaagtatgtgggagaacctatgacccacttggagtctattgcttcttcagcagtgcgagctgcaatcaaagttaaggcatcagtcatcatttgcttcacctcttctggacgagctgcaaggctcattgctaagtacaggcccagcatgcctgttttgtctgttgtcattcctcgtctaaagacaaaccaactgaggtggagtttcacaggtgtttttgaggcaagacaatcactcatagttagaggcctcttccctatgcttgctgatccacgacacccagctgaatctaccagtgctacaaatgagtctgtgttgaaggttgctcttgaccatggcaaagcctcgggcgtgatcaagtcccacgaccgcgtcgtcgtttgccagaaagtgggtgattcctctgtggtgaagatcattgagctggatgattag

SEQ ID NO: 8908 - protein, 527 aa, Zea mays
MLSTNLLLEEPIRRASILEPSKTSFFPAKTKIVGTLGPKSRSVDTISSCLKAGMSVARFDFSWGDAAYHQETLENLKLAIKSTKKLCAVMLDTVGPELQVVNKSETPISLEENGTVVLTPHQGQEASSTLLPINFDGLAKALTPGATIFVGQYLFTGSETTSVWLEVSEVKGDDVVCIIKNTATLAGSLFTQHCSQIHIDLPTLSDEDKDVIKKWGAPNKIDFLSLSYTRHAEDVRQAREFLSKLGDLSQTQIFAKIENVEGLNHFDEILAEADGIILSRGNLGIDLPPEKVFLFQKSALHKCNMAGKPAVVTRVVDSMTDNLRPTRAEATDVANAVLDGSDAILLGAETLRGLYPVETISTVGRICAEAEKVFNQDLYYKRTVKYVGEPMTHLESIASSAVRAAIKVKASVIICFTSSGRAARLIAKYRPSMPVLSVVIPRLKTNQLRWSFTGVFEARQSLIVRGLFPMLADPRHPAESTSATNESVLKVALDHGKASGVIKSHDRVVVCQKVGDSSVVKIIELDD

SEQ ID NO: 8909 - DNA, 1554 bp, Zea mays
  CDS (1)..(1554)
atgcagggcgccagccacatgctcctggaggagcccttccgcctcgcctccgtcctctcccccgccaagcctaaagtattcccatcactcaccaagatagttgggacgctcgggcccaattcacactcggttgagattattcaggaatgcctcactgctggaatgtcagttgcacggtttgatttctcatggatggatgctgcgtatcaccaggagacccttgataatttgaggaaagcggcacagaatgtgaagaagttgtgccctgtaatgttggatactcttggtccagaaattcaggttcacaattccactggtgagccaattgagttgaaagctgggaatcatgttatcataactccagatatttgtaaagctctctctgctgagatcctaccaattaagtttggtgatcttgcaaaagctgtgaagaagggtgatactctttttatgggccaatatctcttcacaggaagtgaaacaacatctgtctggctagaagttgtggaaacttctggggaaaatgtaaattgtctagtgaagaatgcagctacacttgacggccccatattcactctgcatgcttcacaagttcacatcaatttgcccactttgagtgaatatgataaacatgtcatttcaacttggggttcatgtaacagtgttgacattatatcactttcccatacccgctctgctgaagatgtcagggagctcagggcctttttacaagcacacgcccttcccgacacacaaatatacgcgaagattgaaaattcagagggtttggatcattttgatgacattctcaacgcggcagatggtatcattatttctcgaggagacctgggtattgaccttcctccagaaaacgttttcatgttccaaaagacagctattcataaatgcaatttggagggtaaacctgtgatcatcactagagttgtggacagcatgattgacaatctacgccctacccgtgcagaggcaactgatgttgcaaatgctgtcctagatggcactgatggcattttgcttggtgcggagacacttcgagggctttatcctgttgatgcagctgagactgtgtataatcagccgcttcaattcaagaaagtaatgtggcatgtaggtgacccaatgccccacgaggaatctgtggcatcagcagcggttggttctgcaatcaaagtaaaagctgctgccattgttgtgttcacattctcagggagagctgcgaggttagttgccaagtataggccaacaatgccaattttagcagttatcttcccacgtgaaggatccgatccatcaaagtggcgttcttatggcacaacacaggcgagacaatgtttcgcagtgagaggcgtgtaccctttgatggggagtactgatgaggccgaaactggtgggctaacaaaggaagagtatgggataaaacttgcgatgagctatggtcggtcggtcggcatagtgaagcctttcgacagggtgataatctttgaaaagattggtgattcttctgttgtcaagatcattgagtgtgaaggttag

SEQ ID NO: 8910 - protein, 517 aa, Zea mays
MQGASHMLLEEPFRLASVLSPAKPKVFPSLTKIVGTLGPNSHSVEIIQECLTAGMSVARFDFSWMDAAYHQETLDNLRKAAQNVKKLCPVMLDTLGPEIQVHNSTGEPIELKAGNHVIITPDICKALSAEILPIKFGDLAKAVKKGDTLFMGQYLFTGSETTSVWLEVVETSGENVNCLVKNAATLDGPIFTLHASQVHINLPTLSEYDKHVISTWGSCNSVDIISLSHTRSAEDVRELRAFLQAHALPDTQIYAKIENSEGLDHFDDILNAADGIIISRGDLGIDLPPENVFMFQKTAIHKCNLEGKPVIITRVVDSMIDNLRPTRAEATDVANAVLDGTDGILLGAETLRGLYPVDAAETVYNQPLQFKKVMWHVGDPMPHEESVASAAVGSAIKVKAAAIVVFTFSGRAARLVAKYRPTMPILAVIFPREGSDPSKWRSYGTTQARQCFAVRGVYPLMGSTDEAETGGLTKEEYGIKLAMSYGRSVGIVKPFDRVIIFEKIGDSSVVKIIECEG

SEQ ID NO: 8911 - DNA, 1707 bp, Zea mays
  CDS (1)..(1707)
atggccagcgccgcccactcccttctgcacacaccggaggcccacagggccgccacccgctcgcccttctctcctcccgcgcccactcccttcctccatctccgccctcaccgcctccccctccgcctccgctccacctccccgaccgcctccgacctcaccgccttccccccgaacccgaacgggatctttgcgtccgaccggcccatcgacgtggacgccgccacggaggccgagctgcgggagaacgggttccggagcacgcgccgcaccaagctcgtctgcaccgtgggccccgccacctcgcgcccggaccagctcgaggcgctcgccgtcggcgggatgaacgtggcccggctcaacatgtgccacggcgacagggagtggcatagggccgccatccgcgccgtcaggagcctcaacgaggagaagggcttcgccgtcgccgtcatgatggacaccgagggcagcgagatccacatgggggacctcggcggcgcatcctcggtcaaggcggaggatggagaagtatggacgttcagtgttagatcatttgaattgcctctcccagaacgaactattaatgtgaactatgatggatttgctgaagatgtgagagttggtgatgagctccttgtggatggtggaatggctcggtttgaggtgattgagaagataggaccagatgttaagtgccgttgcacagatcctggtttattgttgccacgtgccaatcttacattctggcgtgacggcagtatcgtccgtgagaggaatgctatgcttcctacaatttcatcaaaggattggcttgacatagactttgggattgccgaaggtgtagatttcatcgctgtttcatttgtcaagtctgcagaagtaattaggcacttgaaaagctacatagctgcaaggagccgtggaagtgacatggcagtcattgcgaaaatcgagagcatcgactctctaaagaacctggaggagatcatccgagcgtcagacggcgccatggtagccagaggggacatgggggcgcaggttcccctggagcaggtcccctcgatacagcaaaagatcgttcagctctgcaggcagctgaacaagccggtcatcgtcgcctcccagctcctcgagtcgatgatagagtaccccacgcccaccagggccgaggtcgcggacgtctccgaagccgtccgccagcgcgccgacgccctgatgctttccggcgagtcggcaatggggaggtacccggacaaggccctcagcgttctgaggagcgtcagcctgaggatcgagaagtggtggagggaggagaagcggcacgaggcgctggagctccggagcgtctcgtcctccttctccgacaagatatcggaggagatctgcaactcagcagctaaaatggctaatggcctgggagtggacgccgtctttgtgttcaccaagaccgggcacatggcctccctgctctcgcggtgccgccccgactgcccggtcttcgccttcacgacgtcgacgtccgtcaggaggcggctgaacctgcagtggggcctgatccccttccgcctcgccttctcggacgacatggagagcaacctgaaccgcaccttctccctgctcaaggccaggggcatgatccagtctggggacctcgtgatcgccctctcggacatgctgcagtccatccaggtgatgaacgtaccctga

SEQ ID NO: 8912 - protein, 568 aa, Zea mays
MASAAHSLLHTPEAHRAATRSPFSPPAPTPFLHLRPHRLPLRLRSTSPTASDLTAFPPNPNGIFASDRPIDVDAATEAELRENGFRSTRRTKLVCTVGPATSRPDQLEALAVGGMNVARLNMCHGDREWHRAAIRAVRSLNEEKGFAVAVMMDTEGSEIHMGDLGGASSVKAEDGEVWTFSVRSFELPLPERTINVNYDGFAEDVRVGDELLVDGGMARFEVIEKIGPDVKCRCTDPGLLLPRANLTFWRDGSIVRERNAMLPTISSKDWLDIDFGIAEGVDFIAVSFVKSAEVIRHLKSYIAARSRGSDMAVIAKIESIDSLKNLEEIIRASDGAMVARGDMGAQVPLEQVPSIQQKIVQLCRQLNKPVIVASQLLESMIEYPTPTRAEVADVSEAVRQRADALMLSGESAMGRYPDKALSVLRSVSLRIEKWWREEKRHEALELRSVSSSFSDKISEEICNSAAKMANGLGVDAVFVFTKTGHMASLLSRCRPDCPVFAFTTSTSVRRRLNLQWGLIPFRLAFSDDMESNLNRTFSLLKARGMIQSGDLVIALSDMLQSIQVMNVP

SEQ ID NO: 8913 - DNA, 1728 bp, Zea mays
  CDS (1)..(1728)
atggcggcgcaggtggtcgcagcggcgggcaccccggtggccaggccgctgggcggtggatctggggccgacgcgctccggcccgcggcgaggatgccaagggagagaaggaccggtgctgtggccgcgagaggacgccgcgagtctcaggtggtatccgtcataagccgcgccccacgccccgatgccggggtgctgccggtgtcgcccgacgacgacgcggccgtaaaggaagaagcaaacttccagcaccttaaggctatccagcaacttgcaactgcagcaaatggcgtgtggtctaaaccaaatgtaaggcgcaagacaaagattgtgtgtacaatcggtccttcaaccaacacaagggacatgatatggaaactcgctgagactggcatgaatgtggctcggcttaatatgtcacatggagaccatgcatcacaccagaaagttattgatctggtaaaggagtacaatgcatcacatgctgacaatgtgattgctatcatgcttgacacaaagggaccagaagttcgaagtggagatttgcctcaaccgatatttctggaaagcggacaagaatttacttttacaatcaaaaggggagttgggactgatacgtgtgttagcgttaactatgacgactttgttaatgatgttgaagtgggcgacatgctccttgtagatggaggaatgatgtcattcttggtcaaatcaaaaactgaagattctgtgaaatgtgaagttattgacggtggtgaattgaaatctaggcgccatctgaatgttcgtggaaagagtgcaaccttgccatcaataactgacaaggactgggacgacattaagtttggtgtggataatcaagttgattactatgctgtttcttttgtgaaggatgctcaagttgtccacgaactcaaggattatctaaaaagttgcaatgctgacatacatgttatcgtaaaaatagaaagtgcagactccatccccaacttacattcaatcatcacagcatctgatggggctatggttgccaggggtgaccttggagctgagctgcccattgaggaggtgccgctgttgcaggaagaaattattagaatgtgcaggagcatggggaaggctgttattgttgctacaaatatgctcgaaagtatgattgttcatccaactccaacccgagcagaagtttcagacattgctatagctgtccgagagggtgctgatgcagttatgctttcaggagaaactgcacatgggaaatttcccttgaaagctgttaaggtcatgcacactgttgccctgagaaccgaggcaactattcctggtggggaaacacctgcagaccttggtcaggctttcaagaaccacatgagcgaaatgttcgcataccatgcaacaatgatgtcaaatacccttcgaacatcaatagtggttttcactaggacgggatttatggctatactgcttagtcactaccgtccatctggcactatttttgcctttacagatgaggagagggttaggcaacgattggctttgtaccaaggtgtatgtccggttcaaatggaattttctgatgatgctgagaagacatttggcaatgctttgtcttatttgctgaaacatggtatggttaaggacggtgaggaggttgcgctcgttcaaagtggtaaacatcccatctggagatcacaatcaacacacaacattcaggtgaggaagatctga

SEQ ID NO: 8914 - protein, 575 aa, Zea mays
MAAQVVAAAGTPVARPLGGGSGADALRPAARMPRERRTGAVAARGRRESQVVSVISRAPRPDAGVLPVSPDDDAAVKEEANFQHLKAIQQLATAANGVWSKPNVRRKTKIVCTIGPSTNTRDMIWKLAETGMNVARLNMSHGDHASHQKVIDLVKEYNASHADNVIAIMLDTKGPEVRSGDLPQPIFLESGQEFTFTIKRGVGTDTCVSVNYDDFVNDVEVGDMLLVDGGMMSFLVKSKTEDSVKCEVIDGGELKSRRHLNVRGKSATLPSITDKDWDDIKFGVDNQVDYYAVSFVKDAQVVHELKDYLKSCNADIHVIVKIESADSIPNLHSIITASDGAMVARGDLGAELPIEEVPLLQEEIIRMCRSMGKAVIVATNMLESMIVHPTPTRAEVSDIAIAVREGADAVMLSGETAHGKFPLKAVKVMHTVALRTEATIPGGETPADLGQAFKNHMSEMFAYHATMMSNTLRTSIVVFTRTGFMAILLSHYRPSGTIFAFTDEERVRQRLALYQGVCPVQMEFSDDAEKTFGNALSYLLKHGMVKDGEEVALVQSGKHPIWRSQSTHNIQVRKI

SEQ ID NO: 8915 - DNA, 21 bp, Artificial sequence
  primer
atgtccagaaggcttcgcaga

SEQ ID NO: 8916 - DNA, 25 bp, Artificial sequence
  primer
ttactctaccgttaaaatacgcgtg

SEQ ID NO: 8917 - protein, 533 aa, Artificial sequence
  consensus sequence
  Variant (4)..(5): Xaa in position 4 to 5 is any amino acid
  Variant (7)..(7): Xaa in position 7 is any amino acid
  Variant (10)..(20): Xaa in position 10 to 20 is any amino acid
  Variant (21)..(22): Xaa in position 21 to 22 is any or no amino acid
  Variant (25)..(26): Xaa in position 25 to 26 is any amino acid
  Variant (27)..(27): Xaa in position 27 is any or no amino acid
  Variant (29)..(29): Xaa in position 29 is any amino acid
  Variant (31)..(31): Xaa in position 31 is any amino acid
  Variant (33)..(33): Xaa in position 33 is any amino acid
  Variant (37)..(39): Xaa in position 37 to 39 is any amino acid
  Variant (40)..(40): Xaa in position 40 is any or no amino acid
  Variant (42)..(56): Xaa in position 42 to 56 is any amino acid
  Variant (57)..(65): Xaa in position 57 to 65 is any or no amino acid
  Variant (67)..(68): Xaa in position 67 to 68 is any amino acid
  Variant (71)..(72): Xaa in position 71 to 72 is any amino acid
  Variant (74)..(85): Xaa in position 74 to 85 is any amino acid
  Variant (86)..(92): Xaa in position 86 to 92 is any or no amino acid
  Variant (94)..(115): Xaa in position 94 to 115 is any amino acid
  Variant (116)..(128): Xaa in position 116 to 128 is any or no amino acid
  Variant (130)..(136): Xaa in position 130 to 136 is any amino acid
  Variant (137)..(142): Xaa in position 137 to 142 is any or no amino acid
  Variant (144)..(148): Xaa in position 144 to 148 is any amino acid
  Variant (150)..(172): Xaa in position 150 to 172 is any amino acid
  Variant (173)..(176): Xaa in position 173 to 176 is any or no amino acid
  Variant (178)..(189): Xaa in position 178 to 189 is any amino acid
  Variant (190)..(197): Xaa in position 190 to 197 is any or no amino acid
  Variant (200)..(201): Xaa in position 200 to 201 is any amino acid
  Variant (202)..(202): Xaa in position 202 is any or no amino acid
  Variant (204)..(215): Xaa in position 204 to 215 is any amino acid
  Variant (216)..(216): Xaa in position 216 is any or no amino acid
  Variant (218)..(218): Xaa in position 218 is any amino acid
  Variant (221)..(225): Xaa in position 221 to 225 is any amino acid
  Variant (227)..(241): Xaa in position 227 to 241 is any amino acid
  Variant (242)..(250): Xaa in position 242 to 250 is any or no amino acid
  Variant (252)..(252): Xaa in position 252 is any amino acid
  Variant (254)..(263): Xaa in position 254 to 263 is any amino acid
  Variant (264)..(266): Xaa in position 264 to 266 is any or no amino acid
  Variant (268)..(271): Xaa in position 268 to 271 is any amino acid
  Variant (273)..(274): Xaa in position 273 to 274 is any amino acid
  Variant (283)..(283): Xaa in position 283 is any amino acid
  Variant (285)..(293): Xaa in position 285 to 293 is any amino acid
  Variant (296)..(307): Xaa in position 296 to 307 is any amino acid
  Variant (309)..(309): Xaa in position 309 is any amino acid
  Variant (310)..(310): Xaa in position 310 is any or no amino acid
  Variant (315)..(316): Xaa in position 315 to 316 is any amino acid
  Variant (319)..(323): Xaa in position 319 to 323 is any amino acid
  Variant (329)..(330): Xaa in position 329 to 330 is any amino acid
  Variant (336)..(337): Xaa in position 336 to 337 is any amino acid
  Variant (340)..(340): Xaa in position 340 is any amino acid
  Variant (342)..(343): Xaa in position 342 to 343 is any amino acid
  Variant (347)..(347): Xaa in position 347 is any amino acid
  Variant (349)..(349): Xaa in position 349 is any amino acid
  Variant (351)..(351): Xaa in position 351 is any amino acid
  Variant (353)..(354): Xaa in position 353 to 354 is any amino acid
  Variant (356)..(358): Xaa in position 356 to 358 is any amino acid
  Variant (360)..(361): Xaa in position 360 to 361 is any amino acid
  Variant (363)..(368): Xaa in position 363 to 368 is any amino acid
  Variant (369)..(369): Xaa in position 369 is any or no amino acid
  Variant (371)..(396): Xaa in position 371 to 396 is any amino acid
  Variant (397)..(406): Xaa in position 397 to 406 is any or no amino acid
  Variant (408)..(413): Xaa in position 408 to 413 is any amino acid
  Variant (414)..(419): Xaa in position 414 to 419 is any or no amino acid
  Variant (421)..(423): Xaa in position 421 to 423 is any amino acid
  Variant (425)..(426): Xaa in position 425 to 426 is any amino acid
  Variant (428)..(440): Xaa in position 428 to 440 is any amino acid
  Variant (443)..(459): Xaa in position 443 to 459 is any amino acid
  Variant (460)..(475): Xaa in position 460 to 475 is any or no amino acid
  Variant (477)..(498): Xaa in position 477 to 498 is any amino acid
  Variant (499)..(531): Xaa in position 499 to 531 is any or no amino acid
TKIXXTXGPXXXXXXXXXXXXXAGXXXVXRXNXSHGXXXXHXXXXXXXXXXXXXXXXXXXXXXXXDXXGPXXRXXXXXXXXXXXXXXXXXXXGXXXXXXXXXXXXXXXXXXXXXXXXXXXXXXXXXXXGXXXXXXXXXXXXXGXXXXXVXXXXXXXXXXXXXXXXXXXXXXXXXXXNXXXXXXXXXXXXXXXXXXXXKDXXXDXXXXXXXXXXXXXAXSFXXXXXDXXXXXXXXXXXXXXXXXXXXXXXXKXEXXXXXXXXXXXXXIXXXXDXXMVARGDLGXEXXXXXXXXXQKXXXXXXXXXXXXVXXATQMXXSMXXXXXPTRAEXXDVANAXXDGXDXXMLSXEXAXGXXPXXXVXXMXXXXXXXEXXXXXXXXXXXXXXXXXXXXXXXXXXXXXXXXXXXXAXXXXXXXXXXXXIXXXTXXGXXXXXXXXXXXXXPIXXXXXXXXXXXXXXXXXXXXXXXXXXXXXXXXXGXXXXXXXXXXXXXXXXXXXXXXXXXXXXXXXXXXXXXXXXXXXXXXXXXXXXXXXGD

SEQ ID NO: 8918 - protein, 53 aa, Artificial sequence
  protein pattern
  Variant (2)..(2): Xaa in position 2 is Ala, Ile or Val
  Variant (3)..(3): Xaa in position 3 is any amino acid
  Variant (5)..(5): Xaa in position 5 is Ala, Ser or Thr
  Variant (6)..(6): Xaa in position 6 is Ala, Glu, Asn or Gln
  Variant (7)..(7): Xaa in position 7 is Leu, Met or Val
  Variant (8)..(8): Xaa in position 8 is Leu or Met
  Variant (9)..(9): Xaa in position 9 is any amino acid
  Variant (12)..(14): Xaa in position 12 to 14 is any amino acid
  Variant (15)..(16): Xaa in position 15 to 16 is any or no amino acid
  Variant (18)..(19): Xaa in position 18 to 19 is any or no amino acid
  Variant (24)..(25): Xaa in position 24 to 25 is any amino acid
  Variant (27)..(27): Xaa in position 27 is any amino acid
  Variant (28)..(28): Xaa in position 28 is Ala, Glu, Gly, Ser or Thr
  Variant (29)..(29): Xaa in position 29 is any amino acid
  Variant (31)..(31): Xaa in position 31 is Ile or Val
  Variant (32)..(32): Xaa in position 32 is any amino acid
  Variant (33)..(33): Xaa in position 33 is Asp, Glu, Gln or Thr
  Variant (34)..(34): Xaa in position 34 is any amino acid
  Variant (35)..(35): Xaa in position 35 is Ala, Gly, Ser or Thr
  Variant (37)..(38): Xaa in position 37 to 38 is any amino acid
  Variant (42)..(42): Xaa in position 42 is Ala, Glu, Gly or Asn
  Variant (44)..(44): Xaa in position 44 is Ser or Thr
  Variant (45)..(45): Xaa in position 45 is Ala, Ser or Thr
  Variant (46)..(46): Xaa in position 46 is any amino acid
  Variant (48)..(52): Xaa in position 48 to 52 is any amino acid
  Variant (53)..(53): Xaa in position 53 is Ala, Cys, Ser, Thr or Val
VXXAXXXXXSMXXXXXPXXTRAEXXDXXXAXXXXXDXXMLSXEXXXGXXXXXX

SEQ ID NO: 8919 - protein, 21 aa, Artificial sequence
  protein pattern
  Variant (2)..(5): Xaa in position 2 to 5 is any amino acid
  Variant (6)..(8): Xaa in position 6 to 8 is any or no amino acid
  Variant (10)..(10): Xaa in position 10 is Ala, Gly, Ser or Val
  Variant (11)..(11): Xaa in position 11 is any amino acid
  Variant (13)..(13): Xaa in position 13 is Ile or Val
  Variant (18)..(18): Xaa in position 18 is Leu or Met
  Variant (19)..(19): Xaa in position 19 is Ala or Gly
  Variant (20)..(20): Xaa in position 20 is any amino acid
  Variant (21)..(21): Xaa in position 21 is Glu or Gln
IXXXXXXXDXXMXARGDXXXX

SEQ ID NO: 8920 - DNA, 1119 bp, Escherichia coli
  CDS (1)..(1119)
atgggaaaaagcatagtcgttgtttctgcggtcaattttaccactggcggtccatttaccattttgaaaaaatttttggcagcaactaataataaagaaaatgtcagttttatcgcattagtccattctgctaaagagttaaaagaaagttatccatgggttaaattcattgagtttcctgaggttaaagggtcgtggctaaaacgtttgcactttgaatatgtagtttgtaaaaaactttcaaaagagctgaatgctacgcattggatttgtctgcatgatattacggccaatgtcgtcactaaaaaaagatatgtgtattgtcataaccctgcacctttttataaaggaattttattccgtgaaattcttatggagcctagctttttcttatttaaaatgctatacgggctgatatataaaataaacattaaaaaaaatactgcagtgtttgttcaacaattctggatgaaagaaaaatttatcaagaaatattctataaataacatcattgtcagtcggccagaaattaaattatctgataaaagccaacttactgatgatgattctcaatttaagaataacccttctgagttgacaatattttaccctgctgttccacgagtatttaaaaattacgagcttattattagtgcagcaaggaaattgaaagaacaatccaatattaaatttctgcttactatcagtggtacagaaaatgcgtatgcaaaatatattatcagtcttgcagaaggactggataatgttcatttcctcgggtacttggataaagaaaaaatcgatcattgttataatatttcagatatagtttgttttccctctaggttagaaacatggggattgccgttgtctgaagctaaagagcgaggtaagtgggtattagcatcagatttcccatttactagagaaactcttggtagttatgaaaagaaagctttttttgattctaataacgatgacatgttagttaaacttattattgacttcaaaaaaggtaacctcaaaaaagatatctctgatgcaaatttcatttatcgtaatgaaaatgtattagttgggtttgatgaactagttaattttattactgaagaacattaa

SEQ ID NO: 8921 - protein, 372 aa, Escherichia coli
MGKSIVVVSAVNFTTGGPFTILKKFLAATNNKENVSFIALVHSAKELKESYPWVKFIEFPEVKGSWLKRLHFEYVVCKKLSKELNATHWICLHDITANVVTKKRYVYCHNPAPFYKGILFREILMEPSFFLFKMLYGLIYKINIKKNTAVFVQQFWMKEKFIKKYSINNIIVSRPEIKLSDKSQLTDDDSQFKNNPSELTIFYPAVPRVFKNYELIISAARKLKEQSNIKFLLTISGTENAYAKYIISLAEGLDNVHFLGYLDKEKIDHCYNISDIVCFPSRLETWGLPLSEAKERGKWVLASDFPFTRETLGSYEKKAFFDSNNDDMLVKLIIDFKKGNLKKDISDANFIYRNENVLVGFDELVNFITEEH

SEQ ID NO: 8922 - DNA, 1113 bp, Bacteroides thetaiotaomicron VPI-5482
  CDS (1)..(1113): transl_table=11
atgagtagcaagcgaaagacgattgttgtctcagcggttagtttacgtaagggaggtacattaacgatattgcaagattgcttatgttatctttctgctttggcagccgacggcaattatcgggttattgcattggtacataaaagagaattggctgactatccgcacattgaatatattgaaatgccggacgttatcaaagggtggggacgacgtttgtggtgtgaatatgtgacaatgtataaattgtcacaaaaaataatgcctgtatatttatggctgtctcttcatgatgcgactccaagggtggtggctgaacgtcgggttgtctattgccagacttctttccctttttataaatggagttggagggattttctgtttgactataagattgttctatttgctttatttacccgttggatttatcggatcaatgtgcatcggaatacttacctgattgtacaacaggaatggttacgttccggattgagccggatgttgggggtaaaaaaagaaaagttcatagtagctcctccggaacgtaaagagaatgatgtgattgcagaaatagtagaactttcctgttttacattcttttatgctgccacaccagattgccataagaattttgagctgctatgcgacgctgcttctctgttggaacaagagcttggaaaaggaaggttcaaagtggtcttgactattagcggacaagaaaataaatatgcacagtggttatataaaaagttcggttcggtaagttcgatagagttcgcaggattcatgagcagagaaaaactttttggttattatcatgcagttgattgccttgtgtttccgtcaaaggtggaaacatggggattacccgtatctgaatttatggcaacgggtaagccgatgcttctagccgaccttccgtatgctcacgagactgccgctggaagtatgcaaactgcattttttaaattgtcggacccggttcaattaatgaatctgatgaaacggttatgtgaagatgactttacttttctaacgagtatcggtacttctgataaacgtttctcattcgcttcatcctggcgggaattattcgattctatattaaattaa

SEQ ID NO: 8923 - protein, 370 aa, Bacteroides thetaiotaomicron VPI-5482
MSSKRKTIVVSAVSLRKGGTLTILQDCLCYLSALAADGNYRVIALVHKRELADYPHIEYIEMPDVIKGWGRRLWCEYVTMYKLSQKIMPVYLWLSLHDATPRVVAERRVVYCQTSFPFYKWSWRDFLFDYKIVLFALFTRWIYRINVHRNTYLIVQQEWLRSGLSRMLGVKKEKFIVAPPERKENDVIAEIVELSCFTFFYAATPDCHKNFELLCDAASLLEQELGKGRFKVVLTISGQENKYAQWLYKKFGSVSSIEFAGFMSREKLFGYYHAVDCLVFPSKVETWGLPVSEFMATGKPMLLADLPYAHETAAGSMQTAFFKLSDPVQLMNLMKRLCEDDFTFLTSIGTSDKRFSFASSWRELFDSILN

SEQ ID NO: 8924 - DNA, 1122 bp, Escherichia coli
  CDS (1)..(1122): transl_table=11
atgatggatgacgagaaatatatgagtaatttagtaatagttaacgcaacagctttagcgtctagcggcgctttgacgattttgaaccagtttttagaacacgcactaaatgattctaagcataagtatctttgttttatacatgagagtgttaaaaaaaagagtgttaataatgtcaccgttattactataaaaaaacaaagttttattcaacgagtatggtgggatctatatggattgaataaatatataaagaaaaataatttgaaacctaaaaaaatagtttccttgcagaatacatctgtaaatagtaatttcgagcagataatatatctacaccagtcgattccctttagcaattttagaataaaaattaaatttcaatatgctatatttttcatgtataaatacgtgtatcctttttttatattctttagaactaaaaacaccactttcgttgttcagaccgattggatgaaagatgctatcgtagcaaagaaaaaaattgccaaagaacgagttcatgtaattaaacctgatataatattaccggttaataatcttgcttaccctgatgaacatgacaaagataattcatctgaagtgttttttttatatccggccacgccacttttctataaaaaccatttgattatcttagatgcaatgaggattctaaaaacagaaggaatacttgctaatacaaaattccaagtgacttttaaacaagatgataatgatgagttagcaattaaaatagccaaatatgatttagttgataatataagcttcttgggagtattatcctatgaagaattgtttcataaatacttaaaagcagatgctatactttttcctagctacttggaaagctttggtttaccgttagcagagggcgcaatgcttgggaaatatataatttgtagcgatttgccatatgcaagagatgtgcttaacaattattcaaatgtagaatatataaatcatgatgatgccagtaaatgggcattagctatgaaggaaataatattaaagaatagaaataatactttatctgaaagtgaaaatagctatatgtattgtccgaaaacaagctgggcagatttcttcgagttaatctaa

SEQ ID NO: 8925 - protein, 373 aa, Escherichia coli
MMDDEKYMSNLVIVNATALASSGALTILNQFLEHALNDSKHKYLCFIHESVKKKSVNNVTVITIKKQSFIQRVWWDLYGLNKYIKKNNLKPKKIVSLQNTSVNSNFEQIIYLHQSIPFSNFRIKIKFQYAIFFMYKYVYPFFIFFRTKNTTFVVQTDWMKDAIVAKKKIAKERVHVIKPDIILPVNNLAYPDEHDKDNSSEVFFLYPATPLFYKNHLIILDAMRILKTEGILANTKFQVTFKQDDNDELAIKIAKYDLVDNISFLGVLSYEELFHKYLKADAILFPSYLESFGLPLAEGAMLGKYIICSDLPYARDVLNNYSNVEYINHDDASKWALAMKEIILKNRNNTLSESENSYMYCPKTSWADFFELI

SEQ ID NO: 8926 - DNA, 1122 bp, Escherichia coli
  CDS (1)..(1122): transl_table=11
atgatggatgacgagaaatatatgagtaatttagtaatagttaacgcaacagctttagcgtctagcggcgctttgacgattttgaaccagtttttagaacacgcactaaatgattctaagcataagtatctttgttttatacatgagagtgttaaaaaaaagagtgttaataatgtcaccgttattactataaaaaaacaaagttttattcaacgagtatggtgggatctatatggattgaataaatatataaagaaaaataatttgaaacctaaaaaaatagtttccttgcagaatacatctgtaaatagtaatttcgagcagataatatatctacaccagccgattccctttagcaattttagaataaaaattaaatttcaatatgctatatttttcatgtataaatacgtgtatcctttttttatattctttagaactaaaaacaccactttcgttgttcagaccgattggatgaaagatgctatcgtagcaaagaaaaaaattgccaaagaacgagttcatgtaattaaacctgatataatattaccggttaataatcttgcttaccctgatgaacatgacaaagataattcatctgaagtgttttttttatatccggccacgccacttttctataaaaaccatttgattatcttagatgcaatgaggattctaaaaacagaaggaatacttgctaatacaaaattccaagtgacttttaaacaagatgataatgatgagttagcaattaaaatagccaaatatgatttagttgataatataagcttcttgggagtattatcctatgaagaattgtttcataaatacttaaaagcagatgctatactttttcctagctacttggaaagctttggtttaccgttagcagagggcgcaatgcttgggaaatatataatttgtagcgatttgccatatgcaagagatgtgcttaacaattattcaaatgtagaatatataaatcatgatgatgccagtaaatgggcattagctatgaaggaaataatattaaagaatagaaataatactttatctgaaagtgaaaatagctatatgtattgtccgaaaacaagctgggcagatttcttcgagttaatctaa

SEQ ID NO: 8927 - protein, 373 aa, Escherichia coli
MMDDEKYMSNLVIVNATALASSGALTILNQFLEHALNDSKHKYLCFIHESVKKKSVNNVTVITIKKQSFIQRVWWDLYGLNKYIKKNNLKPKKIVSLQNTSVNSNFEQIIYLHQPIPFSNFRIKIKFQYAIFFMYKYVYPFFIFFRTKNTTFVVQTDWMKDAIVAKKKIAKERVHVIKPDIILPVNNLAYPDEHDKDNSSEVFFLYPATPLFYKNHLIILDAMRILKTEGILANTKFQVTFKQDDNDELAIKIAKYDLVDNISFLGVLSYEELFHKYLKADAILFPSYLESFGLPLAEGAMLGKYIICSDLPYARDVLNNYSNVEYINHDDASKWALAMKEIILKNRNNTLSESENSYMYCPKTSWADFFELI

SEQ ID NO: 8928 - DNA, 1104 bp, Escherichia coli
  CDS (1)..(1104): transl_table=11
atgtttgatctgtccaaaaattatattattgtaagtgcgacggcgctggcttccggaggtgcattaactatattaaagcaatttataaaacatgcatcacaaaattcaaatgactatattatgtttgtatctgcgggattggagttgccggtctgtgataacatcatttacatagaaaacacaccaaaaggatggttgaaaagaatatattgggattggttcggttgtcggaagtttatctcggaacataagattaacgttaagaaagtaatttctctacaaaattccagtttgaatgttccttacgaacagattatttacttgcaccagccaattccttttagtaaagttgattcttttttaaaaaatatcacatccgataacgtaaagctttttttatataaaaagttttattcctattttatatttaaatatgtgaatgccaatacaaccatcgtagtgcaaacgaattggatgaaaaaaggagtgctggagcaatgtgataaaattagtaccgaaagggtccttgttataaaacctgatatcaaagcatttaataatactaattttgatgtagatatggatgtatctgcaaaaacactcttatatccagcgacaccacttacctataaaaatcatttggtcattctgaaggcgttggttattttaaagaaaaagtattttatagatgatctgaaattccaagtgacttttgaaaagaataggtacaaaaattttgataagtttgtgcaattaaataacttaagcaaaaacgttgattatctcggcgttctttcatactcgaacttgcaaaaaaaatatatggcggcatctttaatcgtttttcctagctatatcgaatcatatgggttaccactcatcgaagctgctagtttaggaaaaaaaatcattagtagtgatcttccttatgcccgggatgttttaaaggattatagcggcgtagattttgtaatttacaataatgaagatggctgggctaaggcgttgtttaatgttttaaatggcaattcgaagctcaattttaggccttatgaaaaagatagtcgttcatcttggccacagttcttctctattttgaaataa

SEQ ID NO: 8929 - protein, 367 aa, Escherichia coli
MFDLSKNYIIVSATALASGGALTILKQFIKHASQNSNDYIMFVSAGLELPVCDNIIYIENTPKGWLKRIYWDWFGCRKFISEHKINVKKVISLQNSSLNVPYEQIIYLHQPIPFSKVDSFLKNITSDNVKLFLYKKFYSYFIFKYVNANTTIVVQTNWMKKGVLEQCDKISTERVLVIKPDIKAFNNTNFDVDMDVSAKTLLYPATPLTYKNHLVILKALVILKKKYFIDDLKFQVTFEKNRYKNFDKFVQLNNLSKNVDYLGVLSYSNLQKKYMAASLIVFPSYIESYGLPLIEAASLGKKIISSDLPYARDVLKDYSGVDFVIYNNEDGWAKALFNVLNGNSKLNFRPYEKDSRSSWPQFFSILK

SEQ ID NO: 8930 - DNA, 25 bp, Artificial sequence
  primer
atgggaaaaagcatagtcgttgttt

SEQ ID NO: 8931 - DNA, 28 bp, Artificial sequence
  primer
ttaatgttcttcagtaataaaattaact

SEQ ID NO: 8932 - protein, 381 aa, Artificial sequence
  consensus sequence
  Variant (2)..(5): Xaa in position 2 to 5 is any amino acid
  Variant (6)..(8): Xaa in position 6 to 8 is any or no amino acid
  Variant (10)..(10): Xaa in position 10 is any amino acid
  Variant (12)..(13): Xaa in position 12 to 13 is any amino acid
  Variant (15)..(17): Xaa in position 15 to 17 is any amino acid
  Variant (19)..(19): Xaa in position 19 is any amino acid
  Variant (24)..(25): Xaa in position 24 to 25 is any amino acid
  Variant (26)..(28): Xaa in position 26 to 28 is any or no amino acid
  Variant (31)..(44): Xaa in position 31 to 44 is any amino acid
  Variant (45)..(45): Xaa in position 45 is any or no amino acid
  Variant (47)..(69): Xaa in position 47 to 69 is any amino acid
  Variant (70)..(72): Xaa in position 70 to 72 is any or no amino acid
  Variant (74)..(82): Xaa in position 74 to 82 is any amino acid
  Variant (84)..(99): Xaa in position 84 to 99 is any amino acid
  Variant (100)..(100): Xaa in position 100 is any or no amino acid
  Variant (102)..(111): Xaa in position 102 to 111 is any amino acid
  Variant (113)..(113): Xaa in position 113 is any amino acid
  Variant (115)..(117): Xaa in position 115 to 117 is any amino acid
  Variant (120)..(121): Xaa in position 120 to 121 is any amino acid
  Variant (122)..(124): Xaa in position 122 to 124 is any or no amino acid
  Variant (127)..(136): Xaa in position 127 to 136 is any amino acid
  Variant (138)..(146): Xaa in position 138 to 146 is any amino acid
  Variant (148)..(151): Xaa in position 148 to 151 is any amino acid
  Variant (152)..(153): Xaa in position 152 to 153 is any or no amino acid
  Variant (156)..(158): Xaa in position 156 to 158 is any amino acid
  Variant (161)..(162): Xaa in position 161 to 162 is any amino acid
  Variant (166)..(175): Xaa in position 166 to 175 is any amino acid
  Variant (176)..(181): Xaa in position 176 to 181 is any or no amino acid
  Variant (183)..(183): Xaa in position 183 is any amino acid
  Variant (186)..(186): Xaa in position 186 is any amino acid
  Variant (188)..(204): Xaa in position 188 to 204 is any amino acid
  Variant (205)..(206): Xaa in position 205 to 206 is any or no amino acid
  Variant (208)..(209): Xaa in position 208 to 209 is any amino acid
  Variant (210)..(212): Xaa in position 210 to 212 is any or no amino acid
  Variant (218)..(220): Xaa in position 218 to 220 is any amino acid
  Variant (223)..(225): Xaa in position 223 to 225 is any amino acid
  Variant (227)..(228): Xaa in position 227 to 228 is any amino acid
  Variant (230)..(232): Xaa in position 230 to 232 is any amino acid
  Variant (235)..(239): Xaa in position 235 to 239 is any amino acid
  Variant (240)..(242): Xaa in position 240 to 242 is any or no amino acid
  Variant (245)..(246): Xaa in position 245 to 246 is any amino acid
  Variant (248)..(252): Xaa in position 248 to 252 is any amino acid
  Variant (254)..(267): Xaa in position 254 to 267 is any amino acid
  Variant (269)..(270): Xaa in position 269 to 270 is any amino acid
  Variant (274)..(274): Xaa in position 274 is any amino acid
  Variant (277)..(277): Xaa in position 277 is any amino acid
  Variant (279)..(279): Xaa in position 279 is any amino acid
  Variant (281)..(283): Xaa in position 281 to 283 is any amino acid
  Variant (285)..(287): Xaa in position 285 to 287 is any amino acid
  Variant (289)..(291): Xaa in position 289 to 291 is any amino acid
  Variant (295)..(296): Xaa in position 295 to 296 is any amino acid
  Variant (298)..(299): Xaa in position 298 to 299 is any amino acid
  Variant (304)..(304): Xaa in position 304 is any amino acid
  Variant (306)..(309): Xaa in position 306 to 309 is any amino acid
  Variant (312)..(315): Xaa in position 312 to 315 is any amino acid
  Variant (323)..(324): Xaa in position 323 to 324 is any amino acid
  Variant (326)..(327): Xaa in position 326 to 327 is any amino acid
  Variant (329)..(352): Xaa in position 329 to 352 is any amino acid
  Variant (354)..(358): Xaa in position 354 to 358 is any amino acid
  Variant (360)..(367): Xaa in position 360 to 367 is any amino acid
  Variant (368)..(372): Xaa in position 368 to 372 is any or no amino acid
  Variant (375)..(377): Xaa in position 375 to 377 is any amino acid
  Variant (379)..(380): Xaa in position 379 to 380 is any amino acid
KXXXXXXXVXAXXLXXXGXLTILXXXXXFLXXXXXXXXXXXXXXXHXXXXXXXXXXXXXXXXXXXXXXXXXXRXXXXXXXXXKXXXXXXXXXXXXXXXXXTXXXXXXXXXXYXHXXXPFXXXXXFRXXXXXXXXXXFXXXXXXXXXIXXXXXXNTXXXVQXXWMKXXXXXXXXXXXXXXXXVXKPXIXXXXXXXXXXXXXXXXXXXSXXXXXYPATPXXXKNXXXIXXAXXXLKXXXXXXXXKFXXTXXXXXNXXXXXXXXXXXXXXNXXFLGXLSXEXLXXXYXXXDXXXFPSXXEXXGLPLXEXXXXGKXXXXSDLPYARXXLXXYXXXXXXXXXXXXXXXXXXXXXXXXNXXXXXSXXXXXXXXXXXXXSWXXXFXXI

SEQ ID NO: 8933 - protein, 59 aa, Artificial sequence
  protein pattern
  Variant (2)..(3): Xaa in position 2 to 3 is any amino acid
  Variant (4)..(6): Xaa in position 4 to 6 is any or no amino acid
  Variant (8)..(8): Xaa in position 8 is any amino acid
  Variant (10)..(10): Xaa in position 10 is Asp or Ser
  Variant (11)..(11): Xaa in position 11 is any amino acid
  Variant (12)..(12): Xaa in position 12 is Glu or Ser
  Variant (13)..(13): Xaa in position 13 is any amino acid
  Variant (14)..(14): Xaa in position 14 is Ile or Leu
  Variant (15)..(15): Xaa in position 15 is any amino acid
  Variant (16)..(16): Xaa in position 16 is His or Lys
  Variant (17)..(17): Xaa in position 17 is any amino acid
  Variant (19)..(20): Xaa in position 19 to 20 is any amino acid
  Variant (21)..(21): Xaa in position 21 is Ala or Ser
  Variant (22)..(22): Xaa in position 22 is Asp or Ser
  Variant (23)..(23): Xaa in position 23 is Ala, Ile or Leu
  Variant (24)..(24): Xaa in position 24 is Ile or Val
  Variant (25)..(25): Xaa in position 25 is any amino acid
  Variant (29)..(29): Xaa in position 29 is any amino acid
  Variant (30)..(30): Xaa in position 30 is Ile or Leu
  Variant (32)..(32): Xaa in position 32 is Ser or Thr
  Variant (33)..(33): Xaa in position 33 is Phe, Trp or Tyr
  Variant (38)..(38): Xaa in position 38 is any amino acid
  Variant (40)..(40): Xaa in position 40 is Ala or Gly
  Variant (41)..(43): Xaa in position 41 to 43 is any amino acid
  Variant (46)..(46): Xaa in position 46 is any amino acid
  Variant (47)..(47): Xaa in position 47 is Ile or Val
  Variant (48)..(48): Xaa in position 48 is Ile or Leu
  Variant (49)..(49): Xaa in position 49 is Ala, Cys or Ser
  Variant (52)..(52): Xaa in position 52 is Phe or Leu
  Variant (54)..(54): Xaa in position 54 is Phe or Tyr
  Variant (55)..(55): Xaa in position 55 is Ala or Thr
  Variant (57)..(57): Xaa in position 57 is Asp or Glu
  Variant (58)..(58): Xaa in position 58 is Thr or Val
DXXXXXGXLXXXXXXXXYXXXXXXXFPSXXEXXGLPLXEXXXXGKXXXXSDXPXXRXXL

SEQ ID NO: 8934 - protein, 32 aa, Artificial sequence
  protein pattern
  Variant (2)..(3): Xaa in position 2 to 3 is any amino acid
  Variant (4)..(5): Xaa in position 4 to 5 is any or no amino acid
  Variant (7)..(8): Xaa in position 7 to 8 is any or no amino acid
  Variant (10)..(10): Xaa in position 10 is Ala or Pro
  Variant (12)..(12): Xaa in position 12 is Thr or Val
  Variant (14)..(15): Xaa in position 14 to 15 is any amino acid
  Variant (16)..(16): Xaa in position 16 is Phe, His or Tyr
  Variant (19)..(19): Xaa in position 19 is Phe, His or Tyr
  Variant (20)..(20): Xaa in position 20 is any amino acid
  Variant (21)..(22): Xaa in position 21 to 22 is Ile or Leu
  Variant (23)..(23): Xaa in position 23 is any amino acid
  Variant (24)..(24): Xaa in position 24 is Asp or Ser
  Variant (26)..(26): Xaa in position 26 is any amino acid
  Variant (27)..(27): Xaa in position 27 is Arg or Ser
  Variant (28)..(28): Xaa in position 28 is any amino acid
  Variant (30)..(30): Xaa in position 30 is Glu or Lys
  Variant (31)..(31): Xaa in position 31 is Glu, Gln or Thr
  Variant (32)..(32): Xaa in position 32 is Glu or Gln
SXXXXFXXYXAXPXXXKNXXXXXXAXXXLXXX

SEQ ID NO: 8935 - protein, 20 aa, Artificial sequence
  protein pattern
  Variant (2)..(3): Xaa in position 2 to 3 is any or no amino acid
  Variant (5)..(10): Xaa in position 5 to 10 is any amino acid
  Variant (11)..(12): Xaa in position 11 to 12 is any or no amino acid
  Variant (14)..(14): Xaa in position 14 is any amino acid
  Variant (16)..(16): Xaa in position 16 is Asn or Gln
  Variant (17)..(17): Xaa in position 17 is Pro or Ser
  Variant (18)..(18): Xaa in position 18 is Ala or Ile
NXXVXXXXXXXXYXHXXXPF

SEQ ID NO: 8936 - protein, 11 aa, Artificial sequence
  protein pattern
  Variant (2)..(2): Xaa in position 2 is Ala or Thr
  Variant (3)..(3): Xaa in position 3 is Phe, Ile or Val
  Variant (4)..(4): Xaa in position 4 is Phe or Val
  Variant (7)..(7): Xaa in position 7 is Gln or Thr
  Variant (8)..(8): Xaa in position 8 is any amino acid
TXXXVQXXWMK

SEQ ID NO: 8937 - DNA, 696 bp, Escherichia coli
  CDS (1)..(696): transl_table=11
atggcgcttcgtcgcccccttcctaacatccaggttaatcaggtcgctaaatatatgactgatcagtctcatcagtgcgtcattatcggtatcgctggcgcatcggcttccggcaagagtcttattgccagtaccctttatcgtgaattgcgtgagcaagtcggtgatgaacacatcggcgtaattcccgaagactgctattacaaagatcaaagccatctgtcgatggaagaacgcgttaagaccaactacgaccatcccagcgcgatggatcacagtctgctgcttgagcatttacaagcgttgaaacgcggctcggcaattgacctgccggtttacagctatgttgaacatacgcgtatgaaagaaacggtgacggttgagccgaagaaggtcatcattctcgaaggcattttgttgctgacggatgcgcgtttgcgtgacgaacttaacttctccattttcgttgataccccgctggatatctgcctgatgcgccgcatcaagcgtgacgttaacgagcgtgggcgttcaatggattcagtgatggcgcaatatcaaaaaaccgtgcgcccgatgttcctgcaattcattgagccttctaaacaatatgcggacattatcgtgccgcgcggcgggaaaaaccgcatcgcgatcgatatattgaaagcgaaaataagtcagttctttgaataa

SEQ ID NO: 8938 - protein, 231 aa, Escherichia coli
MALRRPLPNIQVNQVAKYMTDQSHQCVIIGIAGASASGKSLIASTLYRELREQVGDEHIGVIPEDCYYKDQSHLSMEERVKTNYDHPSAMDHSLLLEHLQALKRGSAIDLPVYSYVEHTRMKETVTVEPKKVIILEGILLLTDARLRDELNFSIFVDTPLDICLMRRIKRDVNERGRSMDSVMAQYQKTVRPMFLQFIEPSKQYADIIVPRGGKNRIAIDILKAKISQFFE

SEQ ID NO: 8939 - DNA, 708 bp, Klebsiella pneumoniae
  CDS (1)..(708): transl_table=11
ttgccgcgtttggcggtccgccgccaccctccatctctatccaggttaatcaggtcgcaaaaatttatgactgatatgtcccatcagtgcgtcattgtaggcatcgccggcgcatcggcttctggcaaaagtcttatcgccagtactctctatcgcgaattgcgtgaacaagttggcgacgaacatattggcgtcattccggaagacagctattacaaagatcaaagtcatctgtcgatggaagagcgcgtcaaaaccaactatgaccacccgagctcaatggaccacagtctgttgttccagcatttgcagatgctgaaaagcggccagccgattgaactgccggtctatagctacgtcgagcatacccgcacgccgaacaccattcacgtcgagccgaagaaggtgattatccttgaagggatcctgctgctgaccgacgcgcgcctgcgtaacgagctcaacttctctattttcgtcgacaccccgctcgatatttgcctgatgcgccgtattaagcgcgacgttaacgagcgcggccgctccatggactcggtgatggcccagtatcagaaaaccgtgcgtccgatgttcctgcagtttattgaaccgtcgaagcagtatgccgacatcatcgtgccgcgcggcggcaaaaaccgcatcgctattgatattctgaaggccaaaatcagtcagttctttgaataa

SEQ ID NO: 8940 - protein, 235 aa, Klebsiella pneumoniae
LPRLAVRRHPPSLSRLIRSQKFMTDMSHQCVIVGIAGASASGKSLIASTLYRELREQVGDEHIGVIPEDSYYKDQSHLSMEERVKTNYDHPSSMDHSLLFQHLQMLKSGQPIELPVYSYVEHTRTPNTIHVEPKKVIILEGILLLTDARLRNELNFSIFVDTPLDICLMRRIKRDVNERGRSMDSVMAQYQKTVRPMFLQFIEPSKQYADIIVPRGGKNRIAIDILKAKISQFFE

SEQ ID NO: 8941 - DNA, 1470 bp, Oryza sativa (japonica cultivar-group)
  CDS (1)..(1470)
atgggttcaagaccagttgatgaggttcttgatgctgccgcggctggggtccactactccacgctccgtttggatgagcttaacatcaatggctccatgacaggggaggaacaaccaacgacctcaggggtggagaatgggcaccaggagccatttgtcattggtgttgccgggggtgcatcttcaggcaaaagtactgtatgcaaaatgataatcgatcagctacgtgatcagcgtgtagttgttgttactcaggagtctttttattatgggttgtctgatgaggaattggtccatgttcatgattataactttgatcatccagatgcatttgatacggagttactactctcttgtatggagaacttgaaacatggcaaggctgtggacattcctaattacaacttcaaaacatataagagtgttgcaagtgcaagaaaggtcaatccttcagatgtaattattttggaaggaattctggttttccatgattcacgtgtccgggatttgatgaacatgaagatctttgttgacacagatgctgatgtgcgattaacaaggaggattcgacgtgacaccattgagaagggtagagatatcaaaactgtgctagatcagtactcaaagtttgttaagcctgcttttgaagacttcatcctcccaaccaagaagtatgctgatattatcatcccacgaggtggcgataatgatgttgcaattgacttaatagttcagcatattcgtactaagcttggtcaacatgatctctgtaaagtacaccccaatttgtatgtcattcagactacttatcagatacgaggtatgcacacaataatacgggatgctgccacaacaacacatgatttcatattctatgctgatcggttgattcgattggttgttgagcatggtcttggtcatcttccattcaaggaaaagcaggtcataactccaactggatcggtttacactggggtagagttctccaaaagattgtgtggtatctcagtgattagaagtggtgagagtatggagaatgcattgcgggcatgctgcaaaggtataaaaattgggaagattcttattcacagggaaggagacaatggcaaacagctaatctatcacaatttaccgaaagatattgcaaacaggcatgtgctgttgttggatcccatactgggaacaggaaattcagctgttcaagctatatctctactcttgaaaaagggtgtacaggaaacaaatattatttttctgaatcttatatcagctccccaaggagtgcatgtggtcagcaagagatttccaagagtgaagatcgtgacatcagaaatcgagtttggtctgaatgatgatttccgcgtcatccctgggatgggtgagtttggggataggtactttgggacagatgattatcagtcatcaacaccattcttttgtgatgagaaaaatcgtgtcaggcttttgtga

SEQ ID NO: 8942 - protein, 489 aa, Oryza sativa (japonica cultivar-group)
MGSRPVDEVLDAAAAGVHYSTLRLDELNINGSMTGEEQPTTSGVENGHQEPFVIGVAGGASSGKSTVCKMIIDQLRDQRVVVVTQESFYYGLSDEELVHVHDYNFDHPDAFDTELLLSCMENLKHGKAVDIPNYNFKTYKSVASARKVNPSDVIILEGILVFHDSRVRDLMNMKIFVDTDADVRLTRRIRRDTIEKGRDIKTVLDQYSKFVKPAFEDFILPTKKYADIIIPRGGDNDVAIDLIVQHIRTKLGQHDLCKVHPNLYVIQTTYQIRGMHTIIRDAATTTHDFIFYADRLIRLVVEHGLGHLPFKEKQVITPTGSVYTGVEFSKRLCGISVIRSGESMENALRACCKGIKIGKILIHREGDNGKQLIYHNLPKDIANRHVLLLDPILGTGNSAVQAISLLLKKGVQETNIIFLNLISAPQGVHVVSKRFPRVKIVTSEIEFGLNDDFRVIPGMGEFGDRYFGTDDYQSSTPFFCDEKNRVRLL

SEQ ID NO: 8943 - DNA, 1476 bp, Oryza sativa (japonica cultivar-group)
  CDS (1)..(1476)
atggacgccgcgatggagtcggcggtggggccgcacttcagcgggctccgcctcgactcgcgccgcctctcctcctcctccctccccacctccccctccgccgcctccagcaacggctgcggcggcaacgacgcccccgccgcggttaacgggttcgcgccgccgccgcccccctccgccgccgcagccgcggaggaggggagcaagcagcccttcgtgatcggtgtgtcgggagggacggcgtcggggaagacgacggtctgcgacatgatcatccagcagctgcacgaccaccgcgtcgtgctcgtcaaccaggattcattctaccgtggtttaactgaggaagaatctgaccgtgtgcaagattacaactttgatcacccagatgcatttgatacagagcaacttttagagtgcatgggacagcttaaaagtgggctatctgtaaatattcctatatatgattttaagaaccaccgtcgatgctctgaaagttttagaaaggttaatgcatcagatgtcatcattttggagggcattttagtttttcatgatcaaagggttcgtgatttgatggatatgaaaatttttgttgacacagatgccgatattagacttgcccggcgtataaggcgtgatacagttgaaagaggtagagatgtcatctcagtgctggagcagtatgggaggtttgtgaagcctgcgttcgatgattttgttcttccttccaaaaaatatgctgatgtgatcataccgcgagggggagataaccatgttgccatagatttaattgtgcaacatattcgtacaaaacttggtcagcatgacttatgcaaaatctacccaaatgtttatgtggttaatacaactttccagatacgtggaatgcatactcttattcgcgaccgggacattgcaactccagatttcgtcttttattcagatcgtctgattcgtctggtagttgagcatggactggggcatttgcctttcacagagaagcagattgttacaccaacagggtctacttacatgggagttgacttttgtaagaagctctgtggtgtgtcaattattcgaagtggagaaagcatggagaatgcattacgtgcttgttgtaaggggattaaaataggcaaaattctaatacatcgggatggggacaatggacaacagctcatataccacaagtttcccttggatattgctgaacgacatgttctactcatggatcctgtgcttggtacaggtaactcggcaaatcaagctatagaacttcttataagtagtggagttcctgaggagcggatcatgtttctcaatctcatctcggctcctgaaggggtccattgtgtctgcaagcgattccctcgtctgaagattgtaacctcagagatcgaaactgggttgaacgaggagtaccgggtgatcccagggttaggagagtatggtgatcgctacttcggtacagactaa

SEQ ID NO: 8944 - protein, 491 aa, Oryza sativa (japonica cultivar-group)
MDAAMESAVGPHFSGLRLDSRRLSSSSLPTSPSAASSNGCGGNDAPAAVNGFAPPPPPSAAAAAEEGSKQPFVIGVSGGTASGKTTVCDMIIQQLHDHRVVLVNQDSFYRGLTEEESDRVQDYNFDHPDAFDTEQLLECMGQLKSGLSVNIPIYDFKNHRRCSESFRKVNASDVIILEGILVFHDQRVRDLMDMKIFVDTDADIRLARRIRRDTVERGRDVISVLEQYGRFVKPAFDDFVLPSKKYADVIIPRGGDNHVAIDLIVQHIRTKLGQHDLCKIYPNVYVVNTTFQIRGMHTLIRDRDIATPDFVFYSDRLIRLVVEHGLGHLPFTEKQIVTPTGSTYMGVDFCKKLCGVSIIRSGESMENALRACCKGIKIGKILIHRDGDNGQQLIYHKFPLDIAERHVLLMDPVLGTGNSANQAIELLISSGVPEERIMFLNLISAPEGVHCVCKRFPRLKIVTSEIETGLNEEYRVIPGLGEYGDRYFGTD

SEQ ID NO: 8945 - DNA, 1491 bp, Oryza sativa (japonica cultivar-group)
  CDS (1)..(1491)
atgccggagaaggcggtggacgacgtcatggactcggcggtgggggcgcacttcagcggactccgcctcgaggcgctccgcctctcctccccctccgccccgtcctccccttcctccgccaaggcggccgcggcggcggccgcccactccaacggcgccgtctacgccaacggcgtcgccgccgacgccgcggagcttgtgtcgccatccgcgctcaggcagcccttcgtcatcggggtttcgggtgggacggcgtcggggaagacgacggtgtgcgacatgatcatccagcagctgcacgaccaccgtgtcgtgctcgtcaaccaggattccttctaccgtgggttaactgctgaagaatctgcacatgcccaagattacaactttgatcaccctgatgcatttgacacagagcagcttctggaatgcatggggcagctaaaacgggcacagcctgtaaatgttcctatatatgattttaagaatcaccgacggtcctctgaaagctttagaaaggtcaatgcatcagatgtcattatattagagggcattttagtcttccatgatcaaagagttcgcaatctgatggacatgaaaatttttgtggacacagatgctgatattaggctagctcgacgaataaggcgtgatacagttgaaagaggtagagatgttagctcggtgcttgagcagtatggcaggtttgtgaagccagcatttgatgattttgttctcccttcgaaaaaatatgccgacgtgatcataccacgaggaggtgataatcatgtggcaattgacctgattgttcaacatattcgtactaagcttggtcagcatgacttgtgcaaaatctatccacatgtttatgtggttcaaacaacattccagatccgaggaatgcatactctgattcgtgacagggacatcactacacctgactttgtcttttattcagatcggttgatccgtttggtagttgagcacggactggggcatttgccatttacagaaaagcagattattactccaacagggtccatttatatgggagttgaattttgcaagaagctctgtggagtgtctattgtccgaagtggtgaaagtatggagaatgcattgcgtgcttgttgtaaaggaataaaaattggcaagattctaatacatcgtgttggagacaatggacagcaacttatataccataaactgcccatggatattgctgaacggcatgttcttcttttggatccagtgcttggtacaggtaactcagcaaatcaagctattgagcttctgataagaaaaggtgttccagaggagcgaatcatatttctcaatcttatctcggctcctgagggaattcagtgcgtctgcaagcgatttccgaggctgaagattgtaacctccgagatcgacaccgggttgagcgaggaatacagggtaatcccagggttgggagagtacggtgaccgctacttcggcacagataattga

SEQ ID NO: 8946 - protein, 496 aa, Oryza sativa (japonica cultivar-group)
MPEKAVDDVMDSAVGAHFSGLRLEALRLSSPSAPSSPSSAKAAAAAAAHSNGAVYANGVAADAAELVSPSALRQPFVIGVSGGTASGKTTVCDMIIQQLHDHRVVLVNQDSFYRGLTAEESAHAQDYNFDHPDAFDTEQLLECMGQLKRAQPVNVPIYDFKNHRRSSESFRKVNASDVIILEGILVFHDQRVRNLMDMKIFVDTDADIRLARRIRRDTVERGRDVSSVLEQYGRFVKPAFDDFVLPSKKYADVIIPRGGDNHVAIDLIVQHIRTKLGQHDLCKIYPHVYVVQTTFQIRGMHTLIRDRDITTPDFVFYSDRLIRLVVEHGLGHLPFTEKQIITPTGSIYMGVEFCKKLCGVSIVRSGESMENALRACCKGIKIGKILIHRVGDNGQQLIYHKLPMDIAERHVLLLDPVLGTGNSANQAIELLIRKGVPEERIIFLNLISAPEGIQCVCKRFPRLKIVTSEIDTGLSEEYRVIPGLGEYGDRYFGTDN

SEQ ID NO: 8947 - DNA, 1452 bp, Arabidopsis thaliana
  CDS (1)..(1452)
atgccagaagattcaacggcgattgactatgtcatggagaaggcatcggggcctcacttctccggtcttcgccttgacggtcttctttcttctccgtcgaaatcctccgtctcttctccttctcacttccgtttgagtaattcttctttttcggctaccgacgatcccgccgctcctcatcagcccttcgttatcggagttactggtggtacagcttctggtaagacgacggtatgtgacatgataatccagcaacttcatgatcatcgcattgttttagttaaccaggattcgttttaccgtggtttgacatctgaagaacttgagcatgtacaagaatacaattttgatcatcctgatgcctttgacactgagcagcttttgcattgcgttgacatactcaagagtgggcaaccctatcaaattccaatttatgacttcaagacccatcaacgtaaagtagatgcttttcgccaggtcaatgcttgtgatgtcatcattttggaagggattctagtttttcatgactcacgagttcgggacctaatgaatatgaagatcttcgttgacacagatgctgatgtgaggcttgctcgcagaatcaggcgtgacacggttgagaggggtagggatgttgactctgtgcttgaacagtatgcaaagtttgtgaagcctgcgtttgatgattttgtgctcccctcaaagaaatatgctgatgtgatcattccacgaggaggtgacaatcacgttgcagttgatttgattgtgcaacatatccacacaaaacttgggcaacatgatctctgcaaaatctacccaaatgtttttgttattgaaacaacatttcagataagaggcatgcacactctcattcgagagaaggacatatcaaaacatgacttcgtgttttactcagatcgcctcattcgtttggttgtggagcatggtcttggccatttgcctttcactgagaaacaagtagttactccgacaggatctgtgtatagcggtgttgatttctgcaagaaactctgtggggtctcagtcattcgaagtggtgaaagcatggaaaacgcattgcgcgcatgttgcaaagggattaagatagggaagattctcatccatcgtgacggagacaatggaatgcagcttatatacgagaagcttccaagtgatatctccgagcgtcatgtcctgctattagatcctgttttaggcacaggtaactctgcaaatcaggcgatagaactactcatacagaaaggagtacctgaagcccacattatattcctcaatcttatctcagcgccagaaggaatccattgcgtctgcaaacggttcccaaagttgaagattgtgacgtcagaaatcgatcagtgtctgaacgaagagttcagggttataccaggcttgggtgagtttggtgatcgctactttggtaccgacgagtag

SEQ ID NO: 8948 - protein, 483 aa, Arabidopsis thaliana
MPEDSTAIDYVMEKASGPHFSGLRLDGLLSSPSKSSVSSPSHFRLSNSSFSATDDPAAPHQPFVIGVTGGTASGKTTVCDMIIQQLHDHRIVLVNQDSFYRGLTSEELEHVQEYNFDHPDAFDTEQLLHCVDILKSGQPYQIPIYDFKTHQRKVDAFRQVNACDVIILEGILVFHDSRVRDLMNMKIFVDTDADVRLARRIRRDTVERGRDVDSVLEQYAKFVKPAFDDFVLPSKKYADVIIPRGGDNHVAVDLIVQHIHTKLGQHDLCKIYPNVFVIETTFQIRGMHTLIREKDISKHDFVFYSDRLIRLVVEHGLGHLPFTEKQVVTPTGSVYSGVDFCKKLCGVSVIRSGESMENALRACCKGIKIGKILIHRDGDNGMQLIYEKLPSDISERHVLLLDPVLGTGNSANQAIELLIQKGVPEAHIIFLNLISAPEGIHCVCKRFPKLKIVTSEIDQCLNEEFRVIPGLGEFGDRYFGTDE

SEQ ID NO: 8949 - DNA, 1398 bp, Arabidopsis thaliana
  CDS (1)..(1398)
atggagaaattatctaatggcgttagagatcactgtttgatcagtgactatgtttctccttcagctcctgctcctcttaaacaacctttcgtgatcggtgttgccggaggaaccgcctccgggaagacgacggtttgcaatatgatcatgtctcagttacatgatcaacgtgttgtccttgttaaccaagattcgttttaccactcgcttactaaggagaaattgaacaaggttcatgaatataacttcgatcatcctgatgcattcaacactgaggttttactttcatgtatggagaagttacgatctggacaaccagtgaacattccgagttacgatttcaaaatccatcagagcattgaatcatcaagtccggttaatcctggtgatgtaatcatcttagagggaatcctagttcttaatgatcctcgagttcgtgatctcatgaacatgaagatctttgtcgatacagatgctgatgtacgactctcgagaagaatacagcgtgacaccgtcgagagaggaagaaacatacagaatgtgcttgaacagtatactaagtttgtgaagccgagcttcgatgaatacattcagccgtcgatgaagtatgctgatataatcattccacgaggaggagataatgatgttgcaattgatctcattgtacaacatattcgtacaaagctgtgccaacacaatctctgtaagatatactcaaacatcttcatcatatcttcaacattccagatcaaaggaatgcatactcttatccgtgatatcaacacaaccaagcatgatttcgtcttctacgctgaccgattgattcgactggtcgtggaacatggacttggtcatcttcctttcacagagaaacagatcacaactccaacagggtcagtgtacactggagtcgacttctgcaagagattgtgcggtgtctcagtgatcagaagtggagaaagcatggaaaacgctctaagagcttgctgcaatgggattaagattggtaaaatcctcattcacagagagaataacgatggtcgtcagttaatatatgagaagttgccaaaagatatctcaagcagacatgtcttcctccttgaccctgttctagcatcaggctactctgcagttaaagctataactttgcttctaagcaagggagttccagaatcacatatcatctttctcaatcttatagcagcacctcaaggcatccacgcgctttgcaagaaattcccgatgctaaagattgtgacatcggaaatcgattcatctctcaatgaggactcacgtgtgattccaggcttgggagaatttgcagaccgttactttgggacaaacaacattaattcaaaagtatcaagcttgtctacaaatctcaagttaagaagctaa

SEQ ID NO: 8950 - protein, 465 aa, Arabidopsis thaliana
MEKLSNGVRDHCLISDYVSPSAPAPLKQPFVIGVAGGTASGKTTVCNMIMSQLHDQRVVLVNQDSFYHSLTKEKLNKVHEYNFDHPDAFNTEVLLSCMEKLRSGQPVNIPSYDFKIHQSIESSSPVNPGDVIILEGILVLNDPRVRDLMNMKIFVDTDADVRLSRRIQRDTVERGRNIQNVLEQYTKFVKPSFDEYIQPSMKYADIIIPRGGDNDVAIDLIVQHIRTKLCQHNLCKIYSNIFIISSTFQIKGMHTLIRDINTTKHDFVFYADRLIRLVVEHGLGHLPFTEKQITTPTGSVYTGVDFCKRLCGVSVIRSGESMENALRACCNGIKIGKILIHRENNDGRQLIYEKLPKDISSRHVFLLDPVLASGYSAVKAITLLLSKGVPESHIIFLNLIAAPQGIHALCKKFPMLKIVTSEIDSSLNEDSRVIPGLGEFADRYFGTNNINSKVSSLSTNLKLRS

SEQ ID NO: 8951 - DNA, 1461 bp, Arabidopsis thaliana
  CDS (1)..(1461)
atgccggaagattcttcttctttagactacgcgatggagaaggcatcagggcctcacttctccggtcttcgcttcgacggccttctctcttcttctccacccaattcctccgtcgtctcttcactccgatcagctgtttcttcttcttctccgtcttcttccgatcccgaagcgcctaagcagcccttcattatcggggtttctggtggtacggcttctggtaagaccacggtctgtgacatgataatccagcaacttcatgaccatcgtgtcgttttagttaatcaggattccttttatcgtggtttgacatctgaggagttgcagcgtgtgcaagagtataactttgatcatcctgatgcgtttgacactgagcagcttttgcattgtgctgagactctcaagagcgggcaaccctatcaagttccaatctatgactttaagactcatcaacgtagatctgatactttccgccaggtcaatgcttctgatgtaataatattggaagggattctagttttccatgactcacgagttcggaatctgatgaatatgaagatctttgttgatacagatgctgatgtaaggcttgctcgcagaattaggcgtgacacagttgagaggggtagggatgtcaattctgtgcttgaacagtatgcaaagtttgtgaagccggcatttgatgacttcgtgctcccttcaaagaaatatgctgacgtgatcattcctcgaggaggtgataatcacgttgcagtcgatttgattacgcaacatatccacacaaaacttgggcagcatgatctctgcaaaatctacccaaatgtttatgttatccagtcaacatttcagataagaggcatgcatacacttattcgggaaaaggacatatcaaagcatgactttgtgttttattcagatagactcattcgtctggtcgtggagcatggtcttggtcatttgccattcactgagaaacaagtagttactccaacaggagctgtatataccggtgttgatttctgcaagaaactttgtggggtctcaattattagaagtggtgaaagcatggaaaatgcattacgcgcttgctgcaaaggaattaaaatagggaagattctcatccaccgtgatggcgataatggaaaacagcttatttatgagaagcttcctcacgacatatctgaacgccatgtcctgcttctagatcctgtcttagccacaggtaactcggctaatcaagccattgaactactcatacagaaaggtgttcctgaagctcacattatattcctcaaccttatatcggcgccggagggaatccactgtgtctgcaaacgttttccagcattgaaaattgtgacgtctgaaatagaccaatgtctgaaccaagaattcagagttataccgggcttaggcgagtttggcgatcgttacttcggcaccgacgaggaagaccagtag

SEQ ID NO: 8952 - protein, 486 aa, Arabidopsis thaliana
MPEDSSSLDYAMEKASGPHFSGLRFDGLLSSSPPNSSVVSSLRSAVSSSSPSSSDPEAPKQPFIIGVSGGTASGKTTVCDMIIQQLHDHRVVLVNQDSFYRGLTSEELQRVQEYNFDHPDAFDTEQLLHCAETLKSGQPYQVPIYDFKTHQRRSDTFRQVNASDVIILEGILVFHDSRVRNLMNMKIFVDTDADVRLARRIRRDTVERGRDVNSVLEQYAKFVKPAFDDFVLPSKKYADVIIPRGGDNHVAVDLITQHIHTKLGQHDLCKIYPNVYVIQSTFQIRGMHTLIREKDISKHDFVFYSDRLIRLVVEHGLGHLPFTEKQVVTPTGAVYTGVDFCKKLCGVSIIRSGESMENALRACCKGIKIGKILIHRDGDNGKQLIYEKLPHDISERHVLLLDPVLATGNSANQAIELLIQKGVPEAHIIFLNLISAPEGIHCVCKRFPALKIVTSEIDQCLNQEFRVIPGLGEFGDRYFGTDEEDQ

SEQ ID NO: 8953 - DNA, 1365 bp, Schizosaccharomyces pombe 972h-
  CDS (1)..(1365)
atgcctgaagcttttgagcgttattcaagcaacccaacttatgaacccccatggcgtaaagtgcgatttattggaattgcaggaccatcgggtagtgggaaaacctcggtggcccaattgattgtaaaggcgttaaatcttccacatgttgttattttatcccttgactcgttttacaaatctttgaatgcagagcagaagaagagagcatttaacaacgactatgactttgattcccccgaagccattgattgggacttgctcttcgtaaaactgctagaacttaaacaaggccgtaaagttgacattcctatatatagcttcaatgagcataatcggcttcctgagaccaacacgttattcggagcaagtatcattattctcgaagggatttttgctttatacgatgaaaagattcgctctctccttgacgtctcggtctttctagatacagattcggacgtgtgtctctctcgtcgactgaatcgcgatatcaactatcgaggaagggacatagttggcgttttggaacaatataataaatttgtcaagccaagttatgagaacttcgttaggcgtcaactatcttacactgatcttatcgttcctcgtggccgggacaataaattggcaattgatatggtgattaattttattcgtagaacactttctatacaaagtgaaactcatgttaagaacattgatagtttacagcaaattgtaccaaccattccccatttacccttaaatttagttcagcttaaaattacgcctgaaatatctgccatcaggactattcttataaacaaaaatacacaccctgatgatttacaattttttttgagcagaattggcaccatgttgatgaatttggcaggtgattcgcttgcatatgaaaagaaaacgattactttgcataacggaaaccagtgggaaggtctacaaatggcaaaagagctttgtggtgtttcagttttgcgatccggcggaactcttgaaacagctttatgtcgtcaatttccaacagtgtgtttgggtaagattttggtgcaaatcaataaagttactcaagaaccaactttacattaccataaattgccccgtggcattgctaccatgaatgttgttttgatggcttcacatttaactacacatgcagatgtcttaatggccacgcaaattttagtggatttcggggtcccagaggaaaacattataattgtggtctatgtttgttactctgaaagtattaaagcgctggcttatattttcccaaaggttaccattgttacagcatttctagaaagtgttgctgaacccgtagtcggtagattggatatcgaaaaagtgtattatggatgctga

SEQ ID NO: 8954 - protein, 454 aa, Schizosaccharomyces pombe 972h-
MPEAFERYSSNPTYEPPWRKVRFIGIAGPSGSGKTSVAQLIVKALNLPHVVILSLDSFYKSLNAEQKKRAFNNDYDFDSPEAIDWDLLFVKLLELKQGRKVDIPIYSFNEHNRLPETNTLFGASIIILEGIFALYDEKIRSLLDVSVFLDTDSDVCLSRRLNRDINYRGRDIVGVLEQYNKFVKPSYENFVRRQLSYTDLIVPRGRDNKLAIDMVINFIRRTLSIQSETHVKNIDSLQQIVPTIPHLPLNLVQLKITPEISAIRTILINKNTHPDDLQFFLSRIGTMLMNLAGDSLAYEKKTITLHNGNQWEGLQMAKELCGVSVLRSGGTLETALCRQFPTVCLGKILVQINKVTQEPTLHYHKLPRGIATMNVVLMASHLTTHADVLMATQILVDFGVPEENIIIVVYVCYSESIKALAYIFPKVTIVTAFLESVAEPVVGRLDIEKVYYGC

SEQ ID NO: 8955 - DNA, 1686 bp, Drosophila melanogaster
  CDS (1)..(1686)
atgtctgtgacccagacgaaacaaatcaagttctacaacccatcgagttccgctagctccgacagcgatgaccgttcactctcggatgtcacagagcaactctatgtggatccgtatgccgacctaagcaatggcttgcccggggatctcaactgctgtccggcctcgcccaccacagtgcctgctaaagcatcgttggattcgcctcttaaacgttccggtaggagacagcgaaccacatccattggcaaccagaccaccacagcgaatccgtccgaatgcatcatacgcgcaaataaccgcacgatctacacggccggacgaccgccgtggtacaattgtgctgggcaacaggtggagcccttcgtcataggaatctgcggcggtagtgcctctggcaagaccacagtggctgagaaaatcatcgaaagcctagacgttccatgggtaacactgttgtccatggactgtttctacaagatccttaatgagaaacagcatgagcaggccctgatcaacgaatataacttcgatcacccggatgccttcgacatcgagctgctgctggacgtgctcaccaagctgaaggagggccgaaaggtggaagttcctgtctataattttgtgacacatggtcgtgagagccaaacgaaaaccatgtacggggccaatgtgatcatcttcgagggtattcttacctttcatagtcctgaagtacttaaattgctagacatgaagatatttgtggacacagatcccgatattcgtctggccaggcggttaagaagggacatctctcagcgcggacgagacctcaagggcgtgctgaagcaataccttaatatggttaagccctcctattgcaattacatagctccaacaatggcccatgcagatatcattgttcctcgtggaggcgacaacaaggtggccatccatctcattgttcagcacgtgcacacacagctgcaactgcgcggatttaagctgcgcgaaactctggccaactcctacaaggaccagccaatgccacattctctgcacttgctgcatcccacgccccaaataaagggcctgcacacgttcatccgttgccgaaatacgtcccgcgatgagtttattttttactcaaagcgcctgatacggctagtcattgaatatgcgctaagcttatttccctttaagaaaacaacagtggagactccacaaggtgtcctttacgagggcaagcgtatggaatcgcgaaaaatatgcggcgtctcaattctccgagctggtgaaacaatggaacaagccgtttgtgatgtgtgcaaggacattcgcatcggaaagatcctcatccagaccaatcttaagaccggcgagccggagctttactacctgaggctgcctaaagacataaaagactacaaggtgatactaatggatgccaccgtggccacaggagcagcggccatgatggccattcgggtgctgctggatcacgatgtacccgaggacaacattatcttggcctcgcttttgatggctgagatcggtgtgcactccattgcctatgccttcccaaaggtgaaaattgttacttccgctctggatccggagattaatagtaagttttatgttatacccggcattggtaactttggcgatcgctactttggcacggaaccctctgatgagtactaa

SEQ ID NO: 8956 - protein, 561 aa, Drosophila melanogaster
MSVTQTKQIKFYNPSSSASSDSDDRSLSDVTEQLYVDPYADLSNGLPGDLNCCPASPTTVPAKASLDSPLKRSGRRQRTTSIGNQTTTANPSECIIRANNRTIYTAGRPPWYNCAGQQVEPFVIGICGGSASGKTTVAEKIIESLDVPWVTLLSMDCFYKILNEKQHEQALINEYNFDHPDAFDIELLLDVLTKLKEGRKVEVPVYNFVTHGRESQTKTMYGANVIIFEGILTFHSPEVLKLLDMKIFVDTDPDIRLARRLRRDISQRGRDLKGVLKQYLNMVKPSYCNYIAPTMAHADIIVPRGGDNKVAIHLIVQHVHTQLQLRGFKLRETLANSYKDQPMPHSLHLLHPTPQIKGLHTFIRCRNTSRDEFIFYSKRLIRLVIEYALSLFPFKKTTVETPQGVLYEGKRMESRKICGVSILRAGETMEQAVCDVCKDIRIGKILIQTNLKTGEPELYYLRLPKDIKDYKVILMDATVATGAAAMMAIRVLLDHDVPEDNIILASLLMAEIGVHSIAYAFPKVKIVTSALDPEINSKFYVIPGIGNFGDRYFGTEPSDEY

SEQ ID NO: 8957 - DNA, 681 bp, Yersinia pestis KIM
  CDS (1)..(681): transl_table=11
ttgtctcccttcacacttcgtaatcaggtctttaattttatgactgacaaagcacatcagtgcgtcattattgggatagcgggtgcttctgcctccggaaaaagtcttatcgccagcacgttgtatcgcgaattacgtgaacaagtaggcgaccaacatattggtgttattcctgaagatggttattacaaagaccagagccatctgtcaatggaagagcgggtcaaaacgaactacgaccacccaagcgccatggaccacaatttattgttggaacatttgcaggcgttgaaggcgggtaagcccgttgaattgcctctgtacagctatactgagcacacacgtaaaaaagaaacggttcatttagaacctaaaaaagtgatcattcttgaaggtatactgctgctgacggatatccgcttacggcaggaaatgaacttctcaatcttcgttgataccccattggatatctgcctgatgcgcagaatgaagcgtgatgtcaatgagcgtggccgttcgatggactctgttatggcccaatatcagaaaacagtccgtcctatgtttctgcaatttatagaaccatctaagcaatatgctgacattatcgttcctcgtggcggtaaaaatagaattgcgatcgatattctaaaagcgaaaatcagtcagttctttgagtaa

SEQ ID NO: 8958 - protein, 226 aa, Yersinia pestis KIM
MSPFTLRNQVFNFMTDKAHQCVIIGIAGASASGKSLIASTLYRELREQVGDQHIGVIPEDGYYKDQSHLSMEERVKTNYDHPSAMDHNLLLEHLQALKAGKPVELPLYSYTEHTRKKETVHLEPKKVIILEGILLLTDIRLRQEMNFSIFVDTPLDICLMRRMKRDVNERGRSMDSVMAQYQKTVRPMFLQFIEPSKQYADIIVPRGGKNRIAIDILKAKISQFFE

SEQ ID NO: 8959 - DNA, 1881 bp, Drosophila melanogaster
  CDS (1)..(1881)
atgagcagcatcacgtttttgtgcagcaagtcgggccacaacaccaacaacaacagcattaatagtagcaataacgatgttccaaaaggggcaaaagcgaactcagcatttgcagccgcatccgccggtttactaaccatcgcaaaccaccagcagcaacagctacttcagcaaccacatcaacagcagcagcaacaacaacaacagcatcatcagcagtcaaaggttaaggctatagcagccaaaaccaatggtcacatcgatgaccgttcactctcggatgtcacagagcaactctatgtggatccgtatgccgacctaagcaatggcttgcccggggatctcaactgctgtccggcctcgcccaccacagtgcctgctaaagcatcgttggattcgcctcttaaacgttccggtaggagacagcgaaccacatccattggcaaccagaccaccacagcgaatccgtccgaatgcatcatacgcgcaaataaccgcacgatctacacggccggacgaccgccgtggtacaattgtgctgggcaacaggtggagcccttcgtcataggaatctgcggcggtagtgcctctggcaagaccacagtggctgagaaaatcatcgaaagcctagacgttccatgggtaacactgttgtccatggactgtttctacaagatccttaatgagaaacagcatgagcaggccctgatcaacgaatataacttcgatcacccggatgccttcgacatcgagctgctgctggacgtgctcaccaagctgaaggagggccgaaaggtggaagttcctgtctataattttgtgacacatggtcgtgagagccaaacgaaaaccatgtacggggccaatgtgatcatcttcgagggtattcttacctttcatagtcctgaagtacttaaattgctagacatgaagatatttgtggacacagatcccgatattcgtctggccaggcggttaagaagggacatctctcagcgcggacgagacctcaagggcgtgctgaagcaataccttaatatggttaagccctcctattgcaattacatagctccaacaatggcccatgcagatatcattgttcctcgtggaggcgacaacaaggtggccatccatctcattgttcagcacgtgcacacacagctgcaactgcgcggatttaagctgcgcgaaactctggccaactcctacaaggaccagccaatgccacattctctgcacttgctgcatcccacgccccaaataaagggcctgcacacgttcatccgttgccgaaatacgtcccgcgatgagtttattttttactcaaagcgcctgatacggctagtcattgaatatgcgctaagcttatttccctttaagaaaacaacagtggagactccacaaggtgtcctttacgagggcaagcgtatggaatcgcgaaaaatatgcggcgtctcaattctccgagctggtgaaacaatggaacaagccgtttgtgatgtgtgcaaggacattcgcatcggaaagatcctcatccagaccaatcttaagaccggcgagccggagctttactacctgaggctgcctaaagacataaaagactacaaggtgatactaatggatgccaccgtggccacaggagcagcggccatgatggccattcgggtgctgctggatcacgatgtacccgaggacaacattatcttggcctcgcttttgatggctgagatcggtgtgcactccattgcctatgccttcccaaaggtgaaaattgttacttccgctctggatccggagattaatagtaagttttatgttatacccggcattggtaactttggcgatcgctactttggcacggaaccctctgatgagtactaa

SEQ ID NO: 8960 - protein, 626 aa, Drosophila melanogaster
MSSITFLCSKSGHNTNNNSINSSNNDVPKGAKANSAFAAASAGLLTIANHQQQQLLQQPHQQQQQQQQQHHQQSKVKAIAAKTNGHIDDRSLSDVTEQLYVDPYADLSNGLPGDLNCCPASPTTVPAKASLDSPLKRSGRRQRTTSIGNQTTTANPSECIIRANNRTIYTAGRPPWYNCAGQQVEPFVIGICGGSASGKTTVAEKIIESLDVPWVTLLSMDCFYKILNEKQHEQALINEYNFDHPDAFDIELLLDVLTKLKEGRKVEVPVYNFVTHGRESQTKTMYGANVIIFEGILTFHSPEVLKLLDMKIFVDTDPDIRLARRLRRDISQRGRDLKGVLKQYLNMVKPSYCNYIAPTMAHADIIVPRGGDNKVAIHLIVQHVHTQLQLRGFKLRETLANSYKDQPMPHSLHLLHPTPQIKGLHTFIRCRNTSRDEFIFYSKRLIRLVIEYALSLFPFKKTTVETPQGVLYEGKRMESRKICGVSILRAGETMEQAVCDVCKDIRIGKILIQTNLKTGEPELYYLRLPKDIKDYKVILMDATVATGAAAMMAIRVLLDHDVPEDNIILASLLMAEIGVHSIAYAFPKVKIVTSALDPEINSKFYVIPGIGNFGDRYFGTEPSDEY

SEQ ID NO: 8961 - DNA, 705 bp, Escherichia coli CFT073
  CDS (1)..(705): transl_table=11
ttgccgcgtttggcgcttcgtcgcccccttcctaacatccaggttaatcaggtcgctaaatatatgactgatcagtctcatcagtgcgtcattatcggtatcgctggcgcatcggcttccggcaagagtcttattgccagtaccctttatcgtgaattacgtgagcaagtcggtgatgaacacatcggcgtaattcccgaagactgctattacaaagatcaaagccatctgtcgatggaagaacgcgttaagaccaactacgaccatcccagcgcgatggatcacagcctgctgcttgagcatttacaagcgttgaaacgcggctcggcaattgacctgccggtttacagctatgttgaacatacgcgtatgaaagaaacggtgacggttgagccgaagaaggtcatcattctcgaaggcattttgttgctgacggatgcgcgtttacgtgacgaacttaacttctccattttcgttgataccccgctggatatctgcctgatgcgccgcatcaagcgtgacgttaacgagcgtgggcgttcaatggattcagtgatggcgcaatatcaaaaaaccgtgcgcccgatgtttctgcaattcattgagccttctaaacaatatgcggacattatcgtgccgcgcggcgggaaaaaccgcatcgcgatcgatatattgaaagcgaaaataagtcagttctttgaataa

SEQ ID NO: 8962 - protein, 234 aa, Escherichia coli CFT073
MPRLALRRPLPNIQVNQVAKYMTDQSHQCVIIGIAGASASGKSLIASTLYRELREQVGDEHIGVIPEDCYYKDQSHLSMEERVKTNYDHPSAMDHSLLLEHLQALKRGSAIDLPVYSYVEHTRMKETVTVEPKKVIILEGILLLTDARLRDELNFSIFVDTPLDICLMRRIKRDVNERGRSMDSVMAQYQKTVRPMFLQFIEPSKQYADIIVPRGGKNRIAIDILKAKISQFFE

SEQ ID NO: 8963 - DNA, 618 bp, Bacteroides thetaiotaomicron VPI-5482
  CDS (1)..(618): transl_table=11
atgttaataataggaatagcaggtggaacgggctccggaaaaaccaccgtcgtacgaaaaatgatagaaagcctccccgttggagaagtagtactattacctcaggattcatactacaaagacagtagtcacgtgccggttgaagaacgtcagaatatcaactttgaccatccggatgcttttgaatggagcttgctttccaaacatgtgatgatgctgaaagaaggaaaaagcatcgagcagccgacctattcttatctgacttgtacccgccaaccggaaaccatccacatcgagcctcgtgaagtcgtcattattgaaggtatccttgccttgtgcgacaagaagctacgcaatatgatggatctaaagatatttgtagatgccgatcccgatgaacgcctgatacgtgtcatccaaagggatgtcatcgaaagaggacggacagcggaagctgtcatggaacgctatacccgtgttctgaaaccgatgcacctgcaattcatagaaccctgcaaacgctatgcggaccttatcgttccagaaggcggcagcaatgcagtagctatcgatatattaacaatgtatatcaagaaacatttgaaaaatgaagaatga

SEQ ID NO: 8964 - protein, 205 aa, Bacteroides thetaiotaomicron VPI-5482
MLIIGIAGGTGSGKTTVVRKMIESLPVGEVVLLPQDSYYKDSSHVPVEERQNINFDHPDAFEWSLLSKHVMMLKEGKSIEQPTYSYLTCTRQPETIHIEPREVVIIEGILALCDKKLRNMMDLKIFVDADPDERLIRVIQRDVIERGRTAEAVMERYTRVLKPMHLQFIEPCKRYADLIVPEGGSNAVAIDILTMYIKKHLKNEE

SEQ ID NO: 8965 - DNA, 630 bp, Enterococcus faecalis V583
  CDS (1)..(630): transl_table=11
atgaaagatagtcagccaattatcattggtgttactggcggatcaggaagcggaaaaaccagtgttagccgtgcgatttttaataattttcccgatcattcaattatgatgttagaacaggattcttattataaagatcagagccatttgagttttgaagaacgtttaaataccaattatgatcatccttttgcgtttgatacagatttattgattcaacatgttgaacaactgttaaattatcaagccattgaaaagccagtttatgactacgttgcgcatacaagaagtacagaaacggtgatacaagaaccgaaagaagtaattattcttgaagggattttaattttagaagatcgccgcttaagggatttaatggatattaaagtgtatgtggatacagatgatgacatccgtattattcgtcgaatcaagcgtgatatggaagaacgtggccgtacgttggattctgtgattgaacaatatttgacagtcgtcaagcccatgtatcaccaatttattgaacctacgaaacgttatgcagatatcattgtgccagaaggtggcgaaaaccacgtcgctattgatttaattaatacaaaagtggatagtattttaacaaaaatgtaa

SEQ ID NO: 8966 - protein, 209 aa, Enterococcus faecalis V583
MKDSQPIIIGVTGGSGSGKTSVSRAIFNNFPDHSIMMLEQDSYYKDQSHLSFEERLNTNYDHPFAFDTDLLIQHVEQLLNYQAIEKPVYDYVAHTRSTETVIQEPKEVIILEGILILEDRRLRDLMDIKVYVDTDDDIRIIRRIKRDMEERGRTLDSVIEQYLTVVKPMYHQFIEPTKRYADIIVPEGGENHVAIDLINTKVDSILTKM

SEQ ID NO: 8967 - DNA, 648 bp, Coxiella burnetii RSA 493
  CDS (1)..(648): transl_table=11
atgaaaaataatgtcattattattggtatctctggaccttctgcttcggggaaaagcttgttagcgaataccatcgttaatgaactcggctctgatcaagtcgtcgttatttcagaagattcttattataaagatttaggagatatgccttttgaagagcgagcaaaaatcaattacgaccaccccgactctcttgaccatgaactattgtatcaacatttattacaactgcagcaaggcaatgccatcgcggtgccttgttacgatcacagccggcacaggcgattggaaaaaacaaaaaccgtaggtcggcatcgcattattgttttggaaggtattttattattcgtagaggctcaattgcgtgaaattatggatattcgaatattcatggacactccattagatatttgtctattgcggcgattgcaaagggatatcgtcgagcgagaacgctcgttggaaggcgtgctcacccaataccaagaaacggttcgacccatgtatttgcaatttacggaaccttccaaacgctacgccgatattatcgtgccgcggggcggcgagaaccgaattgctatcgaaatgattcaagccaaaatgcgggagctgttaggcgtcaatggggccttgaaaaggcacgcctga

SEQ ID NO: 8968 - protein, 215 aa, Coxiella burnetii RSA 493
MKNNVIIIGISGPSASGKSLLANTIVNELGSDQVVVISEDSYYKDLGDMPFEERAKINYDHPDSLDHELLYQHLLQLQQGNAIAVPCYDHSRHRRLEKTKTVGRHRIIVLEGILLFVEAQLREIMDIRIFMDTPLDICLLRRLQRDIVERERSLEGVLTQYQETVRPMYLQFTEPSKRYADIIVPRGGENRIAIEMIQAKMRELLGVNGALKRHA

SEQ ID NO: 8969 - DNA, 639 bp, Bacillus cereus ATCC 14579
  CDS (1)..(639): transl_table=11
atggggacgaataagcctgttgtaattggaattgctggtggttcgggatcaggtaaaacgagtgtaacgaaagcgatttttgaccattttaaaggtcattctattttaatcttagagcaagattattattacaaagatcaaagccatttaccaatggaagagcgtttaaaaacaaattatgatcatccgcttgcgtttgataatgatctgttaattgaacatttgcagcagttgcttgcatatgagcaaattgataagcctgtatatgactatacattgcatacgcgttcagaagaaattattccagttgagccgaaagatgtaattattttagaaggaattcttattttagaagacccacgtctttgcgagttaatggacattaaattattcgttgatacggatgctgaccttcgtattctgcgccgcatgcagcgtgatattaaagagcgcggtcgtacgatggattcagttattgatcagtacgtaaatgttgtacgtccaatgcacaatcaatttattgagccttctaagaaatttgcggatattattatccctgaaggtggacaaaaccacgttgcaattgatattatggtgacaaaaattgcaacaattcttgaacaaaaagtaaatttgtaa

SEQ ID NO: 8970 - protein, 212 aa, Bacillus cereus ATCC 14579
MGTNKPVVIGIAGGSGSGKTSVTKAIFDHFKGHSILILEQDYYYKDQSHLPMEERLKTNYDHPLAFDNDLLIEHLQQLLAYEQIDKPVYDYTLHTRSEEIIPVEPKDVIILEGILILEDPRLCELMDIKLFVDTDADLRILRRMQRDIKERGRTMDSVIDQYVNVVRPMHNQFIEPSKKFADIIIPEGGQNHVAIDIMVTKIATILEQKVNL

SEQ ID NO: 8971 - DNA, 645 bp, Mycoplasma gallisepticum R
  CDS (1)..(645): transl_table=4
atgaaaaacgtgcagccaatgatcattgcaatagctggtggtagcggttctggtaaaacaacaatcacccaatcaattattgccaagattaaaagtgataccaacctaaaagtggcaactgtttgtttagataattattataaaccgtttagtgatctaaatcttgaagctagaaaaaagctgaactatgatgatcccaatagttttgactttgatcaagtttattatgatctgttagctttaagcaataaccaaacaatcaagatgccaatctatgattataaaaactacactagatcagatcagtttactgagattgatccatctgatgtaatcttatatgaagggatcttatctttatatgattcaaggatcttggatctatcaaaatttaagttatttattgataccccttcagatgaacgattagctagacggatcgaacgtgactgtttagagcgtgctagagatatcaaacaagtcttaaaccaatgacgttcacaagtcagagtaatgcatcgtaaatacgtgcaaaaacaaaaagagggcgctaatctcatcttaccttggtacaccttaaaccacgaggggatgagtattattcaaaacgcaattattaagatcgcacaaggcaatgaattttaa

SEQ ID NO: 8972 - protein, 214 aa, Mycoplasma gallisepticum R
MKNVQPMIIAIAGGSGSGKTTITQSIIAKIKSDTNLKVATVCLDNYYKPFSDLNLEARKKLNYDDPNSFDFDQVYYDLLALSNNQTIKMPIYDYKNYTRSDQFTEIDPSDVILYEGILSLYDSRILDLSKFKLFIDTPSDERLARRIERDCLERARDIKQVLNQWRSQVRVMHRKYVQKQKEGANLILPWYTLNHEGMSIIQNAIIKIAQGNEF

SEQ ID NO: 8973 - DNA, 615 bp, Chromobacterium violaceum ATCC 12472
  CDS (1)..(615): transl_table=11
atgagcaccccgttcatcattggcgttgccggcggcagcggcagcggtaaaaccacggtaaccaacaaggtgctggaaaccattggttccgagatggcggcggtgatcatccaggactactactatcgcgaccagagccacctgaccttcgagcagcgcctgggcaccaactacgaccacccgcaggccttcgactggccgctcttgatctcccacatcgacgacctgcgcaacggccgcgcgatcgagatgccggtgtacgacttcgccaaccacacccgttccgaccagaccgtcaccgtgcagcccgcgccggtgatcgtgatcgagggcctgttcccgctgtacgacgccgccttgcgcgagatgatgtcgctgaagatcttcgtcgacactgactccgacgtccgcttcatccgccgcctcaagcgcgacatcgccgagcgcggccgcacgatggagagcgtgatcgagcaatacctgtccaccgtgcgcccgatgcacaaccagttcatcgagccgaccaagcgcttcgccgacgtgatcctgccgcacggcgccaacgatccggcggtggacatcatcaccaccaaggtcgccagtctgatggtgtga

SEQ ID NO: 8974 - protein, 204 aa, Chromobacterium violaceum ATCC 12472
MSTPFIIGVAGGSGSGKTTVTNKVLETIGSEMAAVIIQDYYYRDQSHLTFEQRLGTNYDHPQAFDWPLLISHIDDLRNGRAIEMPVYDFANHTRSDQTVTVQPAPVIVIEGLFPLYDAALREMMSLKIFVDTDSDVRFIRRLKRDIAERGRTMESVIEQYLSTVRPMHNQFIEPTKRFADVILPHGANDPAVDIITTKVASLMV

SEQ ID NO: 8975 - DNA, 630 bp, Porphyromonas gingivalis W83
  CDS (1)..(630): transl_table=11
atggtaatgaatacaacgataataggagtagcaggcggaagtgcttccggcaagagtacattggtgaaaaagctctgtgaggctttcgtcgaagaagatgtgcttgtactctgtcacgattactattacaaggccaatgaccacctctcccttgaggaaagaaagaagctgaactacgaccatcccaatgctttcgacacggatatgttcgtcagggatattctctctctgaaggcaggcaaaacgatagagcgtccggtctattctttcgtagagcacaatcgtttgcaagaaaaagtaaccgttcgtcctgccaaagtgatcgtactggatggaatcctgatattcgagaacaaagagctgcgggatctgatgaatgtgaaagtattcgtcgataccgatgcggatattcgattggcgcgccgccttgtgcgcgatgtccaggaacggggacgcaatatggattcggtattggcacaatacttcagtacggttcggcctatgcacgaggattttgtggaaccatccaagcggtacgccgatctgatcattccggaaggtggattcaattcggtggcgctctcactccttgtcgaaaaaatccgatcggtgattcgtaaggaagaataa

SEQ ID NO: 8976 - protein, 209 aa, Porphyromonas gingivalis W83
MVMNTTIIGVAGGSASGKSTLVKKLCEAFVEEDVLVLCHDYYYKANDHLSLEERKKLNYDHPNAFDTDMFVRDILSLKAGKTIERPVYSFVEHNRLQEKVTVRPAKVIVLDGILIFENKELRDLMNVKVFVDTDADIRLARRLVRDVQERGRNMDSVLAQYFSTVRPMHEDFVEPSKRYADLIIPEGGFNSVALSLLVEKIRSVIRKEE

SEQ ID NO: 8977 - DNA, 642 bp, Photorhabdus luminescens subsp. laumondii TTO1
  CDS (1)..(642): transl_table=11
atggctgacgaagcatatcagtgcacaattgtaggaatttctggtgcatctgcctcaggtaaaagtctcattgctaatacactttatcgtgaattacgcgctcaggttggtgatcacaatatcggtattatacccgaggattgctattataaagatcagagcgatctatcaatggaagagcgttataagactaattatgaccatccaagctcaatggatcacaatctgctcttttctcacctacaagcgctgaaaatgggtgaatcaattgaattaccacaatacgattatgttgctcatactcgtaaaccagaagcgattcattttgcaccgaaaagggttattattctggaaggtattctattattgaccgataagcgcttgcgccaggagatggacttctctatttttgttgatacgccactggatatttgccttatgcgtcgtattaagcgggatgtgcatgaacgggggcgttctctggattcggtgattgagcaatatcataaaactgtgcgtccaatgttcctgcaatttattgaaccatcaaagcaatatgcagatattattgtgccgcgcgggggtaaaaaccgagtagcaattgatatattgaaagccaaaattggtcagttctgcgaataa

SEQ ID NO: 8978 - protein, 213 aa, Photorhabdus luminescens subsp. laumondii TTO1
MADEAYQCTIVGISGASASGKSLIANTLYRELRAQVGDHNIGIIPEDCYYKDQSDLSMEERYKTNYDHPSSMDHNLLFSHLQALKMGESIELPQYDYVAHTRKPEAIHFAPKRVIILEGILLLTDKRLRQEMDFSIFVDTPLDICLMRRIKRDVHERGRSLDSVIEQYHKTVRPMFLQFIEPSKQYADIIVPRGGKNRVAIDILKAKIGQFCE

SEQ ID NO: 8979 - DNA, 651 bp, Vibrio vulnificus YJ016
  CDS (1)..(651): transl_table=11
gtgcaactaatgtctgaaaaaagtcaatgcgtcatcgtcggtattgctggcgcttctgcttctggtaaaagcctcatcgccagtacgatttataacgaactacgtgcaaaggtgggagaccatcaaatcggtgtgattacggaagattgctactataacgaccaaagccatctgagtatggaagagcgcgttaaaacgaactatgaccacccaaatgcacttgatcacgatcttctttgtgaacacttagaaaagttaatgaaaggcgagtcggttgaagtacctgaatacagctacacggagcacactcgtactgaaaacaccaccactatgacaccaaagaaggtgatcattcttgaaggcatcctgcttctgacggatcctcgtctgcgtgatttgatgcatgcgacagtgtttatggacacgccactggatatctgtctacttcgccgtgtgaaacgcgatgtggaagagcgtggtcgtacgatggaatcggtactcaaacagtatcaaaaaacagttcgcccaatgtttatgcagtttattgaaccgtctaaacagtacgcagatatcatcgttcctcgtggtggtaaaaaccgcatcgcgattgacgtactgaaagcgcacattgcaaaactattgaaagcttaa

SEQ ID NO: 8980 - protein, 216 aa, Vibrio vulnificus YJ016
MQLMSEKSQCVIVGIAGASASGKSLIASTIYNELRAKVGDHQIGVITEDCYYNDQSHLSMEERVKTNYDHPNALDHDLLCEHLEKLMKGESVEVPEYSYTEHTRTENTTTMTPKKVIILEGILLLTDPRLRDLMHATVFMDTPLDICLLRRVKRDVEERGRTMESVLKQYQKTVRPMFMQFIEPSKQYADIIVPRGGKNRIAIDVLKAHIAKLLKA

SEQ ID NO: 8981 - DNA, 636 bp, Lactobacillus johnsonii NCC 533
  CDS (1)..(636): transl_table=11
gtgcaaagtaaacgccctattatcattggaattgctggtggttctggtagtggtaaaacaaccatcgctcatgaaatttatgaccaattacaacaagacgaccatatcttaattatgacgcaagattcttactacaagaacaacgacaacttatcaatggcagaccgtaaaaaaatcaactacgaccatcctgatgcctttgacatgccccttcttgttgaacaattacgtcaattaatggactataaggcagttgaaatgccagtttatgactttaccgctcatacaagaagtgaaaagacaattcacactgaaccggctgatattattatcttagaaggtatcctagttttaggcgaagaaaatttacgtgatttaatgagtattaaagtctttgtagatactgatgatgatattcgttttatcagaagattagagcgtgatacacaagaacgtggacgttctgtagaatcagtaattaatcaatacttagcaacggttaagcccatgtataatcaattcattgaaccaactaagcgttatgctgatatcattgttccagaaggtggagaaaatgatgttgctatcgatatgcttactacgaagattcgttcagttttaagtacagtcaaataa

SEQ ID NO: 8982 - protein, 211 aa, Lactobacillus johnsonii NCC 533
MQSKRPIIIGIAGGSGSGKTTIAHEIYDQLQQDDHILIMTQDSYYKNNDNLSMADRKKINYDHPDAFDMPLLVEQLRQLMDYKAVEMPVYDFTAHTRSEKTIHTEPADIIILEGILVLGEENLRDLMSIKVFVDTDDDIRFIRRLERDTQERGRSVESVINQYLATVKPMYNQFIEPTKRYADIIVPEGGENDVAIDMLTTKIRSVLSTVK

SEQ ID NO: 8983 - DNA, 624 bp, Bdellovibrio bacteriovorus HD100
  CDS (1)..(624): transl_table=11
atgagccgtccccacattatcggagtcgctggcggcagcggctctggcaaaacatacttcgccaaagaactgcaaaagatgctgggttcagaaaactgcagcatcctttatcaggacaattactatatcgaccagtccgctcgctttgatggagatgggggctcggtgaactttgatcatccccaggccttggatttcacgctactcgcacgcgggcttcagacccttaaaatgggtcagccgctgcaggtgccaatttacgactttgtcacccactcgcgtaaaacggaaacccttctggaaaaccctaaaaaagtcattatcgtggatgggatcttgatcctgcattcaaaagaagttcgagccgagctggatgaagccgtcttttttgacacccccgaagacctgcgctttcaacgccgtctgcaccgcgatgtgcatgaacgcgggcgcaccccagagggagtaaaaaagcagtttgaacttcaggttcgtcccatgcatgacgaatttgtggagccttcaaaacgtcatgcccaaaccatagtgacggactcaggggactatcatgcggtactttcacaattcacccatcgcctgcaaaacaccctgcccgtgcggtaa

SEQ ID NO: 8984 - protein, 207 aa, Bdellovibrio bacteriovorus HD100
MSRPHIIGVAGGSGSGKTYFAKELQKMLGSENCSILYQDNYYIDQSARFDGDGGSVNFDHPQALDFTLLARGLQTLKMGQPLQVPIYDFVTHSRKTETLLENPKKVIIVDGILILHSKEVRAELDEAVFFDTPEDLRFQRRLHRDVHERGRTPEGVKKQFELQVRPMHDEFVEPSKRHAQTIVTDSGDYHAVLSQFTHRLQNTLPVR

SEQ ID NO: 8985 - DNA, 621 bp, Bdellovibrio bacteriovorus HD100
  CDS (1)..(621): transl_table=11
atgcaaagacctcacatcatcggtgttgctggtggcagtggctccggcaaaacacacttcgccaaagagctgcaacaactgctgggcgaagacaactgctccatcatctaccaggacaactactacatcgaccaatccgcaaaatttgacggcgatggcggttcggtgaactttgatcatccctccagtcttgatttcactttgctcgcacagggcttgcgtgccctgaagtccggccaaagcctgaacatcccgatttatgattttgtcactcattcccgcaaaaaagagacccttccaggcgaacccaaaaaagtcattatcatcgacggaatcctgatcctacactctgaagaagtccgccaggaactggatgaggccatcttctttgacacccccgaatccctgcgctttgagcgccgtctgaaacgtgatgttcacgaacgcggcagaacgccagagggagtgcgcaagcagtttgaactgcaagtgcgccccatgcacaatcagtttgtcgagccctccaaagaccacgctcacaccatcatcaaggatctgggcgactacagccaggccctgaaacagtatcagcagaaactttcaaaagccttcctgcagtaa

SEQ ID NO: 8986 - protein, 206 aa, Bdellovibrio bacteriovorus HD100
MQRPHIIGVAGGSGSGKTHFAKELQQLLGEDNCSIIYQDNYYIDQSAKFDGDGGSVNFDHPSSLDFTLLAQGLRALKSGQSLNIPIYDFVTHSRKKETLPGEPKKVIIIDGILILHSEEVRQELDEAIFFDTPESLRFERRLKRDVHERGRTPEGVRKQFELQVRPMHNQFVEPSKDHAHTIIKDLGDYSQALKQYQQKLSKAFLQ

SEQ ID NO: 8987 - DNA, 1386 bp, Arabidopsis thaliana
  CDS (1)..(1386)
atggcttcaaagtcggatgtgaatataatagagacatcctcaaaggttcatttctcaggatttcatcaaatggatggtttagcttcaaatagaccagagcaaatggctgaggaagaagaacatggtcaaccttttgtgatcggagttgctggaggtgcagcatccgggaaaacaactgtctgtgatatgattatgcagcaactgcatgatcagagagctgttgttgtaaatcaggattctttctaccataatgtaaatgaagtggagcttgtaagagttcatgattacaattttgaccatcctgacgctttcgatactgagcaattattgtcttccatggagaagttaagaaaaggacaagcagtagatattcctaattatgacttcaaaagttacaagaacaatgtttttccacctagaagggtgaatccttctgacgttataattctggaaggtatactcattttccatgaccctcgggtgcgagatttgatgaacatgaagatatttgtagacgcagatgccgatgtgcgtctagcgagaaggataaaacgcgatactgttgagaagggcagagatattgccactgttcttgaccagtactcaaagtttgtgaagccagcatttgaggatttcatactcccaacaaagaaatacgcagatataataattccccgaggtggtgataaccatgttgctattgatttgattgtgcaacacatccatacgaagctcggtcaacatgatctctgtaaaatttatccaaatctttatgttattcaatcaacttttcagatacgtggtatgcacactctaatccgcgactctaaaacaacaaagcatgactttatcttctactccgatcgattgatacgtttggtcgttgaacatggcctcggacaccttccctttacagaaaagcaagtggttactccaacaggatctgtgtattcgggtgtggacttctgtaagaaactgtgtggtgtctcagttatcagaagcggtgagagtatggagaacgctcttagagcatgctgcaaaggcatcaaaattgggaagattctgattcatagagaaggcgacaatggtcaacagctaccctcagacatttcagaaaggcatgtgcttttactggatccaatcctcgggacaggaaactcggcggtgcaagcgataagactgctcataagtaaaggcgtgcctgaatccaacatcatatttctcaatttgatatctgcacctgaaggagtaaatgtggtgtgcaaaaagttcccaaggataaagattgtgacttcagagatagaactcggtttaaacgacgagttccgagttgttcctggtatgggcgagtttggagaccgctattttggaaccgatgatgagtga

SEQ ID NO: 8988 - protein, 461 aa, Arabidopsis thaliana
MASKSDVNIIETSSKVHFSGFHQMDGLASNRPEQMAEEEEHGQPFVIGVAGGAASGKTTVCDMIMQQLHDQRAVVVNQDSFYHNVNEVELVRVHDYNFDHPDAFDTEQLLSSMEKLRKGQAVDIPNYDFKSYKNNVFPPRRVNPSDVIILEGILIFHDPRVRDLMNMKIFVDADADVRLARRIKRDTVEKGRDIATVLDQYSKFVKPAFEDFILPTKKYADIIIPRGGDNHVAIDLIVQHIHTKLGQHDLCKIYPNLYVIQSTFQIRGMHTLIRDSKTTKHDFIFYSDRLIRLVVEHGLGHLPFTEKQVVTPTGSVYSGVDFCKKLCGVSVIRSGESMENALRACCKGIKIGKILIHREGDNGQQLPSDISERHVLLLDPILGTGNSAVQAIRLLISKGVPESNIIFLNLISAPEGVNVVCKKFPRIKIVTSEIELGLNDEFRVVPGMGEFGDRYFGTDDE

SEQ ID NO: 8989 - DNA, 618 bp, Mycoplasma mycoides subsp. mycoides SC str. PG1
  CDS (1)..(618): transl_table=4
atgagtaaaaaagttagcattattttaatagctggcggtagtgctagtggaaaaacaactattgctagtaaaatagctaatgagattttaaaagataaatctgtagaacatatttcaatggataattactataaagattttactaatttatctttagagcagagaaaccatattaattttgatcacccaaattcaattgatattgatcttttaattaaagatttaaaacaacttttaaaaagacatgatatttttgttccaacttatgattataaaaaacatattagaacaaataaagaaaaactaattaaagctagtgatgttattatagttgatggcatcttttcattacattttgaaaaattacgcgaacttggagatattaaaatatttgtaaaaactcctgatgatttaagatttattagaagattagtcagagatataaaagaacgtaatagaactattgaaagtgttattgatcaatacttaactgatgttaaacctatgcatgatctttttatagaacaaactattgattatgcagatattgtatttaaaaaaggaaatgatgtagctattgatatagttgcttcaaaaattaaagacttattaaattaa

SEQ ID NO: 8990 - protein, 205 aa, Mycoplasma mycoides subsp. mycoides SC str. PG1
MSKKVSIILIAGGSASGKTTIASKIANEILKDKSVEHISMDNYYKDFTNLSLEQRNHINFDHPNSIDIDLLIKDLKQLLKRHDIFVPTYDYKKHIRTNKEKLIKASDVIIVDGIFSLHFEKLRELGDIKIFVKTPDDLRFIRRLVRDIKERNRTIESVIDQYLTDVKPMHDLFIEQTIDYADIVFKKGNDVAIDIVASKIKDLLN

SEQ ID NO: 8991 - DNA, 639 bp, Bacillus cereus ATCC 10987
  CDS (1)..(639): transl_table=11
atggggacgaataagcctgttgtaattggaattgctggtggttcagggtcaggtaagacaagtgtaacgaaagcgatttttgaccattttaaaggtcattccattttaatcttagagcaagattattattacaaagatcaaagccatttaccaatggaagagcgtttaaaaacaaattatgatcatccattagcgtttgataatgatttgttaattgaacatttgcagcagttgcttgcatataaacaagtagagaaacctgtatatgactatacattgcatacgcgttcagatgaaattattccagttgagccgaaagatgtaatcattttagaaggaattcttattttagaagacccacgtctttgtgagttaatggacattaagttattcgttgatacagatgctgaccttcgtattttacgccgcatgcagcgtgatattaaagaacgtggtcgtacgatggattcagttattgatcaatatgtaaatgttgtacgtccaatgcacaatcaatttattgagccttctaagaaatttgcggatattattatccctgaaggtggacaaaaccacgttgcaattgatattatggttacaaaaattgcaacaattcttgaacaaaaagtaaatttgtaa

SEQ ID NO: 8992 - protein, 212 aa, Bacillus cereus ATCC 10987
MGTNKPVVIGIAGGSGSGKTSVTKAIFDHFKGHSILILEQDYYYKDQSHLPMEERLKTNYDHPLAFDNDLLIEHLQQLLAYKQVEKPVYDYTLHTRSDEIIPVEPKDVIILEGILILEDPRLCELMDIKLFVDTDADLRILRRMQRDIKERGRTMDSVIDQYVNVVRPMHNQFIEPSKKFADIIIPEGGQNHVAIDIMVTKIATILEQKVNL

SEQ ID NO: 8993 - DNA, 801 bp, Strongylocentrotus purpuratus
  CDS (1)..(801)
atgtctgagaaaaataactgtaccaacggaagagctaaacgtccattcctcataggagtagctggaggtactgcttctggaaaatcatcagtatgcgagcgtatagtggaggcccttggccagcagaaactggacagcagacagcgtaaggtgacggtcatcagcatggatagcttctaccaggacgtggtcactaacgacgctgcaccagggtcttacaactttgatcatccagatgctgttgatgagaagatgatgaaaaagaccttgtctgagctccgagccggtcagcctgtcagagtgcccgtttatgacaaagtcaaaaactcaagaacggattttacccagatatacccaacagacgtagtgcttatagagggcattcttgtattctacttcaaggagatcctagatatgcttgatatgaaactctttgtcgacactgatgcagacacaaggttatcaagaagagtgatgagagatgtgcaagagagaggcagggacctagacaaggtgctggtgcaatacgtcaaatttgtgaagcccgctttcgaagagttctgtctcccgaccaagaaatatgcagatgttatcattcccagaggtgcagagaattcagttgccattaatctgatcgtccatcacatacgagacattctcaatgggggcatcaaaacggagtaccagaacggcaaagccaagctcatcgatggcctttcgacccccatgcacacgtctacgctcatcccgtctggccctgtgggaaggaaagcgtcagaatcaggagggcgcccccattag

SEQ ID NO: 8994 - protein, 266 aa, Strongylocentrotus purpuratus
MSEKNNCTNGRAKRPFLIGVAGGTASGKSSVCERIVEALGQQKLDSRQRKVTVISMDSFYQDVVTNDAAPGSYNFDHPDAVDEKMMKKTLSELRAGQPVRVPVYDKVKNSRTDFTQIYPTDVVLIEGILVFYFKEILDMLDMKLFVDTDADTRLSRRVMRDVQERGRDLDKVLVQYVKFVKPAFEEFCLPTKKYADVIIPRGAENSVAINLIVHHIRDILNGGIKTEYQNGKAKLIDGLSTPMHTSTLIPSGPVGRKASESGGRPH

SEQ ID NO: 8995 - DNA, 798 bp, Nasonia vitripennis
  CDS (1)..(798)
atggcagacgtcagcgtgaacatgggcacctcgaggaagatgtcctttggcttcaacgggaagatgaacggcgtcgagggcaagacgcccttcctcatcggcgtttccggcggcaccgccagtggaaagtcaacagtatgtaagaggataatggagaaactaggccaagtagataaagaccatacagagagacaggtggtgtgcatatcacaggacagcttttatagagaccttacaccggcagaaaagcttaaggctgaaaagggacagtataattttgatcatccggatgcattcaacaatgacttaatactgcagacacttagggatattcttgcaggcaggaaatgtgaaattcctgcctacgactacaggacaaacagtttaatcaaggacaaagttacgacgatttatcctgccgacgtagtactttttgaaggaattctagtattttatttcccaaacataagagatctttttcacatgaagctgtttgttgatacagactctgatacaaggttggcaagaagagtaccaagggacattaatgaaagaggaagagatctggattatgtgctaaatcaatacatgaattttgtaaagccagcatttgaagaattttgtctacctaccaaaaaatttgctgacgtgataattccgcggggagcggataatacagtggccattgacttaattgtccaacacataagagattttctaagcaatcgatgtagggtagttgtggaacctgaaagtccaattagccgttctgatgaaacactcaagagacctcactaa

SEQ ID NO: 8996 - protein, 265 aa, Nasonia vitripennis
MADVSVNMGTSRKMSFGFNGKMNGVEGKTPFLIGVSGGTASGKSTVCKRIMEKLGQVDKDHTERQVVCISQDSFYRDLTPAEKLKAEKGQYNFDHPDAFNNDLILQTLRDILAGRKCEIPAYDYRTNSLIKDKVTTIYPADVVLFEGILVFYFPNIRDLFHMKLFVDTDSDTRLARRVPRDINERGRDLDYVLNQYMNFVKPAFEEFCLPTKKFADVIIPRGADNTVAIDLIVQHIRDFLSNRCRVVVEPESPISRSDETLKRPH

SEQ ID NO: 8997 - DNA, 2277 bp, Nasonia vitripennis
  CDS (1)..(2277)
atggttaaatggaacgtacgcagatgtgatagcacggtagcgttcttgtccagcagtgtcccatatctgagctttgatcgttttaccatctacttgtatacttcttgttgcaaattccacaccaatagtggacttggactcgagctacggcggcggggcagacgagagaaagaagaaaagcagcagcgccaggaaagacacagtagaagtcgaattgaaagtacttatattacaattatggcagcaaaggtccagcactatgaccctccaagttctgcaagctctgagagtgatgactgtgatcaatgtctagaggatcgagaaatattcttctctgacgaactatcagaggaatatcgcagagacatgggcacaccaactccagcaccaccttctccaagacctccatccactggatctcaaaagtcacctcactctcgcagacaaagaacaactagctgctcacaatctaataaaaagactgctgcagagtcaatacttcagagtaagactaggactatttacactgctggaaggccaccatggtacaactctgctggacaacaggttgaaccttttgtaattggaatttgcggtggcagtgcatccggcaagactactgtagctactaaaattattgaatctcttgatgtaccatgggttacattgctcagtatggactccttttacaaagttttgaacgaaaagcagcacgacatggcagcccgtaatgagtataactttgaccacccagatgcctttgactttgagttgctaagagttactttgcagcgtctcaaagaaggaagaaaagtggaagtacctatttacaattttgtaacgcatagcagagaaactagaaccaaaatgatgtacggtgcaaatgttattatatttgagggtatattgactttttacaatgcggaagtgctgaaaatgtgtgacatgaaagtttttgttgacaccgatgcagatgtaagattggctcggagactgaggagggacatatcccagagaggcagagatctagatggagttttaaaacagtacagtacaatggtaaaaccttccttttattattacattgccccctcgatggtgcatgcagacataattgttcctcgcggaggtgacaatgaagtagctatagaattaatcgttcagcatgtccatacgcaactgcagttgagaggcttcaagctgagagaaaagttggcccattcgtacatcggccagccacttcccaactcattgtacttacttcccgacacgccccaagtcaagggcttgcatactttcatacgtaacaaaaacacacacagagatgaatttatattctactcaaagcgcctgattcgtctggtgatagaatacgcgctgtctttgctgccattcaaggagatcacggtcgagaccccgcaaggggttcaatacagcggcaagagaagcgcctcggacaaaatttgcggcgtctcgatcctgagagccggtgagacaatggagcaggccgtgagagacgtctgcaaggacataagaatcggcaaaattttgatccagacgaatctgcagaccggagagccggaattgtattatctccgtctgcccaaggacatcaaagactacagagtaattctgatggacgcgaccgtggcgaccggtgccgcggcaatgatggccataagggtgctcctcgaccacgacgtggcggaggacaacataatgctggtttccctgcttatggccgagtcgggagtgcactcgatagcttatgcctttcccgaggtaaaaatagtgacttctgcactcgatccggaaataaatgaaaagttctatgtactgccaggcgcgtcttatgttgctttagtggtatacactgcctcacccgtacttgtaccaattattttggacatcgcattacctctcaatgaatctcgcagaaaaacatttccttactttatagaatatttcattgatactgaattttactattatcagttgatggtacacggaacaatttgctttactatttctgtattggtttatatcagtattgacaccatgtatgccgcgtgctgtcaacatctctgcggtctctttgacatcgttgaattcgcggttttgattgaaaatacatatgctctttgctatcttctggtattgggcttaaacttagctgttattgtacttgctgcagttgatgtgagtactatgatatattttgcttacgaacagatgacaaataaaatgatgtcaaagcaaagtttggtggctttttga

SEQ ID NO: 8998 - protein, 758 aa, Nasonia vitripennis
MVKWNVRRCDSTVAFLSSSVPYLSFDRFTIYLYTSCCKFHTNSGLGLELRRRGRREKEEKQQRQERHSRSRIESTYITIMAAKVQHYDPPSSASSESDDCDQCLEDREIFFSDELSEEYRRDMGTPTPAPPSPRPPSTGSQKSPHSRRQRTTSCSQSNKKTAAESILQSKTRTIYTAGRPPWYNSAGQQVEPFVIGICGGSASGKTTVATKIIESLDVPWVTLLSMDSFYKVLNEKQHDMAARNEYNFDHPDAFDFELLRVTLQRLKEGRKVEVPIYNFVTHSRETRTKMMYGANVIIFEGILTFYNAEVLKMCDMKVFVDTDADVRLARRLRRDISQRGRDLDGVLKQYSTMVKPSFYYYIAPSMVHADIIVPRGGDNEVAIELIVQHVHTQLQLRGFKLREKLAHSYIGQPLPNSLYLLPDTPQVKGLHTFIRNKNTHRDEFIFYSKRLIRLVIEYALSLLPFKEITVETPQGVQYSGKRSASDKICGVSILRAGETMEQAVRDVCKDIRIGKILIQTNLQTGEPELYYLRLPKDIKDYRVILMDATVATGAAAMMAIRVLLDHDVAEDNIMLVSLLMAESGVHSIAYAFPEVKIVTSALDPEINEKFYVLPGASYVALVVYTASPVLVPIILDIALPLNESRRKTFPYFIEYFIDTEFYYYQLMVHGTICFTISVLVYISIDTMYAACCQHLCGLFDIVEFAVLIENTYALCYLLVLGLNLAVIVLAAVDVSTMIYFAYEQMTNKMMSKQSLVAF

SEQ ID NO: 8999 - DNA, 1404 bp, Gibberella zeae PH-1
  CDS (1)..(1404)
atgtccgcctctgcaatccctgaaatgaatggcgggcttgagagtcatgtcacggttcagaagcgagcttactattcacctccttgggccgatgtcagtatcatcggtgttgcgggcagctctggctcgggcaagtcgaccttgtcccaggccatcgtcaagaagctgaacctaccctgggactctttctataagaccttgactcccgagcagtccaaaatggcttttgccaatgaacatgactttgactctcccgacgccatcgactttgatgttctagttgaaaaactaagggacctaaaagctggacggcgtgctgagatccctgtttattcatttgcgaagcatgcgcgactggaccatacgacatccatctactcgccccatgtactggttctagagggtatttttgctttatatgacccccgagtcattgagctacttgatatgggtatatattgtgaagcagatgcggatacatgtctatcacgaagacttgtgcgcgatgtgcgagaacgtggccgagatatcgagggtatcatcaagcagtggttcgggtttgtcaagcccaactttgaaaagtttgtcgagccccagcgcaaggtggccgatttaatcgtgccgagaggtatcgagaacagagtagctcttgacatgatggtccagttcgttgagaagaagctgtttgaaaagtcaagacaccatcgagaggcgctgtctcgactcgaagcagcgagcaaggattctgctctatctgaccgtgttgtggtattgaacgatacccgacaactcaaatttatgaacaccatcctgcaagatatcgacacagatcccgaggatttcatattctactttgacagacttgctagcttgatcatcgaacaggcccttaacaacgcccatttcgaggccaagaagatcattacaccacagggatacgaatacaagggccttgtgccaacaggtgaggtctgcgccgttattgtactccgaggaggatcagcgtttgagccggcgctgcgaaagactattccggactgccgaacaggccgacttctgatccagtccgactactcaacaggagagccggagcttcactacttgcgactgcccgatgatatcgcaagccagcaaagtgtgctgctacttgatacacaaatggctaccggcggtgctgccttgatggcggtgcaagtcttggtcgaccatggcgtacagcaggaccgcattgtcctggcaacatactcggcaggcaaggttggacttcacagattgacgtctgtattcccagaaatcactgtggtggtttgcaatatgcttgactaccaacaggaacgatgggtagagaagaggtatttccgcttcaatattggtggtagagttggtattggaatgactggctga

SEQ ID NO: 9000 - protein, 467 aa, Gibberella zeae PH-1
MSASAIPEMNGGLESHVTVQKRAYYSPPWADVSIIGVAGSSGSGKSTLSQAIVKKLNLPWDSFYKTLTPEQSKMAFANEHDFDSPDAIDFDVLVEKLRDLKAGRRAEIPVYSFAKHARLDHTTSIYSPHVLVLEGIFALYDPRVIELLDMGIYCEADADTCLSRRLVRDVRERGRDIEGIIKQWFGFVKPNFEKFVEPQRKVADLIVPRGIENRVALDMMVQFVEKKLFEKSRHHREALSRLEAASKDSALSDRVVVLNDTRQLKFMNTILQDIDTDPEDFIFYFDRLASLIIEQALNNAHFEAKKIITPQGYEYKGLVPTGEVCAVIVLRGGSAFEPALRKTIPDCRTGRLLIQSDYSTGEPELHYLRLPDDIASQQSVLLLDTQMATGGAALMAVQVLVDHGVQQDRIVLATYSAGKVGLHRLTSVFPEITVVVCNMLDYQQERWVEKRYFRFNIGGRVGIGMTG

SEQ ID NO: 9001 - DNA, 816 bp, Apis mellifera
  CDS (1)..(816)
atggcagatatgtcaatgaatattgttactccgcgaaaaatgtcttttggtattaatggaaagttaaacggtttagaaagtaaaacaccttttttaattggagtttcaggtggtactgccagtgggaaatcaactgtatgtaaacgtataatggaaaaattaggacaagtagatatggatcatatgcaacgacaagtagtttgtatttcacaagatagtttttatcgagatttatcaccagctgaaaaacttaaagctgaaaagggtcaatataattttgatcatccagatgcatttgataatgacttgatacttcaaacattacaagatatattagctggtgtaaaatgtgaaataccagcctatgattatagaagtaacagtttaatgaaagatcaaattacaacaatttatcctgctgatgttgttttatttgaaggtattttagtgttttattttcctaagatacgagacttatttcatatgaaattatttgtggatactgactcagatactagattagctagaagagtaccaagagacataaaagaaagaggaagagacttagattatgtattgaatcaatacatgaattttgtaaaacctgcatttgaagaattctgtcttcctactaaaaagtttgctgatgttattataccaagaggtgcagacaatacagtggcaatagaccttatagtgcaccacatctgggacattttgcgtttgaaaaaggctgaaaactcatccaggcagcatccatacatctatcaacataggcgtacttcgactaactcatccgaaacgctcagcagatga

SEQ ID NO: 9002 - protein, 271 aa, Apis mellifera
MADMSMNIVTPRKMSFGINGKLNGLESKTPFLIGVSGGTASGKSTVCKRIMEKLGQVDMDHMQRQVVCISQDSFYRDLSPAEKLKAEKGQYNFDHPDAFDNDLILQTLQDILAGVKCEIPAYDYRSNSLMKDQITTIYPADVVLFEGILVFYFPKIRDLFHMKLFVDTDSDTRLARRVPRDIKERGRDLDYVLNQYMNFVKPAFEEFCLPTKKFADVIIPRGADNTVAIDLIVHHIWDILRLKKAENSSRQHPYIYQHRRTSTNSSETLSR

SEQ ID NO: 9003 - DNA, 1431 bp, Candida glabrata CBS 138
  CDS (1)..(1431)
atgcatgatatgaccgggaactctactgaggctagacgtagtagtgttcatttgaatgaccaacacaaatatattccgccatggactactccttatatcatcggtgttggtggtacgtctgggtcaggtaagaccagtgtggccaataagattgtctcatctattaatgttccatggactgtgctaatctccttggataatttctataaaccactcaatgaagcagaacgggagcgtgcgtttaataacgagtacgactttgatgaacctaatgcaatcgatttggatttggcatatgactgtattttgagcttgaaagaaggtaagaaaacctctattcccgtctatagttttacccaccataatagagatccacacaagcagatccctatatatggtgccagtgttatcgtcttagaaggtatttatgcattatatgatcaaagattacttgatttgatggatttaaaggtgtatgttgacgctgatttagacatttgtttggctagaagattatcgagagatattgttgcaagaggaagagatttgcaaggctgtttattacaatgggaaagatatgtcaaacccgatgctgtcaagtacgttaagccaacaatggcgaaagctgatgctattataccttcaatgtctgataacacagttgctgtaaagctgctaattaagcacatagaatcaaaactagaactgaaatctgaagagcacatgacagaacttgtcaaattaggccaatctggaactggtccattatcagattataagaatttggaggttcttccacagacaaatcaaattaaggccatacacactattttattggacagaaatgtcgatagggatgagttctccttccaatttgataggattgcaactttgttactagccaatacactcaatgatatccctgttcagaaaccagaaactattatcactccagatggattcagtgtaccaggccaacgtaggtgctgctttgatgaagttacagctatcagcacaattagatcaggcgattgttttatgaaagctgttaaaaaggctttcccagccatggcaattggtaagctattaattcaatctgattccctgacaggtgagccacaactgcactgtgagtttatccccgaggacatctcaaaatacaggaaaatactaataatggattctcagatcattagtggtgctgctatgattatggccgtacaagttcttctagaccacaaagtcgatatagaaaacatccatattttagtatacatggccacagaactaggtattagaagaattataaacgcgtttggcaataggatcaaaattacagcaggtattgtcgtcgagagaaatgaaataaaaaacaagaaggcaagttgggccctaacaagatttgtcgacaacaaatattttggttgctaa

SEQ ID NO: 9004 - protein, 476 aa, Candida glabrata CBS 138
MHDMTGNSTEARRSSVHLNDQHKYIPPWTTPYIIGVGGTSGSGKTSVANKIVSSINVPWTVLISLDNFYKPLNEAERERAFNNEYDFDEPNAIDLDLAYDCILSLKEGKKTSIPVYSFTHHNRDPHKQIPIYGASVIVLEGIYALYDQRLLDLMDLKVYVDADLDICLARRLSRDIVARGRDLQGCLLQWERYVKPDAVKYVKPTMAKADAIIPSMSDNTVAVKLLIKHIESKLELKSEEHMTELVKLGQSGTGPLSDYKNLEVLPQTNQIKAIHTILLDRNVDRDEFSFQFDRIATLLLANTLNDIPVQKPETIITPDGFSVPGQRRCCFDEVTAISTIRSGDCFMKAVKKAFPAMAIGKLLIQSDSLTGEPQLHCEFIPEDISKYRKILIMDSQIISGAAMIMAVQVLLDHKVDIENIHILVYMATELGIRRIINAFGNRIKITAGIVVERNEIKNKKASWALTRFVDNKYFGC

SEQ ID NO: 9005 - DNA, 1380 bp, Kluyveromyces lactis NRRL Y-1140
  CDS (1)..(1380)
atgaactcttctggctatataccaccttggacaacaccgtatgttattggtattggagggagttcaggttctggaaagacgagtgttgctaccaaactcgtgacaagaatcaacactccatggacagtattaatatcgttggacaatttctataaaccgttaaccgtcgaagaacgaaagcaggctttcgaaaataactacgatttcgataaaccggattcaatagatttggatctagcttatcaatgtatcctgtctttgaaagaaggtaagaaggtgaaaatcccaacctattcgttcacagatcatgatagaattccaaataagtttttaaccatctatggtgcgagtgttattgttattgaaggaatttacgcattatatgaccaaagacttcttgatttaatggatttgaaggtttacgtggatgcagatttagatatatgtttagctagaagattgacaagggatatcatctctcgtgggagagacttgcatggttgcataagacaatgggagaagtttgttaaaccaaatgcggataggttcgtgaaaccaaccatgaaggcagcagatgcaatcatcccatccatgtcagataacagcattgcgactgagatgttacttaatcacattcagtctaaattgcagctcaaatcgcagcagcatttagcagaacttcaaaagctcgagtcatacgctgtgtcgattgattctttaaatataattcataagttgagacaaactaatcaggtgaaggctctacagactatattgttagacaaaagcgtttcaagagatgactgggtattctattttgacaggttagcaacaatacttttatcctttgcattggacgatatacctacgaaattgaaaacgactaaagttattacgccgacaggaaaacagttggataatccagtttttgttgactttgaccgtgtcacagctataaatattgttagatctggcgactgtttcatgagatctctaagaaagacaattcctagcgtcgcagttggtaagctacttattcaatccgattccagaacaggggaaccacaattgcacagtttatttattccaccaatgatcgaaaattataaccaagtgctactgatggatgcgcagataatttcaggtgcagcgataatcatggcaatccaagttcttactgaccacaatgttgatctcaagaagattaaggttgtagtttatctagcgacagaaaccggtattagaaggatagttaatgctactaataatcaagttgaaatatacgctggagaaattatttccgatgacaaaatcagaactaatcaatgtaattgggccagaaagcggttcgttgcctcaaattactttgggtgcaagtag

SEQ ID NO: 9006 - protein, 459 aa, Kluyveromyces lactis NRRL Y-1140
MNSSGYIPPWTTPYVIGIGGSSGSGKTSVATKLVTRINTPWTVLISLDNFYKPLTVEERKQAFENNYDFDKPDSIDLDLAYQCILSLKEGKKVKIPTYSFTDHDRIPNKFLTIYGASVIVIEGIYALYDQRLLDLMDLKVYVDADLDICLARRLTRDIISRGRDLHGCIRQWEKFVKPNADRFVKPTMKAADAIIPSMSDNSIATEMLLNHIQSKLQLKSQQHLAELQKLESYAVSIDSLNIIHKLRQTNQVKALQTILLDKSVSRDDWVFYFDRLATILLSFALDDIPTKLKTTKVITPTGKQLDNPVFVDFDRVTAINIVRSGDCFMRSLRKTIPSVAVGKLLIQSDSRTGEPQLHSLFIPPMIENYNQVLLMDAQIISGAAIIMAIQVLTDHNVDLKKIKVVVYLATETGIRRIVNATNNQVEIYAGEIISDDKIRTNQCNWARKRFVASNYFGCK

SEQ ID NO: 9007 - DNA, 1521 bp, Debaryomyces hansenii CBS767
  CDS (1)..(1521)
atgccaaacgaaacaaccaaggcaagaaggtcatcaagaatatcaccatatcatgaagactcatcgtctttttttaacattgcttctgtattagataaacaaaaagatacccaacagataaatacagatctggaaaaatgttcatatattccaccctggacggagccatatattattggtatagctggtaattcaggatccgggaagacttctttatctcaaaagattatacaagaaatcaatcaaccttggacagtcttattatcatttgataatttttataatccgttgagtcaagaagaaagacagaaagcatttagtaatgaatttgattttgatacaccagattcacttgatttagatctattatataatgtggtgaaatctttgaaaagtggtgaaaagactgaaattccaatctattcatttactaagcatgatagaacagacaaaacgactacaatatacggagctaatgttattgtaatagagggaatttatgctttgtatgatcaaagactactcgacttaatggatattaagatctatgtcgatacagatcttgatatttgtcttgccagacgattaacaagagatattttatatagaggaagagacttatctggtgctatgaagcagtgggaaacatttgtgaagccaaatgcagtaaggtatgttaatcctaccatggataatgcgaatttagttattcctagaggtttggacaattctattgcaatcaacttaatgatcaaacacattcaaaagcaattagcgttaaaatcatcattacatttacaaagtttgaagagtttgggtgtgaatgaatttaatattggaaattatggaaaccttaatttgttaccgaataataaccatacaagagggatcaattccgccttattcaatatgtccactgagagatcagattttatattttattttgatagaattgcaattttaattatagagaatgctattgaaacatttgaaaattacaggtcgaagatagtaaataccgcaggcaattaccagtatcaaggattggaccacgttgatgaaatttttgcaattaatattattagatctggggattgttttatgaattctattaagaaaacatttcctgagatatctattggtaaattattgatccaatctgcagcattgacaggagaacctcagttacatttcgagaccttaccaccaaatttggacaagatcgaacataagacgatattgttatttgacgcacaaattataagtggagcagcagcgataatggcaattcaagtattacttgatcataaggtaaggatggaagatatagtattttgcacgtatttgtcaacagaaattggattgaggagaattttaaacgtgtttcctagggttaggattgtgattgggaaattaagtactattgatgacagtactaaatcgtataacccagaaaatttcaaagacaccgattggtgtttcagaaatagattcattgattctctctactttggtacataa

SEQ ID NO: 9008 - protein, 506 aa, Debaryomyces hansenii CBS767
MPNETTKARRSSRISPYHEDSSSFFNIASVLDKQKDTQQINTDLEKCSYIPPWTEPYIIGIAGNSGSGKTSLSQKIIQEINQPWTVLLSFDNFYNPLSQEERQKAFSNEFDFDTPDSLDLDLLYNVVKSLKSGEKTEIPIYSFTKHDRTDKTTTIYGANVIVIEGIYALYDQRLLDLMDIKIYVDTDLDICLARRLTRDILYRGRDLSGAMKQWETFVKPNAVRYVNPTMDNANLVIPRGLDNSIAINLMIKHIQKQLALKSSLHLQSLKSLGVNEFNIGNYGNLNLLPNNNHTRGINSALFNMSTERSDFIFYFDRIAILIIENAIETFENYRSKIVNTAGNYQYQGLDHVDEIFAINIIRSGDCFMNSIKKTFPEISIGKLLIQSAALTGEPQLHFETLPPNLDKIEHKTILLFDAQIISGAAAIMAIQVLLDHKVRMEDIVFCTYLSTEIGLRRILNVFPRVRIVIGKLSTIDDSTKSYNPENFKDTDWCFRNRFIDSLYFGT

SEQ ID NO: 9009 - DNA, 1353 bp, Yarrowia lipolytica CLIB122
  CDS (1)..(1353)
atgaaagccaaacagtacgtcccgccatggaaacagccctacattattgccgtggcggggtcttcgggatcgggaaagacttcggtggctcaactcatcatcaagcagttgaatgtgccttggaccgttcttttgtccatggacaacttctacaagacgctgacacctgaggaatctgctgctgcccatcgaaacgagcacgacttcgacacgcctaccgcatacgataccgacgatctggtcaagtgtcttcgagatatcaaggcaggtcatcgagtcaacattcctacgtactcctttgtcgagcacgctcgaaccgacaaaactgtcagcatttacggcgccaacattgtgatccttgagggaatctatgtgctctatgaccaccccggcttactggatctcatcgacatgaagatctttgtcgacactgatctggatacttgtctggctcgacgactcacgagagatatgcttcatcgaggacgagaaatgtccggtattataaaccagtggcgtaagacggtcaagcccaactttgagcgatacgtgcgacctacaatggccaatgctgatgttctgattcctcgaggacgggacaatgtcgtagcgattgatatggtggcccaacatatcactaaaattcttacagacaagagtgaacgacacttggccgatctgtgctcgttgatcgacgacgacgagctggctgccgaggaagctacctggaacaaacagattcatgaactgaaacagtcgccccagcttatcggcattcacacaattctatgttcagatgataccaagcgagctgatttcgtgttctactttgatagaatcgccactctactggtcgagaatgcactgcagcactccaagtttgaaaacattaacgtcgagactcccacaggaaacacctttgagggagtccgacgtctgggaattgacaatacctgtgctgtagctataatccgagcaggtgagtgtttcgaccgttctgtcaagcgaaccatcccttcagtccgaatgggaaagctgctgatccagagtgacatttctaccggagagcccaaattgcatcatctgaaccttccttcccgcatttcagagcctgacgcctttgttctactatgtgacgctcagctctcgtctggagctgccgctatcatggctaccacagtcctggttgaccacggcgtcaaggaggagaacattgtcttcgtttgctatcttgcatctaaacgaggtcttcagcggtacctcaacgcctatcctaatgtgcatactgtggtcggtaagattctcgacggcagtcatggcagattcatcgacaccaagtactacggtacctag

SEQ ID NO: 9010 - protein, 450 aa, Yarrowia lipolytica CLIB122
MKAKQYVPPWKQPYIIAVAGSSGSGKTSVAQLIIKQLNVPWTVLLSMDNFYKTLTPEESAAAHRNEHDFDTPTAYDTDDLVKCLRDIKAGHRVNIPTYSFVEHARTDKTVSIYGANIVILEGIYVLYDHPGLLDLIDMKIFVDTDLDTCLARRLTRDMLHRGREMSGIINQWRKTVKPNFERYVRPTMANADVLIPRGRDNVVAIDMVAQHITKILTDKSERHLADLCSLIDDDELAAEEATWNKQIHELKQSPQLIGIHTILCSDDTKRADFVFYFDRIATLLVENALQHSKFENINVETPTGNTFEGVRRLGIDNTCAVAIIRAGECFDRSVKRTIPSVRMGKLLIQSDISTGEPKLHHLNLPSRISEPDAFVLLCDAQLSSGAAAIMATTVLVDHGVKEENIVFVCYLASKRGLQRYLNAYPNVHTVVGKILDGSHGRFIDTKYYGT

SEQ ID NO: 9011 - DNA, 1638 bp, Candida albicans SC5314
  CDS (1)..(1638): transl_table=12
atgccactacatccgaaatcaagaagaagatcaagtagaatatccccacttcctgacgaggattcattgtcatttataaactcatcagtagaaaaccttgatcaatcaccatttgaaagtatcgatgatttagttgaagatgtcaacaaatatgacttgaaaagtcccagtgatgagcaacaacaacaacagcaacaagagctgcaaactcaaaatttgaaacacaaaccatcattcacttctacaccgaaagcatcatatatcccaccatggaccgaaccatatatcattggtattgctggtaattcagggtcagggaaaacctcaatctcccaaaaaatcattcaggatatcaatcagccatggacggtattattatcatttgataatttctatcaaccattgaccctggaacaaagtaaacttgcatttgccaataattatgattttgattgtcctgattcattagattttgatttattagtagagaccattggtaatttgaaaaaaggaggtaaaactactatcccagtttattcattcacttcacataatcgtacttcaaaaactaataccatttatggcgccaatgttattattgtggaaggtttatatgctttacatgatcaacaattattggatatgatggatttgaaaatatatgtcgatacagatttggatatttgtttagcaagaagattaactcgagatatattgtatcgtggtcgagatttaggtggagctatgcaacaatgggagaaatttgttaagccaaatgcggttaaattcattaatccaacggtacaaaatgctgatttggtgattcctcgaggattagataattcaattgccataaatttaatgattaaacatatcaagaatcaattagcattaaaatcaagaaatcatttacaacgattgaagaaattaggggtcaatataaaatttgatattgataaattcaatattaaattattacaaaacactaatcaagtcaagggaatcaattcgattttatttgatacgtcaacttcacgtaatgatttcatattttattttaatcgtatgtgtggattattaattgaattagcacaagagtttatgaccaattataccaatgtcgatatcgatactggtaaagggatttatcatggtaaaaaattattacaaaatcaatataatgcagtcaatataattcgtagtggagattgcttcatggcatcaattaaaaaatcattcccagtaatttctattggtaaattattaattcaaagtgattcaactacgggggaacctcaattacattttgaaagattgcctcataaattatctgataaaattatgttatttgattcacaaattattagtggagccggagccattatggcaattcaagtattattagatcatcatgttaaagaacaagatattattttaattacgtatttatctacagaaattggtataagaagaattgttaatgtgttccctaaagtgaaaattgttgttgggaaattatcaagtatggaagattcaaattcgaataacaaagtttggtataataatgaaggatttttggatagtcattggcatttcagaaatagatttatagatagtttatatttcggcacagaataa

SEQ ID NO: 9012 - protein, 545 aa, Candida albicans SC5314
MPLHPKSRRRSSRISPLPDEDSLSFINSSVENLDQSPFESIDDLVEDVNKYDLKSPSDEQQQQQQQESQTQNLKHKPSFTSTPKASYIPPWTEPYIIGIAGNSGSGKTSISQKIIQDINQPWTVLLSFDNFYQPLTSEQSKLAFANNYDFDCPDSLDFDLLVETIGNLKKGGKTTIPVYSFTSHNRTSKTNTIYGANVIIVEGLYALHDQQLLDMMDLKIYVDTDLDICLARRLTRDILYRGRDLGGAMQQWEKFVKPNAVKFINPTVQNADLVIPRGLDNSIAINLMIKHIKNQLALKSRNHLQRLKKLGVNIKFDIDKFNIKLLQNTNQVKGINSILFDTSTSRNDFIFYFNRMCGLLIELAQEFMTNYTNVDIDTGKGIYHGKKLLQNQYNAVNIIRSGDCFMASIKKSFPVISIGKLLIQSDSTTGEPQLHFERLPHKLSDKIMLFDSQIISGAGAIMAIQVLLDHHVKEQDIILITYLSTEIGIRRIVNVFPKVKIVVGKLSSMEDSNSNNKVWYNNEGFLDSHWHFRNRFIDSLYFGTE

SEQ ID NO: 9013 - DNA, 2106 bp, Ustilago maydis 521
  CDS (1)..(2106)
atgcaggccgggaagattgtgcagaggccttcgggcgacgggacacccattcttgagcctgtcactccttcgggaaagcgttcggagggctcgacgcatggcgtactcgctgctgccgctgcagctgctttaaccgcaactgaatctgcacctgtgacgccgctcgtatcttcaacagcatcgctgggatcagcgacgccgaccggaaatgcgacgctctccaacactatcgcagccacacgttccaaaaccatcgttcttgccgatgcgggtcgtgcgccttggtacaactcggtaggagaacccgtaccggcgtatgtggtaggtattgcaggcggatctgctagcggaaagacttcggtagccagagagattctcaagaaattgcctaatgttccgtgggttgctatcgtcagtcaagacgcctactacaagtcgctttcgcccgaagaatccaagctagcatttcaagaacagtatgatttcgaccacccggatgctttcgattacgatattctcaagaaatgcatcagagatttgcgtcaaagcaaggccgtcgagatcccagtgtacagcttcgtacagcatcaaagaacttcggaaacaaactacctctacggcccagccgtcctcatcgttgagggcatttttgttctgcacgatcccgagattcgccagttgctcgacctcaaagtctatgttcaggcggactcggatctgatgctggcgagaaggatcaaaagggacattgttgagagggcaaggtcggtcaactcggtgcttgatcagtacttgcgcttcgtcaagcccgcgtttgacaccttcgtctcggctactgctcggcacgcagacatgattgtacccggttcgcacaacgaggttgccatcgaggtcattagtcagcatatggagaagcagctgcgaaaccgatcaagaaagctgcgcgccgagttttacaagacccccgcaacgcaagttccggcgcccacagccaacgacaagaacgtactagctgtcatgagcccatatgacggtctgggctccccacacgagcgccgtgccagcttgacgcatatgaagcccatattgaatcgcagcgagtcatttggcatgtcgtcatctcagcttgttcgaggtgtttcgagcaattcagcagctgatgggacaggactgcctcccaatgtcatcttgctcgctcagactccgcaattacaatctctgctcactatactgcacgatcgatctacacccaccggcgagttcacctttgcctgcaaacgcgtcggaaccctcgttgtcgagctggcaacaacactgctgccgtatcgagaaaaggagatcgccatccatggtggacgcaaacacattggacacgagctcaacgtcagtagcctatgttcggtctcggtccttcgctctggagctgtgctcgagccttccctgcgccgagcttttcccgctatgtcgctgggaagcctgctcatccagtccaacgaggaagatggcgagccgcatttgtacgatgtatcgctgccctctttcatccgccgacgagagaccgcagaaaagtcgtgggtgtttttgctcgatgcgcagattggaacgggtgctgcggctttcatggcaattcgggtcctgttggaccactcggtgcccgaagagcaaattatctttttgacgctattggccagctcacagggcggtattcatgccctgaaccgagccttcccacgcgtgcgcatcgttgtcgctggtgtcgacccaggactgcaaaagctccgcatcccgtggcagacatcgtcatccaaccacagcaatacaagtaagcacgatcgcggcgagcctatacattacgacgacaatgcacctgtagacgaagacgatctctcgccgggccttaaccatcgcgacaatctgcatttgttagcatcgccaccactgaccagcgttgatggcaaatttgctgctaacagaggagccaggcaccagacgcaaagacagccaagtctgacgcattcgccggcgaaaggcagccgggttgtgtttgccatcactcctggctgcggctcaatcggagatcgtttctggggcaccggatctcgatga

SEQ ID NO: 9014 - protein, 701 aa, Ustilago maydis 521
MQAGKIVQRPSGDGTPILEPVTPSGKRSEGSTHGVLAAAAAAALTATESAPVTPLVSSTASLGSATPTGNATLSNTIAATRSKTIVLADAGRAPWYNSVGEPVPAYVVGIAGGSASGKTSVAREILKKLPNVPWVAIVSQDAYYKSLSPEESKLAFQEQYDFDHPDAFDYDILKKCIRDLRQSKAVEIPVYSFVQHQRTSETNYLYGPAVLIVEGIFVLHDPEIRQLLDLKVYVQADSDLMLARRIKRDIVERARSVNSVLDQYLRFVKPAFDTFVSATARHADMIVPGSHNEVAIEVISQHMEKQLRNRSRKLRAEFYKTPATQVPAPTANDKNVLAVMSPYDGLGSPHERRASLTHMKPILNRSESFGMSSSQLVRGVSSNSAADGTGLPPNVILLAQTPQLQSLLTILHDRSTPTGEFTFACKRVGTLVVELATTLLPYREKEIAIHGGRKHIGHELNVSSLCSVSVLRSGAVLEPSLRRAFPAMSLGSLLIQSNEEDGEPHLYDVSLPSFIRRRETAEKSWVFLLDAQIGTGAAAFMAIRVLLDHSVPEEQIIFLTLLASSQGGIHALNRAFPRVRIVVAGVDPGLQKLRIPWQTSSSNHSNTSKHDRGEPIHYDDNAPVDEDDLSPGLNHRDNLHLLASPPLTSVDGKFAANRGARHQTQRQPSLTHSPAKGSRVVFAITPGCGSIGDRFWGTGSR

SEQ ID NO: 9015 - DNA, 1737 bp, Cryptococcus neoformans var. neoformans B-3501A
  CDS (1)..(1737)
atggaacagccagcagggtatcgcactcccagaccacagaagcactccgtctatgaccccacgcagcctcggagcaaaaaccaggtcctgatatcccacggacgggctccctggtatggccctgatggcaggaatatcgaggcatatgtggtgggtattgccggaggtagtgcgtccggaaagacgtctgtagcacgcgctatcctttcggccctcaactacattcccacggttcttatcttgtcccaggactcgttttacaatgctcattccccagaagaggtcgaactggctttcaaaaatgacttggaccttgaccatcccgacgccattgacatgacgctgttcgctcagtgcatcaaggacctgaagcaaggcaaagctacagagatccccgtctactctttccatcatcatcaacgtatgtcggagaaaaaatatatctacggtgcaagcgtcattattgtggaaggtatcatggcgcttcaatctgcagaattgagggaattgtacgacctcaaggtcttcgtaaactgcgattcagatctcatgctagcaagacgtataaagcgagatgtcaaggagcgagggcgtgatgtggaaggtatcctcgaccagtatttgcggtttgttaagagtagctacgatacttttgtccagccctcatcacgctatgccgatataatcgttcccgggtcttcaaatcaacttgccatcgaacttcttgtctcgcatatcaagcgccagctcgagtctcgttctcttcggttccgtagagtgctagccgatattggtgaaaatcgcggcagcagcactccctcagtggaaaaatttgacaagcagatcgttttgcttgagcaaagtaaccagctgcgtggtatcatgacaatacttcgcgatcgcaccacttgtcgagaggagttcatcttccatatcgatcgtttatcaaccatcatcgtggagaaagcccttacacttattccctgtgagcccaaggttgtgaaaacaccgaataaaaatgtctacaaaggtgtttcccagaccaaaaaccttgtgggggtatccattctccgctctggtcttccattctctcaaggtcttcgtcgagtcatccgtgatgtgcctatcggtggtatactcatccagtccgatcccaagactggcgagccattgttattgaaaagtgatctccctcattgcttgagatcgcggaagacaaatggagatgtcagatgtttgctgttggattcgcagatgggtacgggtgcggctgctatgatggccattcgcgtactccttgaccatggcatttctcagaaccgtatcatattccttacatacctcatctctcgctcagcctcatattctgtcctccgcgcattccctaatattcagatcgttacggcggctattgaccccggtctggacgaggtgaagatttcctacatgccaggaagtctcattattggcgaggcggctggtgagggtgatttcgcgatcaggctagtcgatcagttaggacatgaagaggacgggaagagggataatgtgaaagatctgttgaagacggatgaggagctggctgcggatggtttcaagatgaatatcttgaagggaacagaggaattgaaattttctagaaagcataaaaggacatattcatcaacaggagagaagagggcatgggtcatttccccaggcatgggccatgttggagatcggtattatctcgtttga

SEQ ID NO: 9016 - protein, 578 aa, Cryptococcus neoformans var. neoformans B-3501A
MEQPAGYRTPRPQKHSVYDPTQPRSKNQVLISHGRAPWYGPDGRNIEAYVVGIAGGSASGKTSVARAILSALNYIPTVLILSQDSFYNAHSPEEVELAFKNDLDLDHPDAIDMTLFAQCIKDLKQGKATEIPVYSFHHHQRMSEKKYIYGASVIIVEGIMALQSAELRELYDLKVFVNCDSDLMLARRIKRDVKERGRDVEGILDQYLRFVKSSYDTFVQPSSRYADIIVPGSSNQLAIELLVSHIKRQLESRSLRFRRVLADIGENRGSSTPSVEKFDKQIVLLEQSNQLRGIMTILRDRTTCREEFIFHIDRLSTIIVEKALTLIPCEPKVVKTPNKNVYKGVSQTKNLVGVSILRSGLPFSQGLRRVIRDVPIGGILIQSDPKTGEPLLLKSDLPHCLRSRKTNGDVRCLLLDSQMGTGAAAMMAIRVLLDHGISQNRIIFLTYLISRSASYSVLRAFPNIQIVTAAIDPGLDEVKISYMPGSLIIGEAAGEGDFAIRLVDQLGHEEDGKRDNVKDLLKTDEELAADGFKMNILKGTEELKFSRKHKRTYSSTGEKRAWVISPGMGHVGDRYYLV

SEQ ID NO: 9017 - DNA, 816 bp, Tribolium castaneum
  CDS (1)..(816)
atgtgtgatgcaaaactaaatgggaaagtaaatgggttggacggaaaaacgccgtttttgatcggtgtttcaggtggtaccgctagtggcaagagtaccgtttgtaaacgtattatggagaaactagggcaggtggatgttgaccacacacagagacaagttgtttgcatttcgcaggatagtttttacagggatttaacccccagtgagatacagaaagctgaaaaggggctgttcaattttgatcaccctgacgctttcaatgaaagcttgatgaaggagactctgatggatattttagcgggaaaaatagtccaaattccgacttacgactacaaaaatcattccttacgtaaggatgaaattataactatatatccagcggacgttgtgctgtttgagggaatcttggtgttttattttccagaggttcgcaaattattccacatgaaattgtttgtggacactgattctgatacaagattggccagaagagttccaagagatattaatgaacgtggacgcgatctggaacaagttttgtgccaatacatgaattttgtaaaaccagcatttgaggagttttgctcacctacgaaaaaattcgctgatgttataattccaaggggggcggataatacagtggccatcgagttaattgtgcaacatatcagagaaattttaagtaacagacaaagggcatctgaggaaagaattgttcaagtggctgcagctgctgtaaatctaacaccagtgcattcaccagccaaaaaagtcaattctggaggagacggccaatttaaacgacctcattaa

SEQ ID NO: 9018 - protein, 271 aa, Tribolium castaneum
MCDAKLNGKVNGLDGKTPFLIGVSGGTASGKSTVCKRIMEKLGQVDVDHTQRQVVCISQDSFYRDLTPSEIQKAEKGLFNFDHPDAFNESLMKETLMDILAGKIVQIPTYDYKNHSLRKDEIITIYPADVVLFEGILVFYFPEVRKLFHMKLFVDTDSDTRLARRVPRDINERGRDLEQVLCQYMNFVKPAFEEFCSPTKKFADVIIPRGADNTVAIELIVQHIREILSNRQRASEERIVQVAAAAVNLTPVHSPAKKVNSGGDGQFKRPH

SEQ ID NO: 9019 - DNA, 1734 bp, Tribolium castaneum
  CDS (1)..(1734)
atggcagggaaaataattaacattttcgaccccccgtcctctgcgagttcagaaagcgatgttggcgaaactcaggcggatttttctgaagtgtttcccgactgcgaaggggatgaggagaaaagcggcgatttttacaacactccagcttcgcctattacagttccctactgcccgaggcccccatccacaggtaacacccctcacgtcaaagccacagctaatgcccccttgccagggtcccaaaaatccccaagatcccggagacagcgaaccacgtctctgaaccaatcgtcaaagaaatcagctgcagagtcgatgattcgcacgcaacaccgcacgatctacacagcgggcaggcccccgtggtacaacagtgaaggtcaaaaggtagagcctctgatcataggaatttgtggtggaagtgcctcagggaaaacgacagtggctgagaaaatcatagaggctttgggggttccatgggtcactttgctcagtatggattcgttttataaagtcctaaatgaaaaacagcgcgagatagccaatagaaatgaatataattttgaccatcctgacgcttttgattttgatctcttgttcagcactttacagaggttgaaagaagggaggaaagttgaggtcccgatttacaatttcgtgacgcatgcacgtgaaagtaggacgaaaaccatgtacggagccaacgttataatctttgaaggaattttctcgtttcacaacccgaaagtgctcgaaatgttagatatgaaaatcttcgttgacaccgacgcagatgtacgtctagtccgtagattaagaagagacattagtcaaagaggcagagacttagatggcgttcttaaacaatactgtggcatggtccaaccatcattcaaccattacatcgcccctttaaaagtccacgccgatataatcgttccaagaggcggagagaacgaagttgccatccaacttatagtccaacatgttcacacccaattgcagttgcgcgggttcaaattaagggaagaactggcacaaattcacgccaggtctggccaacctagacctgacactttaaaactgctgccaaccacaccacaaatcaggggactccacaccttcatcaggaacaaagacacaccaagggacgagtttattttttacagcaaacgtctgattcggcttgtgattgaatacactttatccttgatgcaattcaatgagaaaatagtagagacacctcaaggcgtacaatataaagggaaacgaatggcgactgacaaaatctgcggtgtctcgattttacgcgccggtgagacaatggagcaggctgtgtgtgacgtgtgcaaggatatccgaatagggaaaattttaattcagactaatttacaaacaggagaacctgagttgtattatttaagacttcccaaagacatcaaagactacaaagtcattctaatggatgcgactgtggccacaggggctgcagctatgatggcgatcagagttttgttggatcatgacgttccagagagcaacatacttatagtgtctctactgatggcagaatctggggtaaattcgatagcttacgcgtttccgaaagtccagatcgttaccactgctattgacccggaaatcaacgataagttttatgttcttcccgggatggggaatttcggggacaggtatttcggaactgaaccgtcagacgatttgctacaataa

SEQ ID NO: 9020 - protein, 577 aa, Tribolium castaneum
MAGKIINIFDPPSSASSESDVGETQADFSEVFPDCEGDEEKSGDFYNTPASPITVPYCPRPPSTGNTPHVKATANAPLPGSQKSPRSRRQRTTSLNQSSKKSAAESMIRTQHRTIYTAGRPPWYNSEGQKVEPLIIGICGGSASGKTTVAEKIIEALGVPWVTLLSMDSFYKVLNEKQREIANRNEYNFDHPDAFDFDLLFSTLQRLKEGRKVEVPIYNFVTHARESRTKTMYGANVIIFEGIFSFHNPKVLEMLDMKIFVDTDADVRLVRRLRRDISQRGRDLDGVLKQYCGMVQPSFNHYIAPLKVHADIIVPRGGENEVAIQLIVQHVHTQLQLRGFKLREELAQIHARSGQPRPDTLKLLPTTPQIRGLHTFIRNKDTPRDEFIFYSKRLIRLVIEYTLSLMQFNEKIVETPQGVQYKGKRMATDKICGVSILRAGETMEQAVCDVCKDIRIGKILIQTNLQTGEPELYYLRLPKDIKDYKVILMDATVATGAAAMMAIRVLLDHDVPESNILIVSLLMAESGVNSIAYAFPKVQIVTTAIDPEINDKFYVLPGMGNFGDRYFGTEPSDDLLQ

SEQ ID NO: 9021 - DNA, 642 bp, Erwinia carotovora subsp. atroseptica SCRI1043
  CDS (1)..(642): transl_table=11
atgactgatcagtctcaccagtgcgtcatcatcgggatctcaggagcgtccgcttcgggtaaaagtcttatttccagcaccttgtatcgtgaattgcgcgatcaggttggtgatcagcatatcggggtgatatctgaggacagttattataaagaccaaagccacctgaccatggaagagcgggtaaaaactaactatgaccacccaagctcgatggatcacagcctgctaatcaaacatttgcagatgctgaaatccggtcaggccatcgaagtcccgcagtacagctatgtcgagcacacccgtaaacaggaaacagtgcatattgaactgaaaaaggtcattatcctggaaggtattctgctgctgacggatgcgcgcctgcgcaatgagatgaatttctctatttttgtcgatactccactggatatttgcctgctgcgccgtatgcgtcgcgacgttaatgagcgtggccgttcaatggactccgtgatggaacagtatcaaaagaccgtgcgcccgatgttcctgcaattcattgaaccctctaagcagtatgccgatattatcgtgccgcgtggcgggaaaaaccgcattgcgattgatattttgaaagcgaagataagccagttttttgagtag

SEQ ID NO: 9022 - protein, 213 aa, Erwinia carotovora subsp. atroseptica SCRI1043
MTDQSHQCVIIGISGASASGKSLISSTLYRELRDQVGDQHIGVISEDSYYKDQSHLTMEERVKTNYDHPSSMDHSLLIKHLQMLKSGQAIEVPQYSYVEHTRKQETVHIELKKVIILEGILLLTDARLRNEMNFSIFVDTPLDICLLRRMRRDVNERGRSMDSVMEQYQKTVRPMFLQFIEPSKQYADIIVPRGGKNRIAIDILKAKISQFFE

SEQ ID NO: 9023 - DNA, 627 bp, Mesoplasma florum L1
  CDS (1)..(627): transl_table=4
atgtcaaaaaatgtaactttaatacttatagctggtggaacagcatcaggaaaaacaactgttgctgatagaatagctaatgaaattttaaaaggtaaatcggtaactcatatttcaatggataattattataaagattttggtgaattgactttagaagaaagaaggaaaataaactttgatcatccaaatagtgtggatactgaactacttttaaatgacttgcaagctttaaaagactatcaaccaatcaaggtgccggtttatgattttaaaacttcttcaagaaccaaagaaacaattacagttaaacctagtgatgttgtaatacttgatggaatttttgcactagctattaaagagattagaaaacttggagatatcaaaatttttataaaaacagctaatgatttaaggtttattagacgtttacaaagagatgtaaatgaaagagggagaactttagaaagtgttgttgaacaatacttaaatgaagttaaaccaatgcatgatgcatttattgggccaagtattgaatacgctgatttaataattccttataaagaggggaatgaagttgcagttgatttagtagcaactaaaatattaacattgttaacagagtaa

SEQ ID NO: 9024 - protein, 208 aa, Mesoplasma florum L1
MSKNVTLILIAGGTASGKTTVADRIANEILKGKSVTHISMDNYYKDFGELTLEERRKINFDHPNSVDTELLLNDLQALKDYQPIKVPVYDFKTSSRTKETITVKPSDVVILDGIFALAIKEIRKLGDIKIFIKTANDLRFIRRLQRDVNERGRTLESVVEQYLNEVKPMHDAFIGPSIEYADLIIPYKEGNEVAVDLVATKILTLLTE

SEQ ID NO: 9025 - DNA, 639 bp, Streptococcus pyogenes MGAS10394
  CDS (1)..(639): transl_table=11
ttggagtttaaaatgcttaaaaaaccgattattattggtgtaactggtggttcaggtggcggtaaaacaagtgtgtcacgcgctattttggacagttttccaaatgctcgtattgcaatgattcaacacgattcttactataaagatcagtctcacatgagttttgaagaaagggtcaagaccaattatgaccatcctctagcttttgatacagattttatgattcagcaactaaaagaattattagctggtagacctgtagatattcctatctatgattacaaaaagcatacccgcagtaatacgacctttcgtcaggatcctcaggatgttattattgttgaaggtattcttgtcctagaagatgagcgtttgcgagatttgatggatatcaagctctttgtagacacagatgacgatattcgtattattcgtcgtattaagcgtgacatgatggaacgtggcagaagcttagaaagtattattgatcagtacacaagcgtggtaaagcctatgtatcatcagtttattgagccaagtaaacgctatgctgatattgttattccagagggagttagtaatgtcgttgctattgatgttattaatagtaaaattgcgagtattcttggagaagtatag

SEQ ID NO: 9026 - protein, 212 aa, Streptococcus pyogenes MGAS10394
MEFKMLKKPIIIGVTGGSGGGKTSVSRAILDSFPNARIAMIQHDSYYKDQSHMSFEERVKTNYDHPLAFDTDFMIQQLKELLAGRPVDIPIYDYKKHTRSNTTFRQDPQDVIIVEGILVLEDERLRDLMDIKLFVDTDDDIRIIRRIKRDMMERGRSLESIIDQYTSVVKPMYHQFIEPSKRYADIVIPEGVSNVVAIDVINSKIASILGEV

SEQ ID NO: 9027 - DNA, 621 bp, Borrelia garinii PBi
  CDS (1)..(621): transl_table=11
atggctaagattattgggatatctggtggttctggaagcggaaaaactacagttgtaagcaagattagtgagtttattccagagtttgtccttatttctcaagataattattataagagtgtaggtgattatgaatatgagttttctaaggtgaattttgatcatccagatgcttttgataataatttattttatgagcatctgaaaaatttaaaaaaaaatagcccaatagatatgcctctgtatgactttattaatcataaaagacaacttaaaacggttatggttgttcctacccctgttattattgttgaaggtattatgatttttgttgaagagagagtaagaaatttaatagatcttaaaatatatattgacactccaaatgatattagatttattaggcgtttaaagagagatatttccaaaaggggacgtactttagagtcggttattgatcagtatttaaataccactagatggggttattatagatttattgagcctaccaaagaatatgctgatcttattattcccgaaggaggtcacaatgataaagctctttatgtgctttcaacgtttcttaagtctttaagtaaagaaggtctagattttgtctaa

SEQ ID NO: 9028 - protein, 206 aa, Borrelia garinii PBi
MAKIIGISGGSGSGKTTVVSKISEFIPEFVLISQDNYYKSVGDYEYEFSKVNFDHPDAFDNNLFYEHLKNLKKNSPIDMPLYDFINHKRQLKTVMVVPTPVIIVEGIMIFVEERVRNLIDLKIYIDTPNDIRFIRRLKRDISKRGRTLESVIDQYLNTTRWGYYRFIEPTKEYADLIIPEGGHNDKALYVLSTFLKSLSKEGLDFV

SEQ ID NO: 9029 - DNA, 636 bp, Symbiobacterium thermophilum IAM 14863
  CDS (1)..(636): transl_table=11
atgccagccccgagggcagtgatcgcgatcgccgggggcacgggctccgggaagaccaccatcgccaactacatctcggccgcgttcccggacgacgtggcgctgctgccccacgatgcctactacaaggacaaccggaacctcacctacgaagagcggagccagctcaactacgaccaccccgacgccttcgacaacgacctgttcatcgcccacctgaaggcactgaaggctggccaggcggtggagcggccggtgtacaacttctcgacccacctgcgggagcaccagaccctgcgggtggagccggcggcgatcatcgtcgtggaaggcgtactggtgctggcgcatccggagctgcgcgccctgtacgacctcagcgtgttcgtggacaccgacgccgacgtgcgcatcctgcgccggatcgtgcgtgacatccacgagcgcgggcgcaccctggattcggtgatcaaccagtacctgtccaccgtcaagcccatgcatgaggccttcgtcgagccgagcaagcggtacgccaacgtcatcattcccgagggggcccacaacaaaccggggctcgaggtcctgatcgcgcaggtccgccacctgatcgcccagcatgaaccctcagcctga

SEQ ID NO: 9030 - protein, 211 aa, Symbiobacterium thermophilum IAM 14863
MPAPRAVIAIAGGTGSGKTTIANYISAAFPDDVALLPHDAYYKDNRNLTYEERSQLNYDHPDAFDNDLFIAHLKALKAGQAVERPVYNFSTHLREHQTLRVEPAAIIVVEGVLVLAHPELRALYDLSVFVDTDADVRILRRIVRDIHERGRTLDSVINQYLSTVKPMHEAFVEPSKRYANVIIPEGAHNKPGLEVLIAQVRHLIAQHEPSA

SEQ ID NO: 9031 - DNA, 639 bp, Bacillus cereus E33L
  CDS (1)..(639): transl_table=11
atggggacgaataagcctgttgtaattggaattgctggtggttcagggtcaggtaagacaagtgtaacgaaagcgatttttgaccattttaaaggtcattccattttaatcttagagcaagattattattacaaagatcaaagccatttaccaatggaagaacgtttaaaaacaaattatgatcatccattagcgtttgataatgatttgttaattgaacatttgcagcagttgcttgcatataaacaagtagataaacctgtatatgactatacattgcatacgcgttcagaagaaattattccagttgagccgaaagatgtaatcattttagaaggaattcttattttagaagacccacgtctttgtgagttaatggacattaagctattcgttgatacagatgcggaccttcgtatcctgcgccgcatgcagcgtgatattaaagaacgcggtcgtacgatggattcagttattgatcaatatgtaaatgttgtacgtccaatgcacaatcaatttattgagccttctaagaagtttgcggatattattatccctgaaggtggacaaaaccacgttgcaattgatattatggttacaaaaattgcaacaattcttgaacaaaaagtaaatttgtaa

SEQ ID NO: 9032 - protein, 212 aa, Bacillus cereus E33L
MGTNKPVVIGIAGGSGSGKTSVTKAIFDHFKGHSILILEQDYYYKDQSHLPMEERLKTNYDHPLAFDNDLLIEHLQQLLAYKQVDKPVYDYTLHTRSEEIIPVEPKDVIILEGILILEDPRLCELMDIKLFVDTDADLRILRRMQRDIKERGRTMDSVIDQYVNVVRPMHNQFIEPSKKFADIIIPEGGQNHVAIDIMVTKIATILEQKVNL

SEQ ID NO: 9033 - DNA, 651 bp, Mannheimia succiniciproducens MBEL55E
  CDS (1)..(651): transl_table=11
atgtcagattcagcaaattcatcttgcattattattgccattgccggtgcttccgcatcgggtaaaagtttaattgcctctacggtgcatcgcgagttgcgagatcaggtgggtagcgacgatatcagtattatttccgaagattgttattataaagatcaaagtcacttagattttgctacccgtacccaaaccaattacgaccatccgaattcaatggatagagatttgctgcttgaacatttgcgcgcattaaaagccggtaaatccgtggatattccccaatacagctatgtagaacacacccgcatgaaagaagtgacgcattttactcctaaaaaagtcattattttagaagggattttgctgttaaccgatgaacgtgtacgtaatgaattaagcctgtccttattcgttgacgcgccgttggatatttgttttattcgtcgcttaaaacgggatatggaagaacgcggtcgttctttggaatccgtcattgaacaataccgcaaaaccgtgcgaccgatgtttttgcaatttattgaaccctctaaacaatatgcggatattattattccgcgtggcggtaaaaaccgtattgcaatcaatatgttaaaagcacaaattctacatttgttaggccgcaagtaa

SEQ ID NO: 9034 - protein, 216 aa, Mannheimia succiniciproducens MBEL55E
MSDSANSSCIIIAIAGASASGKSLIASTVHRELRDQVGSDDISIISEDCYYKDQSHLDFATRTQTNYDHPNSMDRDLLLEHLRALKAGKSVDIPQYSYVEHTRMKEVTHFTPKKVIILEGILLLTDERVRNELSLSLFVDAPLDICFIRRLKRDMEERGRSLESVIEQYRKTVRPMFLQFIEPSKQYADIIIPRGGKNRIAINMLKAQILHLLGRK

SEQ ID NO: 9035 - DNA, 723 bp, Legionella pneumophila subsp. pneumophila str. Philadelphia 1
  CDS (1)..(723): transl_table=11
atgcttttcataagactggagagaatgattgaattccaactgaaaaaactttactattcgtacaaaatttttaatgaaaacattatgacaaagcaagcaattattattgggatttccggcccatcagcatctggaaaaagtttattagcaaatactatagtcaatgaattaggatccgagcaggttgtcgttatctctgaagatgcctactataaagataatgggcatctaccctttacagagagagaaaaaataaattacgatcatcctgactcctttgatcatgctctactttatgagcatcttcgtcagctacgagttggaaatacagtacaaattcctatttattctcattccaaacatctgcgtttacctgaaaccagagcagtgggtcaacatgccattattgtactcgaaggaatactgcttttcagtgataaagctctacgagaaattatggatatacgtatattcatgtcgactcctcttgacgtctgtttaacgcggcgcttaaaaagagatgtagtagaaaggcatcgatcatttgaatcggttattcatcaatatgagactacagttcgccctatgtacatgcaatttattgagccttcaagccgctacgctgatataatagtacctcgcggcggtgaaaacagaatcgctatagagatgattcaagctaaaatgcgggaattattagcttcacatactcgaggcagttga

SEQ ID NO: 9036 - protein, 240 aa, Legionella pneumophila subsp. pneumophila str. Philadelphia 1
MLFIRLERMIEFQLKKLYYSYKIFNENIMTKQAIIIGISGPSASGKSLLANTIVNELGSEQVVVISEDAYYKDNGHLPFTEREKINYDHPDSFDHALLYEHLRQLRVGNTVQIPIYSHSKHLRLPETRAVGQHAIIVLEGILLFSDKALREIMDIRIFMSTPLDVCLTRRLKRDVVERHRSFESVIHQYETTVRPMYMQFIEPSSRYADIIVPRGGENRIAIEMIQAKMRELLASHTRGS

SEQ ID NO: 9037 - DNA, 651 bp, Colwellia psychrerythraea 34H
  CDS (1)..(651): transl_table=11
ttgaaaccaattaaaccaacaattattgctatcgctggcccttcggcctcaggcaagactctttttgccaaaacaatacatgatgagcttattgatgagcttggtgacagtggtatttctattatttatgaagatgcttattatcgtgaccaatctcatttgtccatgcaagagcgtgagcaaactaactatgatcatcccagtgcatttgaacacgaacttttatcagagcacttaaaaaaactcactgaaaatcagatgattaatagtcctgtttattgttacaaaactcatacccggctcgatgagagtaaaaagtttttacccactaaaataattctagttgaaggtatattacttttatctaacaaggaattaagagagtgttttgacattaaggtctacatggatacaccattagacatatgtctcattagaagaattaagcgagatttagttgaacgtaaccgcagtattgaatcggtcactaaccaatatttagcaacggttaggccaatgtattatcaatttattgaaccctctaaagcttgggctgatattgttattacccgaggaggtaaaaatagaatggcaattgaggtgatcaaagcaaaaattcgacaactttcacaattacccccacaacaataa

SEQ ID NO: 9038 - protein, 216 aa, Colwellia psychrerythraea 34H
MKPIKPTIIAIAGPSASGKTLFAKTIHDELIDELGDSGISIIYEDAYYRDQSHLSMQEREQTNYDHPSAFEHELLSEHLKKLTENQMINSPVYCYKTHTRLDESKKFLPTKIILVEGILLLSNKELRECFDIKVYMDTPLDICLIRRIKRDLVERNRSIESVTNQYLATVRPMYYQFIEPSKAWADIVITRGGKNRMAIEVIKAKIRQLSQLPPQQ

SEQ ID NO: 9039 - DNA, 606 bp, Acidobacteria bacterium Ellin345
  CDS (1)..(606): transl_table=11
atgaaaccgtatttgatcgggatcgctgggccctccggcgcaggcaagagctatctcgccgaacatcttgcgcacgagttgaagagcgcgacgctgattccgattgacgcttactatcccgacctttcgcatctctcctttgaagaccgtgagcggctgaacttcgacgatccaaacattctcgacacggacttgctcttcatgcaggtggcggcgctggcgaagggcgagggcatcgagcagccgctatacgacttcagcaggcatacgcgcctccaagaaacgcgcgaagttcctccgacggagtacatcattgtcgaaggcctgtttacgctctattgggagcggctgcgaacgatgctgcctacgagggtctatgtcgagatggacgatgcggtgtgcttcgagcggcgggcggagcgggatgttcgcgagcgcggccgaaagcctgaatatgtcgcgcagcagtttcgggagtcggtgatcccggcaaccgaggcgttcgtgcggccgaccgcggcctatgccaatgtgaagctctacggcacggcggacattgccgaggaggttgccgcggttctcgcgcacatccggcagagttgctga

SEQ ID NO: 9040 - protein, 201 aa, Acidobacteria bacterium Ellin345
MKPYLIGIAGPSGAGKSYLAEHLAHELKSATLIPIDAYYPDLSHLSFEDRERLNFDDPNILDTDLLFMQVAALAKGEGIEQPLYDFSRHTRLQETREVPPTEYIIVEGLFTLYWERLRTMLPTRVYVEMDDAVCFERRAERDVRERGRKPEYVAQQFRESVIPATEAFVRPTAAYANVKLYGTADIAEEVAAVLAHIRQSC

SEQ ID NO: 9041 - DNA, 636 bp, Myxococcus xanthus DK 1622
  CDS (1)..(636): transl_table=11
atggcgtcccccctcgtcgtcggaatcgcgggcggcaccgcgtccggcaagaccaccgttgcccgcaaggtacgcgaggcattggccgattgccgcgtggccttcatcgatcaggattcatactaccgggacttgaaggaccttccgctggcggacaggcgtgaggtgaacttcgaccacccggatgccttcgacagagagctgctggttcagcacctgcaagcgctgaagtccgggcagcccatccagaagcccgtctacgacttcgtcacttcgtcgcgtacgccgcagacgaagaaagtggaccccggcgacatcatcctcatcgagggcatcctggtgctccacatgaaggaggtccgggatgagatggacgtgaagatctacgtcgacgcggacgacgaccttcgcatcctccggcgcctcacccgcgacatcaaggaccgtggccgcgacttcgaccacgtggtgagccagtacctgcgccacgtgcggcccatgcacatgggcttcgtggagccgtccaagcacttcgcggacatcatcatcccgcacggcggcaacaacgagattgccatcggcatgctggtgggcgcgcttcgcggcaagctctctggcgccgtgaatcgggactag

SEQ ID NO: 9042 - protein, 211 aa, Myxococcus xanthus DK 1622
MASPLVVGIAGGTASGKTTVARKVREALADCRVAFIDQDSYYRDLKDLPLADRREVNFDHPDAFDRELLVQHLQALKSGQPIQKPVYDFVTSSRTPQTKKVDPGDIILIEGILVLHMKEVRDEMDVKIYVDADDDLRILRRLTRDIKDRGRDFDHVVSQYLRHVRPMHMGFVEPSKHFADIIIPHGGNNEIAIGMLVGALRGKLSGAVNRD

SEQ ID NO: 9043 - DNA, 642 bp, Haemophilus somnus 129PT
  CDS (1)..(642): transl_table=11
atgtcagatcagtcttgtattattattgccattgctggtgcgtcagcatcggggaaaagtttaattgcatcgactattcatgaggaactgtgtaatgaattaggctgtgaggaaattggtattgtgacggaagacagttattacaaagaccaaacgcatctttcttttgaggaacgtattaaaacaaattatgatcatccaaattcaatggatcgtgatttactaattcaacatttatgcgatctaaaaaagggtaaagccgttgatattccagtttatagctatgttgaacatacaagaacccaagaagtaactcggtttgagcctaaaaaagtaattattttggaggggatcttgttattaacagatgagcgtattcgtcaggaggtaaatatgtcggtttttgttgatacacctttggatatttgctttattcgccgtttacaacgtgatatggaagaacgtggtcgctcattacagtctgtcattgatcaatataaatccacggttcgtccaatgttcttacaatttattgagccatcaaaacaatatgctgatatagttgttcctcgtggtggcaagaatcgagttgcgattaatatgttaaaagtgcaaattcaacatttgttaaataacaaataa

SEQ ID NO: 9044 - protein, 213 aa, Haemophilus somnus 129PT
MSDQSCIIIAIAGASASGKSLIASTIHEELCNELGCEEIGIVTEDSYYKDQTHLSFEERIKTNYDHPNSMDRDLLIQHLCDLKKGKAVDIPVYSYVEHTRTQEVTRFEPKKVIILEGILLLTDERIRQEVNMSVFVDTPLDICFIRRLQRDMEERGRSLQSVIDQYKSTVRPMFLQFIEPSKQYADIVVPRGGKNRVAINMLKVQIQHLLNNK

SEQ ID NO: 9045 - DNA, 687 bp, Hyphomonas neptunium ATCC 15444
  CDS (1)..(687): transl_table=11
atgacaaagaagaaatccttcctgattgcgatgtcgggcggttcgggctcgggaaaatcgacgctggccgaagcgctgctggaacatctggggccgggaaaggccgtgatgttcggcgaggacgcctattatcacccgatgcgcttttacggcacgccgcaaactgtggccgaacgcgaagccctggtggcgggcatcaactatgacgaccccaaatccaaggaggttgatcacctggtatcagacctcaaggcgctgaaagcgggggaggcggtcgagcagccgatttatgactatgagcgccatgaccggtccaccaatacgcggcgcattgagtcggcgccggtgctgatccttgaagggattcacgccctctcgatgcccaagatccgcaacttcattgatctgtcggtgtatgtggatacgccggacgatctgcgcctggcacggcgcatccggcgggacgtgatcgagcggggccggacggtggactcggtgctggcgcaatacatgtcgaccgtgcgctctgcccattaccgctggacgcatccggcgaagtttgacgcggatctggtgatcgccgacgagggcctgcctgcttatggcaatgtgaaaccgaccggtgaggcgattgagcggatgatcgcgccggtgctggcgcggcttcagacggccggggtgatctga

SEQ ID NO: 9046 - protein, 228 aa, Hyphomonas neptunium ATCC 15444
MTKKKSFLIAMSGGSGSGKSTLAEALLEHLGPGKAVMFGEDAYYHPMRFYGTPQTVAEREALVAGINYDDPKSKEVDHLVSDLKALKAGEAVEQPIYDYERHDRSTNTRRIESAPVLILEGIHALSMPKIRNFIDLSVYVDTPDDLRLARRIRRDVIERGRTVDSVLAQYMSTVRSAHYRWTHPAKFDADLVIADEGLPAYGNVKPTGEAIERMIAPVLARLQTAGVI

SEQ ID NO: 9047 - DNA, 657 bp, Pediococcus pentosaceus ATCC 25745
  CDS (1)..(657): transl_table=11
atgagtacaaagaacagcccaataattattggggtaaccgggggatccggtagtggaaaaacaactgttagtcaaaaaattcttgaagaattacatggtcattcgatttctatcattcaacaagattcgtattacaaagatcaagctgaaaaaacgatggaagaacgccgggcggttaattacgaccatccactggcctttgatgccgaccttttatatgaacatttaaaaatgttgaaaaacaaccaaaaaatcgaagttcctatttatgattataaaatttcgacgcgaagttcagaagttattgaacaagacccaaccgacgtgattatccttgaggggattttaatcctagcagatgagcgaattcgtgatatgttagacattaaggtttacgttgatactgatgatgatattagaattattcgtcgtattcgtcgcgatatggaacaacgtgcacgaacattagattcaatcattaatcaatatttaacgggtgttaaacccatgtaccaccaatttattgagccaaccaagcgctatgctgatgtgattgttcctgaaggtggaaaaaacagtgtggcgattgatttattggttacaaaagttcgcgatattctatcagaagatgggcgcgatgagagttttaataaataa

SEQ ID NO: 9048 - protein, 218 aa, Pediococcus pentosaceus ATCC 25745
MSTKNSPIIIGVTGGSGSGKTTVSQKILEELHGHSISIIQQDSYYKDQAEKTMEERRAVNYDHPLAFDADLLYEHLKMLKNNQKIEVPIYDYKISTRSSEVIEQDPTDVIILEGILILADERIRDMLDIKVYVDTDDDIRIIRRIRRDMEQRARTLDSIINQYLTGVKPMYHQFIEPTKRYADVIVPEGGKNSVAIDLLVTKVRDILSEDGRDESFNK

SEQ ID NO: 9049 - DNA, 633 bp, Oenococcus oeni PSU-1
  CDS (1)..(633): transl_table=11
atgcaaaatgataaagatcagcctataatcatcatcggaatcacaggtgggtcgggttccggaaaaacatcgatcgctcgagatattcacaaccaattaaaaaaacaatctgtggctattattcctcaagatgccttttataacgaccaaacatcaatgtcgatcgagcaaagaaagaagatcaattacgatcatccggattcttttgatagcgacttgttttataacgatttattaaaattaaaaaataggcaaaaaatccaactaccaatttacgattatgaaaaatatactcgttctaaaaaaacaattttaattaatccggcaagagttatcattgtcgagggtgtcttattatttgtcgatcagcgaattagaaacttgttggatataaaaatttatgtagacgctgatgatgatattcgttttatcagacgattgaagagagatatttccgaacgtggtcgaacgaccgattcgatcattaatcaatatttaaaaaccgtgaaaccaatgtaccatcagtttgtcgaaccaacaaaaaggtatgccgacgtaattattccggaaggtgagagtaaccaagtcggaataaatttgctaatcaatcagataaagaccattttaaattag

SEQ ID NO: 9050 - protein, 210 aa, Oenococcus oeni PSU-1
MQNDKDQPIIIIGITGGSGSGKTSIARDIHNQLKKQSVAIIPQDAFYNDQTSMSIEQRKKINYDHPDSFDSDLFYNDLLKLKNRQKIQLPIYDYEKYTRSKKTILINPARVIIVEGVLLFVDQRIRNLLDIKIYVDADDDIRFIRRLKRDISERGRTTDSIINQYLKTVKPMYHQFVEPTKRYADVIIPEGESNQVGINLLINQIKTILN

SEQ ID NO: 9051 - DNA, 624 bp, Solibacter usitatus Ellin6076
  CDS (1)..(624): transl_table=11
atgagtgcacacattattggtgtagcgggtccgtccagctccgggaaatccgagctggcgcggcaactggcagagagattgcccgggacctccatcgtttccctggattcgtactaccgaggaatggaagagatcccgctcgaggagcggaagaaggtcaatttcgaccatcccgattccctggactgggagttgttgcacgagcaccttgtggcgatcgccgccggtcgcgcgttcgacgaaccggtttacagtttcgcggattatgagcgaaccacggagacgcggcgcatcgaaccgacggagttcctgattgtggagggcctcttcgtgctctactggcccgagcttcgcaagatgctggacaccaaagtctacgtgcagacggattccgcggtctgttttcagcggcggttgtcgcgcgatgtagcggagcgcgggcgcactccggagagcgtgcgcgagcagtacgagcgcacggtacggccgagcgcggagtggttcgtgtacccgacggagaagtacgccgatttgcgggtaagcggtgaagagccgttcgagcgttcgacggcggcggtgctgaaggcgctgcaccgggccaaagcggcggcgggcggagcgtaa

SEQ ID NO: 9052 - protein, 207 aa, Solibacter usitatus Ellin6076
MSAHIIGVAGPSSSGKSELARQLAERLPGTSIVSLDSYYRGMEEIPLEERKKVNFDHPDSLDWELLHEHLVAIAAGRAFDEPVYSFADYERTTETRRIEPTEFLIVEGLFVLYWPELRKMLDTKVYVQTDSAVCFQRRLSRDVAERGRTPESVREQYERTVRPSAEWFVYPTEKYADLRVSGEEPFERSTAAVLKALHRAKAAAGGA

SEQ ID NO: 9053 - DNA, 642 bp, Haemophilus somnus 2336
  CDS (1)..(642): transl_table=11
atgtcagatcagtcttgtattattattgccattgatggtgcgtcagcatcggggaaaagtttaattgcatcgactattcatgaggaattgtgtaatgaattaggctgtgaggaaattgggattgtgacggaagacagttattacaaagaccaaacgcatctttcttttgaggaacgtattaaaacaaattatgatcatccaaattcaatggatcgtgatttactaattcaacatttatgcgatgtaaaaaagggtaaagccgttgatattccagtttatagctatgttgaacatacaagaacccaagaagtaactcggtttgagcctaaaaaagtaattattttggaggggatcttgttattaacagatgagcgtattcgtcaggaggtaaatatgtcggtttttgttgatacacctttggatatttgctttattcgccgtttacaacgtgatatggaagaacgtggtcgctcattacagtctgtcattgatcaatataaatccacggttcgtccaatgttcttacaatttattgagccatcaaaacaatatgctgatatagttgttcctcgtggtggcaagaatcgagttgcgattaatatgttaaaagtgcaaattcaacatttgttaaataacaaataa

SEQ ID NO: 9054 - protein, 213 aa, Haemophilus somnus 2336
MSDQSCIIIAIDGASASGKSLIASTIHEELCNELGCEEIGIVTEDSYYKDQTHLSFEERIKTNYDHPNSMDRDLLIQHLCDVKKGKAVDIPVYSYVEHTRTQEVTRFEPKKVIILEGILLLTDERIRQEVNMSVFVDTPLDICFIRRLQRDMEERGRSLQSVIDQYKSTVRPMFLQFIEPSKQYADIVVPRGGKNRVAINMLKVQIQHLLNNK

SEQ ID NO: 9055 - DNA, 654 bp, Actinobacillus pleuropneumoniae serovar 1 str. 4074
  CDS (1)..(654): transl_table=11
atgtctgaaaccattgaaaaccaagcttgtatcgtgattgctatcgcaggtgcctccgcatcgggtaaaagtcttattgcttcaacaatttataaagaattaaaagaagaacttaactcggacgatatcggtatcatttcggaagatgcttattataaagatcaaacccatttgaccatggaagaacgggttaaaacgaattacgatcatccgaactcaatggatcatcacctactcgttgaacatctccgtcaattaaaacaaggagaagcgattgagatccccgaatatgactattcggaacataaccgtaaaacgacaaccaaaaatttcacacctaaaaaaatcattattctcgaaggtattctgttacttaccgatgaagaaattcgtaatgaaatcaacgtttctattttcgtagatgcgccgttagatatttgctttattcgccgtttacagcgcgatatgctagaacgcggcagaacgatggattccgttatcgctcaatatcgtaaaacggtgcgtccgatgtttttacaatttatcgaaccgtcaaaacagtatgcggatattatcgtcccgaaaggcggtaaaaaccgtattgcgatcaatattttaaaagctcaaattaaacagttattatctaaacgatag

SEQ ID NO: 9056 - protein, 217 aa, Actinobacillus pleuropneumoniae serovar 1 str. 4074
MSETIENQACIVIAIAGASASGKSLIASTIYKELKEELNSDDIGIISEDAYYKDQTHLTMEERVKTNYDHPNSMDHHLLVEHLRQLKQGEAIEIPEYDYSEHNRKTTTKNFTPKKIIILEGILLLTDEEIRNEINVSIFVDAPLDICFIRRLQRDMLERGRTMDSVIAQYRKTVRPMFLQFIEPSKQYADIIVPKGGKNRIAINILKAQIKQLLSKR

SEQ ID NO: 9057 - DNA, 648 bp, Exiguobacterium sibiricum 255-15
  CDS (1)..(648): transl_table=11
atgcaaaaaccggttgtaattggtgtggctggaggaactggttcaggaaagacgacggtcgcacgttcacttgtcgacgcattcccgagtgaatccatcgtcatgatcgagcaggatgcttactataaggaccaaagtgaattatcgatggaagagcgctatcaaacaaactatgatcatccatttgcctttgaccatgatctgctgattgaacatatcaaagcgttgcgcgaaaaccaggcggttgaaaaaccggtctatgattacgttgcgcacacacgggcaacggagacgattccgcttgatccacgtgacgtcatcatcgtcgaaggtattttagcgcttgaagatgaacgtttacgggaatcgatggatattaaagtcttcgtggatacagatgccgatgttcggattctgcgccggatgcaacgtgatatgaatgaacgaagacgttcgattgattctgtcgtcgagcagtatacgaaagtcgtccgtccgatgcatcttcagttttgtgaacccacaaaacgatatgccgacatcattgttcccgaaggtggagaaaaccatgtggcaatcgatttactcgtcacgaagatccgtgcgattctcgattatcgatcttcacttgatcaaagaggatattga

SEQ ID NO: 9058 - protein, 215 aa, Exiguobacterium sibiricum 255-15
MQKPVVIGVAGGTGSGKTTVARSLVDAFPSESIVMIEQDAYYKDQSELSMEERYQTNYDHPFAFDHDLLIEHIKALRENQAVEKPVYDYVAHTRATETIPLDPRDVIIVEGILALEDERLRESMDIKVFVDTDADVRILRRMQRDMNERRRSIDSVVEQYTKVVRPMHLQFCEPTKRYADIIVPEGGENHVAIDLLVTKIRAILDYRSSLDQRGY

SEQ ID NO: 9059 - DNA, 609 bp, Croceibacter atlanticus HTCC2559
  CDS (1)..(609): transl_table=11
atgctcattataggaattgctggcggtactggctgtggaaaaacaacggtggtcaatcaaattatagatcagttagctacagaagatgtggcagttatttctcaagaccattactacaaagacacatctaaccttactcttgagcagcgtacaaagataaattttgatcatcctcagtccatagattttcctttactaacgcaacatttaaacgatcttagaaacaacaaacctatagagcaacccgtatattcttttgtagagcataaccgcactggagaaactacaaccacataccctaccaaggtaatgattgtagaaggtattttaattcttacaaatcctgagttacgagacctattcgacattaagatttacgtgcacgcagatagtgatgaacgtttaataaggcgtttaaaacgtgatattgcagaacgtggcagagatttagaagaggtgcttaaccgctaccaaacgacgttaaaaccaatgcaccagcaatttatagaacctaccaaggagtttgcagatatgattattcctaacaacagatataataccgtagctgttgatattgtacagagtatcataagagaacgtcttacctaa

SEQ ID NO: 9060 - protein, 202 aa, Croceibacter atlanticus HTCC2559
MLIIGIAGGTGCGKTTVVNQIIDQLATEDVAVISQDHYYKDTSNLTLEQRTKINFDHPQSIDFPLLTQHLNDLRNNKPIEQPVYSFVEHNRTGETTTTYPTKVMIVEGILILTNPELRDLFDIKIYVHADSDERLIRRLKRDIAERGRDLEEVLNRYQTTLKPMHQQFIEPTKEFADMIIPNNRYNTVAVDIVQSIIRERLT

SEQ ID NO: 9061 - DNA, 630 bp, Pseudoalteromonas tunicata D2
  CDS (1)..(630): transl_table=11
gtgacccgaactattatagccattgctggtgcttcagcttcaggtaagtctttgtttagccagacaatatatagtgaattggtcaatgagctcgaaccaggtgcaattgctatcattgaagaagatgcatattaccgcgaccaatctcatttgccttttgctcatcgtacgcaaacaaattacgatcatcctgatgcgtttgagcatgaactgatgctgtcacatttgaatcaattacgtcaaggcgagtcggttgatgtaccaatttatgattatgcacaacatacgcgcagtgataaaaccagaaaagtactgccagcaaaaattttaattgttgaaggtattttattactgtgtgataaaaaattatgtgatgaatttaatattaaagtgtttattgatacaccacttgatatttgtctaatgcgcagaatgaaacgggatatggaagagcgtggtcgttctttgcaatctgtgattgaacaatatacatcgacggtaagaccaatgttttatcaatttattgagccgtcaaaacataactctgaccttgtggtcacccgtggtggtaaaaatcgtgtcgcgatcgatatcattaaaagcaaaataaaacagctattacaacaataa

SEQ ID NO: 9062 - protein, 209 aa, Pseudoalteromonas tunicata D2
MTRTIIAIAGASASGKSLFSQTIYSELVNELEPGAIAIIEEDAYYRDQSHLPFAHRTQTNYDHPDAFEHELMLSHLNQLRQGESVDVPIYDYAQHTRSDKTRKVLPAKILIVEGILLLCDKKLCDEFNIKVFIDTPLDICLMRRMKRDMEERGRSLQSVIEQYTSTVRPMFYQFIEPSKHNSDLVVTRGGKNRVAIDIIKSKIKQLLQQ

SEQ ID NO: 9063 - DNA, 645 bp, Photobacterium sp. SKA34
  CDS (1)..(645): transl_table=11
atgtctgaaaatttacaccaatgcgttattattggtattgcaggtgcttctgcatccggtaaaagtctgattgccagtactgtatataaagagctaaaagaaaaagtaggcgatcatcagatcggtgttattacggaagattgttactataacgatcaaagtcacctgaccatggatgagcgggtcaaaactaactatgatcacccgaatgcgcttgatcatgatttactttgtgatcatctagagcagttaatcaaaggtgaagcagtagaagttccacagtacagttacagtgaacatacacgtatgaaagagacgactttattaacacctaaaaaggtgattattttagagggtattcttttacttactgatccgagactacgcgatattatgcatgcaagtgtatttatggatacgcctcttgatatctgtctacttcgtcgtttacaacgtgatgttgcagagcgtggtcgtacaatggaatctgtgcttgttcagtatcaaaagacggtgcgtcctatgttcatgcaatttattgaaccgtcaaaacaatatgctgatatcattgttccacgtggtggtaagaaccgtatagctatcgacgtacttaaagcacatatagcgaagttgttacgttcttaa

SEQ ID NO: 9064 - protein, 214 aa, Photobacterium sp. SKA34
MSENLHQCVIIGIAGASASGKSLIASTVYKELKEKVGDHQIGVITEDCYYNDQSHLTMDERVKTNYDHPNALDHDLLCDHLEQLIKGEAVEVPQYSYSEHTRMKETTLLTPKKVIILEGILLLTDPRLRDIMHASVFMDTPLDICLLRRLQRDVAERGRTMESVLVQYQKTVRPMFMQFIEPSKQYADIIVPRGGKNRIAIDVLKAHIAKLLRS

SEQ ID NO: 9065 - DNA, 618 bp, Flavobacteria bacterium BBFL7
  CDS (1)..(618): transl_table=11
atgcttatactaggaatagccggtggtacaggaagtggaaaaactacggtagtggaccaaatggttcatacctatcccgatcacgaggtgaatgttatttcgcaagactcctattataaagacacatctcatttaagctatgaggagcgtgttaaaatcaactttgatcatcctggaagtatagactttgaattattagagaaacacttactagaacttaaagaaggtaaaacaattgatcaaccggtttactcttttgtagagcacaaccgtactggtgaagtggtaaaaacagctccttctaaagttgttatcgtagaagggattttaatcctgactcaaccacgcattagagatctatttgatattaaagtttacatagattgcgatagtgatgaacgattgatacgcaggttgaaacgagatatcgcagatcgcggtcgagatctgacagaagttctagagcgttatcaaaacaccttaaaacccatgcatcagcaatttattgagcccactaaggcttatgcagatgttatcatacctactaatcgatttaatacagtaggtgttcaaatcttaagaggtataatagatcaacgattggctgaattttcttaa

SEQ ID NO: 9066 - protein, 205 aa, Flavobacteria bacterium BBFL7
MLILGIAGGTGSGKTTVVDQMVHTYPDHEVNVISQDSYYKDTSHLSYEERVKINFDHPGSIDFELLEKHLLELKEGKTIDQPVYSFVEHNRTGEVVKTAPSKVVIVEGILILTQPRIRDLFDIKVYIDCDSDERLIRRLKRDIADRGRDLTEVLERYQNTLKPMHQQFIEPTKAYADVIIPTNRFNTVGVQILRGIIDQRLAEFS

SEQ ID NO: 9067 - DNA, 771 bp, Rickettsiella grylli
  CDS (1)..(771): transl_table=11
ttggttcatgatccctgtattcattttataggaacgttggcgccatttaccttttttaaaaaacctgctaacttacgaacatttattaaatacgaaaaacctatgacgcaacgttgtatcatcatcggtatcgccggcgcttcagcttcgggtaaaagtttattggcccataccatcgtcaaagaattaggctctgagcaagttgctgttatttccgaagattcttattataaagataacagcacccttgcttttgagaaacgtttagaaaataattatgaccatcctgatgcattcgatcacgacctacttatcgaacatcttaaacaattacaagcgggccaatcggcagaaattcctatttataatcatacgttgcatattcgtgaacaagaaacacgacgtctaggaccgcataacattattgttttagaaggcattttactttttgctgaaattaatttaagagaattgatggatatctgtatttatatggatacccctttagatgtttgtttgagccgccgcatccagcgtgatgtcattgaacgaggaagagatattgaagccgtattaaggcaatatcaacaaacggttcgtccgatgtattctcaattcatagagccttcaaagcattatgcagacatcattgttcctcgaggaggggaaaatcgaattgccattgaacttatcaaagcaaaaatccgcgaactattaaatcattttagccttaaaaacaaagagggaaaccatgggtctgttaaacgataa

SEQ ID NO: 9068 - protein, 256 aa, Rickettsiella grylli
MVHDPCIHFIGTLAPFTFFKKPANLRTFIKYEKPMTQRCIIIGIAGASASGKSLLAHTIVKELGSEQVAVISEDSYYKDNSTLAFEKRLENNYDHPDAFDHDLLIEHLKQLQAGQSAEIPIYNHTLHIREQETRRLGPHNIIVLEGILLFAEINLRELMDICIYMDTPLDVCLSRRIQRDVIERGRDIEAVLRQYQQTVRPMYSQFIEPSKHYADIIVPRGGENRIAIELIKAKIRELLNHFSLKNKEGNHGSVKR

SEQ ID NO: 9069 - DNA, 642 bp, Vibrio sp. Ex25
  CDS (1)..(642): transl_table=11
atgtctgataataatcaatgcgtcatcgtaggtattgctggcgcttctgcttctggaaaaagtctgatcgcgagcactatttataatgagcttcgcgcgaaagtaggcgatcatcaaatcggtgtcatcacggaagattgctactacaacgaccaaagccacctaagcatggaagagcgagtaaagacgaactacgatcacccgagtgcgttggaccacgacctactgtgtgagcaccttgaaaaattggtacgtggtgaagcagtagaagtacctgagtacagctacactgaacacacaagaacaagtaacacgaccacaatgacgcctaaaaaggtgatcattctagaaggtatccttcttcttactgaccctcgtcttcgtgatttgatgcacgcgacagtatttatggatacaccgttagatatttgcttgcttcgtcgtgttaagcgtgacgtggaagaacgaggccgaactatggaatctgttctcaagcagtatcaacaaacagtacgtccgatgttcatgcagtttatcgaaccttctaagcaatatgcggacattattgttcctcgcggtggtaaaaaccgtatcgcaatcgatgtattaaaagctcacattgcaagacttttgaaagcttaa

SEQ ID NO: 9070 - protein, 213 aa, Vibrio sp. Ex25
MSDNNQCVIVGIAGASASGKSLIASTIYNELRAKVGDHQIGVITEDCYYNDQSHLSMEERVKTNYDHPSALDHDLLCEHLEKLVRGEAVEVPEYSYTEHTRTSNTTTMTPKKVIILEGILLLTDPRLRDLMHATVFMDTPLDICLLRRVKRDVEERGRTMESVLKQYQQTVRPMFMQFIEPSKQYADIIVPRGGKNRIAIDVLKAHIARLLKA

SEQ ID NO: 9071 - DNA, 633 bp, Alteromonadales bacterium TW-7
  CDS (1)..(633): transl_table=11
gtgacacgaacaactattatagctattgctggcgcgtctgcgtcgggcaaatctctgtttagccaaactatatacaacgagttggttaatgagcttgaaccgggcgcaattgccattattgaagaagatgcttattacaaggatcagtcgcatttgccgatggctcatcgtacgcaaacgaactacgaccaccctgatgcatttgaacatgagttaatgcttgaacatttaactcaacttcgtagtggaaattcagtagaagtaccaacatatgattatgcacagcatacccgcagcgataaaacgcgacgtgtagccgctgcaaaaattttaattgttgaaggtattttattactgagcgacaaagcgcttaataaagaatttgatattaaggtgtttatagacacccctttagatatctgcttaatgcgtcgtatgcaacgtgatatggagcagcgaggcagaacgttacaatctgttgttgaacagtatcaagcaactgtaagaccgatgttttatcaatttattgagccttctaagcataatgcagatttagtagtgactcgaggcggcatgaaccgcgttgcgattgatattataaaaagtaaaattaaatatttactacaagaataa

SEQ ID NO: 9072 - protein, 210 aa, Alteromonadales bacterium TW-7
MTRTTIIAIAGASASGKSLFSQTIYNELVNELEPGAIAIIEEDAYYKDQSHLPMAHRTQTNYDHPDAFEHELMLEHLTQLRSGNSVEVPTYDYAQHTRSDKTRRVAAAKILIVEGILLLSDKALNKEFDIKVFIDTPLDICLMRRMQRDMEQRGRTLQSVVEQYQATVRPMFYQFIEPSKHNADLVVTRGGMNRVAIDIIKSKIKYLLQE

SEQ ID NO: 9073 - DNA, 639 bp, marine gamma proteobacterium HTCC2080
  CDS (1)..(639): transl_table=11
atggaaaagataggagatgagtgcctgatgattgtggctattacgggagcatcgggttcgggaaaatcgacactggcgcaatcgctggtcaaatctagcctcagcgtagccagtggccctgcggcttgtctgttaagtcttgacgcctactatcgtgatttgagtcacttttctcttgcacagcgcgagggcgttaactttgaccggatagaagctattgatcttcctttgttttgcgaacatttgtctaagctgaaatcaggcgggcaaatcgaggttcctcggtacgacttttctaaacacacgcgcattgcggaccacaccgatgtgctcggtccagcgcagttggttgttgtggatggtttacttctgggggcatgggctgaactgacgtcgaacgttgattacacaattttcgtagatacaccaacgaacgtatgcctgcagcgacgattgcaaagagactgcggtgagcgggggcgcagcgaggcctccgtacatgagttttggaattcgagggtattacccgagtttcagcgatggggtgagggcgctaaacgaagggcagacctggtggtcagtggagaggttcccacggccttggccactgctgaggtttgggacgcactgtcattttaa

SEQ ID NO: 9074 - protein, 212 aa, marine gamma proteobacterium HTCC2080
MEKIGDECLMIVAITGASGSGKSTLAQSLVKSSLSVASGPAACLLSLDAYYRDLSHFSLAQREGVNFDRIEAIDLPLFCEHLSKLKSGGQIEVPRYDFSKHTRIADHTDVLGPAQLVVVDGLLLGAWAELTSNVDYTIFVDTPTNVCLQRRLQRDCGERGRSEASVHEFWNSRVLPEFQRWGEGAKRRADLVVSGEVPTALATAEVWDALSF

SEQ ID NO: 9075 - DNA, 1629 bp, Ostreococcus tauri
  CDS (1)..(1629)
atgagcgctctcaacgtgcgcgactcttacgacgtgaacgcgctggagatcccaccgatggagcagcgaacgaaggtccaaggcgtcggggcgcacgtgagcgcatcgatcggttcgcccgaagtcgggtcgccgacaaagtactttacgaagatgttggagaacaactgctcggcgggcaaggcgagacgcgggatgaatggagaattcgtctccacgtacgacgagcgcatcgcgcgatgcggaggaaaccgtgaaccgttcctcatcggcgtcgccgggggcacggcgagcggtaagacgacggtgtgcgatttaatcatgcaaaacttgcaggagcaacgcgtggtgctcatcgcgcaagattcattctaccggccactcaccgcacacgagcgagagaacgtgggatcgtacaactttgatcatccggacgcaatcgatacagcatgtctgaaggatgtgttgcacaagctcatgctgcgactgcccgtggacgtgcccgtgtacgatttcgtcacgcactcgcgaagcgaagagactattcgcatcgagagcggcgacgtcatcattatcgagggaattttggtgctggcgatggaagagattcgcaacatgtgtcatatgaaagtttttgtcgacacggacgatgacttgcgattggcgagacgtttgaagcgagacacggtggatcgcggacggagcgtcgacggagtcatcacgcagtacacgatgttcgtgaaaccgatgttcgacgcgtacgtttcgccgagcaagcgacacgccgatgtcatcattccttgggctcaaggtgaaaactctgtggccatcgatttgatcgtgcagcacattcgcacgaaactgggccaaaacgacttgcgacgaatatatcgcaacctggtcgttcttccgccgcaatttcaaatcagagggatgcacaccataattcgcgatcgttcggtgaacagaagcgactttgtcttctacagcgatcgtatcattcgtctcgtcgtcgagcacgggttagggcatcttccgttcaacgaacacgtcgtcttcacgcccaccggcgaccagtacaagggcgtgacgttttgcagcaaactgtgcggggtgtccatcattcgctccggggaggcgatggagaacgcccttcgcgcgtgctgcaaagggatcaaaatcggtaaactgctcatcgagcgtcgtgacagggatggactgcgtcgcgctgagagcgatcccaaagtcggttcgccgcagtcggagacctgtccgagaatcttgtacgagaagcttccgcacgatatcgcggatcgtttcgtgctcgttttagacccaattttagccacgggcgtaagcgcgcaggccgcggtcgatttacttctcgatcgcggcgtgaaggaggaaaagattctctttctgagcgtcatcgcgtcaacgcaaggcgtgcaccacttatgcacgaggtaccctcggatgaaggtaatcacctccgaggtcgacgccggattgagtgacgataacaaagtgttaccgggcgtaggcgagttcggggatcgctactttggcacggaaatcccgtccatggcgtcgttgcaaaccgaccaggatggcacgttgttcgactaa

SEQ ID NO: 9076 - protein, 542 aa, Ostreococcus tauri
MSALNVRDSYDVNALEIPPMEQRTKVQGVGAHVSASIGSPEVGSPTKYFTKMLENNCSAGKARRGMNGEFVSTYDERIARCGGNREPFLIGVAGGTASGKTTVCDLIMQNLQEQRVVLIAQDSFYRPLTAHERENVGSYNFDHPDAIDTACLKDVLHKLMLRLPVDVPVYDFVTHSRSEETIRIESGDVIIIEGILVLAMEEIRNMCHMKVFVDTDDDLRLARRLKRDTVDRGRSVDGVITQYTMFVKPMFDAYVSPSKRHADVIIPWAQGENSVAIDLIVQHIRTKLGQNDLRRIYRNLVVLPPQFQIRGMHTIIRDRSVNRSDFVFYSDRIIRLVVEHGLGHLPFNEHVVFTPTGDQYKGVTFCSKLCGVSIIRSGEAMENALRACCKGIKIGKLLIERRDRDGLRRAESDPKVGSPQSETCPRILYEKLPHDIADRFVLVLDPILATGVSAQAAVDLLLDRGVKEEKILFLSVIASTQGVHHLCTRYPRMKVITSEVDAGLSDDNKVLPGVGEFGDRYFGTEIPSMASLQTDQDGTLFD

SEQ ID NO: 9077 - DNA, 1410 bp, Arabidopsis thaliana
  CDS (1)..(1410)
atgggttctaagtccgttgttgacatgatcgaagctgcctcgcgggcacatttttctggtttacacgtgaatgggcacatgaatgggttggaaccaagtgcacttaaggaaaccacttctgcatcagaagatatccaaagacagccttttgtaataggtgttgctggaggcgcagcatcgggaaagactactgtttgtgatatgataatccagcaactgcacgatcagcgtgttgtacttattaacctggactcgttctatcataatctgactgaagaagaacttgctagagttcatgaatacaactttgatcatccagacgcatttgacacagagcatttattgtcttgtatggagaaattgaggcaagggcaagctgtagatattccaaaatatgattttaaaacttacaggagcagtgttttcagaagggtaaatcctacagatgtaataattcttgaagggatacttttgttccatgatccacgcgtccgaaagttgatgaacatgaagatttttgtttgcacagatgctgacgttcgtttggcaagaaggataaaaagagatactgtcgagaatggtagagatatcggcacagtacttgaccagtactcaaagtttgtgaagcctgcttttgatgacttcattcttccaacgaagaaatatgcagatattataatccctcgtggtggggataatcatgtagctattgacttaattgtgcaacatatttgcaccaagctgggtcaacatgatctctgtaaaatatatcctaatctctacgttatacactcgacatttcagataagagggatgcacacccttatacgagattctcagacaaccaaacatgattttgtcttctattctgatcgattgattaggctggttgtagaacatggtcttggacatctgccttttactgaaaagcaagtgattactccaaccggatgtgtgtattctggtgtggatttctgtaaacggttatgtggtgtctcggtgattaggagtggtgagagcatggagaatgcgttacgagcatgttgcaaaggtatcaagatcgggaagatcctaattcacagagaaggtgacaatggtcaacagcttgtttatgagaaattgccaaatgatatctcagagaggcatgtcctattgttggatcctattctcgggacaggaaactcagcggttgaagctatcaacctccttataagcaagggcgtacctgagggaaacatcatatttctaaaccttatctcagcacctcaaggtgttcatgtggtctgcaaaaaattcccaagaataaagatagtgacatctgaaatcgataatgggttaaacgaagagtttcgtgttattcctggtatgggggagtttggggacagatattttggcacagacgatgactag

SEQ ID NO: 9078 - protein, 469 aa, Arabidopsis thaliana
MGSKSVVDMIEAASRAHFSGLHVNGHMNGLEPSALKETTSASEDIQRQPFVIGVAGGAASGKTTVCDMIIQQLHDQRVVLINLDSFYHNLTEEELARVHEYNFDHPDAFDTEHLLSCMEKLRQGQAVDIPKYDFKTYRSSVFRRVNPTDVIILEGILLFHDPRVRKLMNMKIFVCTDADVRLARRIKRDTVENGRDIGTVLDQYSKFVKPAFDDFILPTKKYADIIIPRGGDNHVAIDLIVQHICTKLGQHDLCKIYPNLYVIHSTFQIRGMHTLIRDSQTTKHDFVFYSDRLIRLVVEHGLGHLPFTEKQVITPTGCVYSGVDFCKRLCGVSVIRSGESMENALRACCKGIKIGKILIHREGDNGQQLVYEKLPNDISERHVLLLDPILGTGNSAVEAINLLISKGVPEGNIIFLNLISAPQGVHVVCKKFPRIKIVTSEIDNGLNEEFRVIPGMGEFGDRYFGTDDD

SEQ ID NO: 9079 - DNA, 783 bp, Drosophila melanogaster
  CDS (1)..(783)
atgcaagatttgaggaacgccgacacgctgcgactgccaaatggcgacggagcagcagccaacgacgaggtcaagtcgccgtttctaatcggcgtcgccggcggaacggccagcggcaagtccaccgtgtgcaaaaagatcatggagcaacttgggcaggcggaaatggatcacacgcagcgccaggtggtgtccatcagtcaggacagcttctaccgcgaactgacgcccgccgagaaggccaaggcccagaagggcctcttcaacttcgatcatccggatgccttcaacgaggagctcatgtacagcacgcttcagaacatcttaaagggccacaaagtggagatacccagctatgactaccgcaccaactctctcgactttgaaaacgttctggttatctacccagccgacgtggtcttgttcgagggcatcttggtattttacttccccaagatacgagaactgttccacatgaagctgttcgtggacacagaccccgataccaggttggccaggagagtgccacgtgatatcaatgagcgtggtcgggacttggatgcggtgctcacccagtatatgaccttcgtaaagccggctttcgaggagttctgctcgcccacgaaaaagtttgctgacgttattataccacgaggcgccgacaacacagttgccattgatcttattgtacaccatatcggggagattctcgccactaccaacagcgcacagcacagcaacacagtcagggtagcggcgtctagcatgaagcgagatcactaa

SEQ ID NO: 9080 - protein, 260 aa, Drosophila melanogaster
MQDLRNADTLRLPNGDGAAANDEVKSPFLIGVAGGTASGKSTVCKKIMEQLGQAEMDHTQRQVVSISQDSFYRELTPAEKAKAQKGLFNFDHPDAFNEELMYSTLQNILKGHKVEIPSYDYRTNSLDFENVLVIYPADVVLFEGILVFYFPKIRELFHMKLFVDTDPDTRLARRVPRDINERGRDLDAVLTQYMTFVKPAFEEFCSPTKKFADVIIPRGADNTVAIDLIVHHIGEILATTNSAQHSNTVRVAASSMKRDH

SEQ ID NO: 9081 - DNA, 783 bp, Drosophila melanogaster
  CDS (1)..(783)
atgcaagatttgaggaacgccgacacgctgcgactgccaaatggcgacggagcagcagccaacgacgaggtcaagtcgccgtttctaatcggcgtcgccggcggaacggccagcggcaagtccaccgtgtgcaaaaagatcatggagcaacttgggcaggcggaaatggatcacacgcagcgccaggtggtgtccatcagtcaggacagcttctaccgcgaactgacgcccgccgagaaggccaaggcccagaagggcctcttcaacttcgatcatccggatgccttcaacgaggagctcatgtacagcacgcttcagaacatcttaaagggccacaaagtggagatacccagctatgactaccgcaccaactctctcgactttgaaaacgttctggttatctacccagccgacgtggtcttgttcgagggcatcttggtattttacttccccaagatacgagaactgttccacatgaagctgttcgtggacacagactccgataccaggttggccaggagagtgccacgtgatatcaatgagcgtggtcgggacttggatgcggtgctcacccagtatatgaccttcgtaaagccggctttcgaggagttctgctcgcccacgaaaaagtttgctgacgttattataccacgaggcgccgacaacacagttgccattgatcttattgtacaccatatcggggagattctcgccactaccaacagcgcacagcacagcaacacagtcagggtagcggcgtctagcatgaagcgagatcactaa

SEQ ID NO: 9082 - protein, 260 aa, Drosophila melanogaster
MQDLRNADTLRLPNGDGAAANDEVKSPFLIGVAGGTASGKSTVCKKIMEQLGQAEMDHTQRQVVSISQDSFYRELTPAEKAKAQKGLFNFDHPDAFNEELMYSTLQNILKGHKVEIPSYDYRTNSLDFENVLVIYPADVVLFEGILVFYFPKIRELFHMKLFVDTDSDTRLARRVPRDINERGRDLDAVLTQYMTFVKPAFEEFCSPTKKFADVIIPRGADNTVAIDLIVHHIGEILATTNSAQHSNTVRVAASSMKRDH

SEQ ID NO: 9083 - DNA, 1506 bp, Saccharomyces cerevisiae
  CDS (1)..(1506)
atgtcccatcgtatagcaccttccaaagaacgatcttcatcatttatttcaattttagacgatgaaacaagagacacattgaaagctaatgcagtcatggatggtgaagtagatgtcaaaaaaacaaaaggaaaaagctctcggtatatcccaccatggacaactccatatataataggtataggtggtgcttcaggttcaggcaagacaagcgttgctgctaagattgtgtcgtcaattaatgttccctggacagtattaatatctttggataacttttacaatccattaggcccagaggacagagccagagcctttaaaaatgaatacgatttcgacgagccaaatgccatcaacttagatttggcatataagtgcattttgaacttaaaggagggcaaaaggacaaatatcccagtttatagcttcgtccaccacaatagagttcctgataaaaatatagtcatatacggggccagtgtggtagttatcgaagggatctacgccctttacgatcgccgattgctggatttgatggacttgaaaatttatgttgacgctgatttggatgtctgcttagcaagaagattgtcgagagatatagtttccagagggagagatttggatggttgtattcaacaatgggagaaatttgtgaaaccaaatgcggtaaagtttgtgaaaccaacaatgaagaatgcagatgctatcattccatcgatgagtgataatgctacagcggtaaatttaatcattaaccacatcaagtcaaaactggaactaaaatcaaatgaacacttaagagagctaatcaaattgggctcttctccttcacaagatgtgcttaatcgtaacataattcatgaattgccgcccaccaaccaagttctttcgctgcatactatgcttctaaataaaaatctaaattgcgcggactttgttttctactttgacaggttagcaacaattttgttatcatgggcacttgatgacattcctgtagcacatacgaacataattacacctggtgagcataccatggaaaacgttattgcctgtcaattcgatcaagttacagctgttaatattattcgatctggcgattgttttatgaagtctttgagaaagacgatccccaatatcacaattggtaaattgttgattcagtccgattcacaaactggggaacctcaactgcattgcgaatttttacccccaaatatagaaaagtttggcaaggttttcttaatggaaggtcaaatcataagtggtgcggccatgatcatggccatccaggtgcttttagatcatggtattgatttggaaaagattagcgtggtggtttatttggccactgaagttggtatccgacgtatattaaatgcatttgataacaaagtcaacatttttgctggtatgatcatctccagagaaaagttacaaaatcatcaatacaaatgggcattgaccagattttttgattcaaagtattttggttgtgattga

SEQ ID NO: 9084 - protein, 501 aa, Saccharomyces cerevisiae
MSHRIAPSKERSSSFISILDDETRDTLKANAVMDGEVDVKKTKGKSSRYIPPWTTPYIIGIGGASGSGKTSVAAKIVSSINVPWTVLISLDNFYNPLGPEDRARAFKNEYDFDEPNAINLDLAYKCILNLKEGKRTNIPVYSFVHHNRVPDKNIVIYGASVVVIEGIYALYDRRLLDLMDLKIYVDADLDVCLARRLSRDIVSRGRDLDGCIQQWEKFVKPNAVKFVKPTMKNADAIIPSMSDNATAVNLIINHIKSKLELKSNEHLRELIKLGSSPSQDVLNRNIIHELPPTNQVLSLHTMLLNKNLNCADFVFYFDRLATILLSWALDDIPVAHTNIITPGEHTMENVIACQFDQVTAVNIIRSGDCFMKSLRKTIPNITIGKLLIQSDSQTGEPQLHCEFLPPNIEKFGKVFLMEGQIISGAAMIMAIQVLLDHGIDLEKISVVVYLATEVGIRRILNAFDNKVNIFAGMIISREKLQNHQYKWALTRFFDSKYFGCD

SEQ ID NO: 9085 - DNA, 636 bp, Bacillus halodurans
  CDS (1)..(636): transl_table=11
atggggaaaagaccaatcatcatcggcgtagccggagggactggctctggaaaaacaaccgtagcgaaggaaatattttatcaatttaatgaaaaatcgatcgtattaattgagcaagatgcatattataaagatcaatcacagttaagcttagaagaacgcttgcagacgaactatgaccatcctcttgcatttgacaatgatttgttaattgaacatctgcatagcttattaaacggtcaagcgattgaaaagccagtatatgactacaagctgcatacacgttcaaatgaagtgatcctagtggaaccgaaagacgtgatcattcttgaggggatcttactacttgaagatgaacggttacgcgagctaatggacattaaactgtttgttgatacagatgcagatatccgcatcattcgccgaatggtgcgcgatattcgtgagcgtgggcgaacgttggaatcggtcatcgaacagtatacaaaggtcgtccggccaatgcatatgcaatttatcgaaccgacaaagcgttatgcagatgtaatcatccctgaagggggacaaaatcgggtagccattgatttaatggtgacaaaaattcgcgcaattattgaagaaaaagccgttttataa

SEQ ID NO: 9086 - protein, 211 aa, Bacillus halodurans
MGKRPIIIGVAGGTGSGKTTVAKEIFYQFNEKSIVLIEQDAYYKDQSQLSLEERLQTNYDHPLAFDNDLLIEHLHSLLNGQAIEKPVYDYKLHTRSNEVILVEPKDVIILEGILLLEDERLRELMDIKLFVDTDADIRIIRRMVRDIRERGRTLESVIEQYTKVVRPMHMQFIEPTKRYADVIIPEGGQNRVAIDLMVTKIRAIIEEKAVL

SEQ ID NO: 9087 - DNA, 636 bp, Bacillus subtilis
  CDS (1)..(636): transl_table=11
atgggtaagaatccagtagtcattggaatcgcaggaggttccggttcaggaaaaacgagtgtcacacggtccatttatgaacagtttaaaggacactcaattttaatgatccagcaggacctttattataaagaccaaagccatcttccgtttgaagaaaggctgaacacaaactatgatcatccgcttgcgtttgataatgactatttaatcgagcatattcaagatctattgaattaccgcccgattgaaaagccgatttatgactataagcttcacacacgttcagaagaaacggttcacgtagagccaaaggatgttattatccttgaaggcattcttgttcttgaagacaaaaggcttcgtgatctgatggatatcaagctttatgttgatacggacgctgacttgcgtatcatcagacggattatgagagatattaatgagcgcggacgctctattgattctgtcattgaacaatatgtgtcagtggtccgtccgatgcataaccaattcgtcgagccgacgaaacgatacgctgatattattatcccggaaggcggtcagaatcacgtcgcaattgatctgatggtcacaaaaattcaaaccattcttgaacaaaacgcgattttgtaa

SEQ ID NO: 9088 - protein, 211 aa, Bacillus subtilis
MGKNPVVIGIAGGSGSGKTSVTRSIYEQFKGHSILMIQQDLYYKDQSHLPFEERLNTNYDHPLAFDNDYLIEHIQDLLNYRPIEKPIYDYKLHTRSEETVHVEPKDVIILEGILVLEDKRLRDLMDIKLYVDTDADLRIIRRIMRDINERGRSIDSVIEQYVSVVRPMHNQFVEPTKRYADIIIPEGGQNHVAIDLMVTKIQTILEQNAIL

SEQ ID NO: 9089 - DNA, 669 bp, Chlamydia pneumoniae
  CDS (1)..(669): transl_table=11
atgttgatgatgcttatgatgattattggaattacaggaggttctggagctgggaaaaccaccctaacccaaaacattaaagaaattttcggtgaggatgtgagtgttatctgccaagataattattacaaagatagatctcattatactcctgaagaacgtgccaatttaatttgggatcatccggacgcctttgataatgacttattaatttcagacataaaacgtctaaaaaataatgagattgtccaagccccagtttttgattttgttttaggtaatcgatctaaaacggagatagaaacgatctatccatctaaagttattcttgttgaaggtattctggtctttgaaaatcaagaacttagagatcttatggatattaggatctttgtagacaccgatgctgatgaaaggatactacgccgtatggttcgagatgttcaagaacaaggagatagcgtggactgcatcatgtctcgttatctttctatggtaaagcctatgcatgagaaatttatagagccgactcggaaatatgctgatatcattgtacatggaaattaccgacaaaacgtagtaacaaatattttgtcacagaaaattaaaaatcatttagagaatgccctggaaagcgatgagacgtattatatggtcaactctaagtaa

SEQ ID NO: 9090 - protein, 222 aa, Chlamydia pneumoniae
MLMMLMMIIGITGGSGAGKTTLTQNIKEIFGEDVSVICQDNYYKDRSHYTPEERANLIWDHPDAFDNDLLISDIKRLKNNEIVQAPVFDFVLGNRSKTEIETIYPSKVILVEGILVFENQELRDLMDIRIFVDTDADERILRRMVRDVQEQGDSVDCIMSRYLSMVKPMHEKFIEPTRKYADIIVHGNYRQNVVTNILSQKIKNHLENALESDETYYMVNSK

SEQ ID NO: 9091 - DNA, 627 bp, Clostridium perfringens
  CDS (1)..(627): transl_table=11
atgaagagaccaatttttataggaataacaggaggcactggctcaggtaaaagtacaatagctaaggagatatatagacaatttggtgaagattgtatagcaatgatagagcaagattcatattataaggatcaaagccatttatcaatggaggatagagttaaaactaactacgatcatccaaatgcttttgataacaatcttttagtttcacatttagaatcacttttaaatggacattctatacaaaaacctagttatgacttctctatacataatagaattgaagatacaactaaggttgagccaaaagaaattgttattgtagaaggaatattaatactagaagatccaagaataagagaacttctagatataaagatttacgttgatacagatgctgatgttagaatcataagaagaatggtcagagacataaatgaaagaggaagaactatggagtctgttataaatcagtacttaaatgtagtaaagcctatgcataatcaatttacagaacctacaaagaaatttgctgatataataataccagaaggtggacataataaagttgctatagatattattgttgcaaaaataaaagaggttttaggaaaatacgaataa

SEQ ID NO: 9092 - protein, 208 aa, Clostridium perfringens
MKRPIFIGITGGTGSGKSTIAKEIYRQFGEDCIAMIEQDSYYKDQSHLSMEDRVKTNYDHPNAFDNNLLVSHLESLLNGHSIQKPSYDFSIHNRIEDTTKVEPKEIVIVEGILILEDPRIRELLDIKIYVDTDADVRIIRRMVRDINERGRTMESVINQYLNVVKPMHNQFTEPTKKFADIIIPEGGHNKVAIDIIVAKIKEVLGKYE

SEQ ID NO: 9093 - DNA, 630 bp, Clostridium tetani
  CDS (1)..(630): transl_table=11
atgagtaaaagaccgatattaataggtataactggtggaacgggctcaggaaagagcactgtaagtaaagaaatttgtagaagatttgataaagagcttatagttatgatagagcaagattcctattacaaggaccaaagtcatttatccattgaagaaagagttaaaactaattatgatcaccctaatgcttttgatacagagcttttagtaaagcatttaaaagagctttcatattggagtaaagtggaaaaacctatatatgattttgaattacataatagaaaaaatgaaacagaaattgtagaacctactgaaattataatagtagaaggaatattagtattagaagaaaaagaaataagagatctattagatataaagatttatgtggatacagatgcagatgtaagaataataagaagacttgttagagatataaaggaaagaggaaggtctttagattccgtaataaatcaatatttaaatgttgtaagacctatgcatatgcaatttatagaaccaagtaaaagatatgcagatataataatccctgagggaggacataataaagtcgccatagatataatcgtaggaaatataaaacagatggttcaaaaatcagaataa

SEQ ID NO: 9094 - protein, 209 aa, Clostridium tetani
MSKRPILIGITGGTGSGKSTVSKEICRRFDKELIVMIEQDSYYKDQSHLSIEERVKTNYDHPNAFDTELLVKHLKELSYWSKVEKPIYDFELHNRKNETEIVEPTEIIIVEGILVLEEKEIRDLLDIKIYVDTDADVRIIRRLVRDIKERGRSLDSVINQYLNVVRPMHMQFIEPSKRYADIIIPEGGHNKVAIDIIVGNIKQMVQKSE

SEQ ID NO: 9095 - DNA, 654 bp, Haemophilus ducreyi
  CDS (1)..(654): transl_table=11
atgccagaaaccattgaaaatcaagcttgtatcgttattgctattgcaggtgcttctgcttcaggtaaaagccttattgcttctaccatttataaagaactgaaagaagaattagattccaatgatatcgatattatttctgaagatgcttattataaagatcaaacgcatttaacgatggatgaacgtgagcaaaccaattacgatcatcccgattcaatggttcactatctattagttgaacaccttcgccaactaaagcaaggaaagcccattcaaattcctgaatatgattatgctaagcacaatcgaaaaacatctagtaagcattttgaacccaaaaaaattattattttagaaggcattttattgttaacgcatgaaacaatccgcaatgaaattaatgtttcaatctttgttgacgcgccattagatatttgtttcattcgccgtttacagcgtgatttaatcgaacgtggtcgctcaatggattcggtcatatcgcaatgccgaaaaactgtccgcccaatgtttttaaaatttattgagccatctaaacaatatgccgatattattatacccaaaggcggtaaaaaccggattgcgatcgatatattaaaagcccaaatcaaacaattattatcaaaaaaatag

SEQ ID NO: 9096 - protein, 217 aa, Haemophilus ducreyi
MPETIENQACIVIAIAGASASGKSLIASTIYKELKEELDSNDIDIISEDAYYKDQTHLTMDEREQTNYDHPDSMVHYLLVEHLRQLKQGKPIQIPEYDYAKHNRKTSSKHFEPKKIIILEGILLLTHETIRNEINVSIFVDAPLDICFIRRLQRDLIERGRSMDSVISQCRKTVRPMFLKFIEPSKQYADIIIPKGGKNRIAIDILKAQIKQLLSKK

SEQ ID NO: 9097 - DNA, 642 bp, Haemophilus influenzae
  CDS (1)..(642): transl_table=11
atgtcaaatccctcttgtatcatcatcgccatcacaggtgcatctgcatcaggcaaaagttctatcgcttccactgttcacaaagagctctgtaatgaactaggctgccaagaaattggtatcattactgaagacagttactataaagatcaaagtcatttagaaatgactgagcgggtaaaaacgaattacgatcatccaaactctatggatcgcgatttacttatccaacatttaaaaaatctaaaaaatggcagtgcagtagatgtgcctgtttatagctatgtagaacatactcgcaccaacgaaacaacgcatttcacaccaaaacgaatcgtaattttagaagggattttattacttaccgatgaacgagtacgccaattagccgatatttctgtattcgtagacacaccacttgatatttgtttcatccgccgtttacaacgtgatatggaagaacgtggtcgctctctacaatcagtgattgatcaatatcgtgcaaccgtgcgtccaatgttcttacaatttattgagccgtctaaacaatatgcggatattgtcattcctcgtggtggtaaaaatcgcattgcgatcaatatgttaaaagctcaaatccttcatttattgaatcaaaaatag

SEQ ID NO: 9098 - protein, 213 aa, Haemophilus influenzae
MSNPSCIIIAITGASASGKSSIASTVHKELCNELGCQEIGIITEDSYYKDQSHLEMTERVKTNYDHPNSMDRDLLIQHLKNLKNGSAVDVPVYSYVEHTRTNETTHFTPKRIVILEGILLLTDERVRQLADISVFVDTPLDICFIRRLQRDMEERGRSLQSVIDQYRATVRPMFLQFIEPSKQYADIVIPRGGKNRIAINMLKAQILHLLNQK

SEQ ID NO: 9099 - DNA, 678 bp, Halobacterium salinarium
  CDS (1)..(678): transl_table=11
atgaccatcccgtcgttcgcgatcggcatcgccggaggcacgggtgccggcaaaaccacggtcgcccgcgagatcaccgacaacgtgggcgagtcggcgacgctgattccgctggacaactactacgaggacctctcggaccgccccttcgaggagcgcgcgaacgccaactacgaccacccgtcggcgttcgagtgggagctgcttcgcacacacatcgacgccttgctgtccgggcagtcgatcgagatgccccagtacgacttcgagagacacgtccggaaggccgaccgggttgttgtcgaacccacggacgtgatcgtgctggaggggattctggcgctctccgacgagacggtcaacgacatgcttgatctccacatctacgtggaaacggacgccgacgttcgcatcctgcgccgcatcgagcgcgacgtcgtcgagcgcggccgcgaactggaaggcgtgatggaccagtatctctcgacggtgaagccgatgcacgagcagttcatcgaaccgacgaaacgacacgccgacatcatcatcccggagggcgcaaactcggtcgcggtgaacctgctcgaagagaaagtgcaggccgaaacctccgagatgacggcgtgggccgcccgcgacgacaccgccttcgaagacgccacctacaatccacagtag

SEQ ID NO: 9100 - protein, 225 aa, Halobacterium salinarium
MTIPSFAIGIAGGTGAGKTTVAREITDNVGESATLIPLDNYYEDLSDRPFEERANANYDHPSAFEWELLRTHIDALLSGQSIEMPQYDFERHVRKADRVVVEPTDVIVLEGILALSDETVNDMLDLHIYVETDADVRILRRIERDVVERGRELEGVMDQYLSTVKPMHEQFIEPTKRHADIIIPEGANSVAVNLLEEKVQAETSEMTAWAARDDTAFEDATYNPQ

SEQ ID NO: 9101 - DNA, 630 bp, Listeria monocytogenes
  CDS (1)..(630): transl_table=11
atgacaaaaaaaccaatcgtagtcggcgtaactggcggttcaggttccggtaaaaccagcgtaacgaaagccatttgtaatcattttagcgggcactcgattttgatgattgcacaagatgtttattatcacgatcaagccaatattagttttgaagatagattaaaagtaaattatgatcatccacttgcttttgatactgatttactcatttcacatattgcagcactgcgtcgctatgaatccattgaaaagccgatttatgattatgccaaatatacacgtaaaaaagaagtagaaatccaagaacctagagaagtcattattttagaagggattttaattttagaagataaacggcttagagacttaatggatattaaagtatacgtggataccgatgatgatattcgttttattcgcagacttttacgtgatatgaaagaacgtggtcggacaatggattccgttatcgagcaatatctttctgttgttaagccaatgcacaacgaattcatcgaaccaacgaaaaaatttgccgatattattattccagaaggcggagagaatcacgtagcaatcgacttaatgacaacaaaaattgaatccatcttgcaaaaacatgtttaa

SEQ ID NO: 9102 - protein, 209 aa, Listeria monocytogenes
MTKKPIVVGVTGGSGSGKTSVTKAICNHFSGHSILMIAQDVYYHDQANISFEDRLKVNYDHPLAFDTDLLISHIAALRRYESIEKPIYDYAKYTRKKEVEIQEPREVIILEGILILEDKRLRDLMDIKVYVDTDDDIRFIRRLLRDMKERGRTMDSVIEQYLSVVKPMHNEFIEPTKKFADIIIPEGGENHVAIDLMTTKIESILQKHV

SEQ ID NO: 9103 - DNA, 642 bp, Mycoplasma genitalium
  CDS (1)..(642): transl_table=4
atggatgaaaaagggattttagttgcaattagtggtggtagttgctcaggaaaaactactgttgctgaaatgatttatcaacttttaagtaaaaaattaaaagttgcgatcatctgtcaagataactattacaagtcctataaaaataagccattattaaaaagaaaaacaataaactttgatcatcctgatgcttttgattgaaaacttttaagatcacacattgaagatcttctaaacggtagtatagttaatgttcctttatatgactacattaactataccagagctaaaaaaacagcaaaaattggtccaattgatgttgttattctagagggtttaatgccatgatttgatgaaaaattatcaagactttctaagctaaaaatatttatagaaacaaatggggaagaacgtttaattagaagaatagaaagagactgacaaaggggaagaaatattgattctattattaaacagtgacgcgaaatagtagcaccaatgtatgaaatatttgtagaaaaaatgaagcgaaatgctgatttaattctgccttgaagtcaacgcagagaagtaagtacaagtgtattggatgtcgcaattgaacacttatttcacaaaactgttgaaaaaaataattag

SEQ ID NO: 9104 - protein, 213 aa, Mycoplasma genitalium
MDEKGILVAISGGSCSGKTTVAEMIYQLLSKKLKVAIICQDNYYKSYKNKPLLKRKTINFDHPDAFDWKLLRSHIEDLLNGSIVNVPLYDYINYTRAKKTAKIGPIDVVILEGLMPWFDEKLSRLSKLKIFIETNGEERLIRRIERDWQRGRNIDSIIKQWREIVAPMYEIFVEKMKRNADLILPWSQRREVSTSVLDVAIEHLFHKTVEKNN

SEQ ID NO: 9105 - DNA, 642 bp, Mycoplasma pneumoniae
  CDS (1)..(642): transl_table=4
atggatagtaaaaaaggaattttagtggcaattggtggcgggagttgttctggtaaaactacgatcgctgacatgatttaccaacttttgcgtaaaaagcttaaagttgctattctgccccaggacaactattacaaaccatacaagaacaaatcaatggcgcaacgcaaagcgattaacttcgatcaccccgatgcctttgattgaaagctgttgtgaagtcacctcgataacttactaatgggtaaaacagtggctgtgccaatgtatgactatgttaattacacccgtaaaaaggaaaccatagaaataggtcctttaaatgtagtcatcttggaaggtttaatgccgtggtttgatgaacggattgctaaattgtgtaagctcaagatctttgtggaagcgactggagaggaacgcttaattcgccggattgaacgggactgggaacgcggtcgtgatgtcgcttctatcattaaacaatgacgcgaagcagttagtccaatgtacgaaatctttgtcgaaaagatgaaacagaaggcagatttaattattccctggagtgaaagacacgaagtgagtactaatgtgctcgactttgcaattgaacacctctttcgcaaacacgtggatcccaactag

SEQ ID NO: 9106 - protein, 213 aa, Mycoplasma pneumoniae
MDSKKGILVAIGGGSCSGKTTIADMIYQLLRKKLKVAILPQDNYYKPYKNKSMAQRKAINFDHPDAFDWKLLWSHLDNLLMGKTVAVPMYDYVNYTRKKETIEIGPLNVVILEGLMPWFDERIAKLCKLKIFVEATGEERLIRRIERDWERGRDVASIIKQWREAVSPMYEIFVEKMKQKADLIIPWSERHEVSTNVLDFAIEHLFRKHVDPN

SEQ ID NO: 9107 - DNA, 633 bp, Oceanobacillus iheyensis
  CDS (1)..(633): transl_table=11
atgacaaagcaaaaaccagttgtaattggagtagcaggaggaagtggatcaggaaaaacatctgtgactcgctccatttgtcaacgatttacagaaacatcgattttggtaatcgagcaggattattattataaagatcaaagtcacttaccattcgaggaaagattaaataccaattatgatcatccattggcgtttgataatgatttattaatagaacatttacagcaattaatgcataatgaaccaattgaaaaacctgtatatgattataaaattcatactcggtcaaaagacgttattcatgtagaaccaaaagaagttattattgtagaaggtatattaatacttgaagatccacgcttagttgatttaatggatattaaggtttatgttgatacggatgcagatttacgaataattcgccgcttaatgcgagatatcaaagagcgcggtaggacgttagattctgtaatcgatcaatatatccagaatgttcgcccatcacacctgcaatttattgaaccaacaaagcgttatgccgatataatcatacctgaaggtggacaaaatcatgtcgcaattgatatcatggcttctaaaatagaaaaaatattatctagagggttataa

SEQ ID NO: 9108 - protein, 210 aa, Oceanobacillus iheyensis
MTKQKPVVIGVAGGSGSGKTSVTRSICQRFTETSILVIEQDYYYKDQSHLPFEERLNTNYDHPLAFDNDLLIEHLQQLMHNEPIEKPVYDYKIHTRSKDVIHVEPKEVIIVEGILILEDPRLVDLMDIKVYVDTDADLRIIRRLMRDIKERGRTLDSVIDQYIQNVRPSHLQFIEPTKRYADIIIPEGGQNHVAIDIMASKIEKILSRGL

SEQ ID NO: 9109 - DNA, 651 bp, Pasteurella multocida
  CDS (1)..(651): transl_table=11
atgtcaaactcatcaacaccatcttgtattattattgccatcgctggggcttcagcatcaggaaaaagcttaattgcctcaactgttcatcgagagttgtgtgatgagctaggttgcgaagaaattggcattatttccgaagactcttattataaagatcaaagtcatttggatatggaagatcgaattaaaaccaactatgatcatcctaattctatggatagacaccttttaattgaacacctcaaagcactcaaatctggtcaaccggttgatattcccgtctatagctacgttgagcatactcgaaccaatcaagtccaacactttgaacctaaaaaagtgatcattctggaagggattttattgcttactgatgaaaaattgcgtgatgaagtcagtgtctctgtttttgtcgatacaccactggatatttgttttattcgtcgcttacaacgtgacatgaaagaacgtggtcgaagtttagaatcggtagtggagcagtatcgtaaaacagtgcgtcccatgtttttacagtttattgagccctctaaacaatatgctgatatcgtgatcccgcgaggtggtaaaaatcgaattgccattaatatgttaaaagcacagattagacaacttttgggaaaacgttaa

SEQ ID NO: 9110 - protein, 216 aa, Pasteurella multocida
MSNSSTPSCIIIAIAGASASGKSLIASTVHRELCDELGCEEIGIISEDSYYKDQSHLDMEDRIKTNYDHPNSMDRHLLIEHLKALKSGQPVDIPVYSYVEHTRTNQVQHFEPKKVIILEGILLLTDEKLRDEVSVSVFVDTPLDICFIRRLQRDMKERGRSLESVVEQYRKTVRPMFLQFIEPSKQYADIVIPRGGKNRIAINMLKAQIRQLLGKR

SEQ ID NO: 9111 - DNA, 639 bp, Shewanella oneidensis
  CDS (1)..(639): transl_table=11
atgaattctcagcagtgtgtcattatagcaattgctggcgcgtcagcatctggcaagagtttaattgccaagacgatttttgacgaacttcgccgcgatttaggcacagatcagattggggtaattaacgaagacgcgtactatcgcgatcagagtcatttatccatggatgagcgggtgttaacaaactacgaccatcccaaagcgttagaccatcaactgttatgcacgcacttgcagttacttaagtctggcgaagctgttgatattccttgctatagctataccgaacatacgcgtatggccgaaaccgttaaaatgacaccgaaaaaagtgatcattttagagggcattctgctgttaactgatcctaaattgcgtgaattgatggatgccagcgtgtttatggatacgccgctggacatttgtttcctgcgccgtttaacccgcgatgtggctgaacgtggccgtacgatggaatcggtgatttcacagtacaagaaaaccgtccgtcctatgttcctgcaatttattgaaccttcaaaacaatacgctgatattatcgtgccccgcggtggcaaaaaccgtatcgcgaccgatattttgaagactcgaatccaacatctactggcaaaataa

SEQ ID NO: 9112 - protein, 212 aa, Shewanella oneidensis
MNSQQCVIIAIAGASASGKSLIAKTIFDELRRDLGTDQIGVINEDAYYRDQSHLSMDERVLTNYDHPKALDHQLLCTHLQLLKSGEAVDIPCYSYTEHTRMAETVKMTPKKVIILEGILLLTDPKLRELMDASVFMDTPLDICFLRRLTRDVAERGRTMESVISQYKKTVRPMFLQFIEPSKQYADIIVPRGGKNRIATDILKTRIQHLLAK

SEQ ID NO: 9113 - DNA, 639 bp, Streptococcus pneumoniae
  CDS (1)..(639): transl_table=11
atgcaaaatagaccaatcattattggagtgacaggtggttctggtggtggtaaaaccagtgtttcaagagccattttatcgcattttcctgatgaaaagatttccatgattgagcatgattcatactacaaggatcagtctcatttgacctttgaagagcgtgtcaaaaccaactatgaccatccttttgcctttgatacagacttgatgatcgagcagattaaggaattgttggcagggcgtccggtggacatcccgacctacgactatacagagcatacacggagtagcaagacctatcgtcaggaacctcaagatgtctttatcgttgagggtattttggtcttggaggacaagcgtctgcgcgatttgatggatatcaagatttttgtggatacggatgacgatgtgcgcattattcgtcgtatcaagcgtgatatggaggagcgtggccgtagccttgatagcgttattaaccagtacttaggtgtggtcaaaccaatgtaccaccagtttatcgagtcaactaagcgttatgctgatatcgtcattcctgaaggggttagcaataccgtggctatcgacctgttgacgaccaagattgcaaagattttggaagaagctcgaaacagcaaataa

SEQ ID NO: 9114 - protein, 212 aa, Streptococcus pneumoniae
MQNRPIIIGVTGGSGGGKTSVSRAILSHFPDEKISMIEHDSYYKDQSHLTFEERVKTNYDHPFAFDTDLMIEQIKELLAGRPVDIPTYDYTEHTRSSKTYRQEPQDVFIVEGILVLEDKRLRDLMDIKIFVDTDDDVRIIRRIKRDMEERGRSLDSVINQYLGVVKPMYHQFIESTKRYADIVIPEGVSNTVAIDLLTTKIAKILEEARNSK

SEQ ID NO: 9115 - DNA, 624 bp, Ureaplasma parvum
  CDS (1)..(624): transl_table=4
atgaatactaaatccccaattcttatactaattgcaggagcttctggttctggaaaaacaacctttgctaatgaaattattgcaagaattcctaaaaatacaacaagtgttgttatttgtcaagattcttactatatttctaattcacaactaaataaaaaagaacgccgcttaattaattatgatcatccaagtagttttgaatgagagttaatgcgagagcaattaagtgacattaaaaaacgtaaaaaaattaaagtaccaatctatgattataaaactgagattcgtttagataaaacgattgatattagtgatgttgatgttatagttcttgaaggtatttatgcaatttatgatgatgtcattaatcaaatagctgatttgaaaatttttattgaaactccaaaagatgaatgtttaattcgacgaattcttcgagatgttaatgaacgtaatcgatcatttgaatctgtaattactcaatgacgtagcactgttagccctatgtatgatcaatttgttgaaccaagtaagaagaatgctaatgttagtgtgctatgaaatgaacacaatcgtgttgcattacatttaattcataaatgaataaataatatacattaa

SEQ ID NO: 9116 - protein, 207 aa, Ureaplasma parvum
MNTKSPILILIAGASGSGKTTFANEIIARIPKNTTSVVICQDSYYISNSQLNKKERRLINYDHPSSFEWELMREQLSDIKKRKKIKVPIYDYKTEIRLDKTIDISDVDVIVLEGIYAIYDDVINQIADLKIFIETPKDECLIRRILRDVNERNRSFESVITQWRSTVSPMYDQFVEPSKKNANVSVLWNEHNRVALHLIHKWINNIH

SEQ ID NO: 9117 - DNA, 642 bp, Vibrio cholerae
  CDS (1)..(642): transl_table=11
atgtctgagaataatcaatgtgtcatcgtcggtattgctggcgcttctgcttctggtaagagtctcattgcgagcacgatttataatgagctacgcgccaaagtgggtgaccatcaaatcggtgtgattacggaagattgctactacaaagatcagagccatctgagcatggaagaacgtgttaaaaccaactacgaccacccaagtgcgctagaccacgatctcctttgccaacatttgcaaatgctggcgcgtggcgaagcggttgaagtgccagaatacagctacactgagcacacgcgtaccgagcaaaccaccaccatgacgccgaagaaagtgatcattctggaaggcatcctgcttctgactgatccacgtcttcgtgatttgatgcacgcgactgtatttatggatactccgctggatatctgtttgctgcgccgtgtgaagcgtgatgtacaagagcgtggtcgcaccatggaatctgtactgaagcagtaccaagagacggtacgccctatgtttatgcaatttattgagccgtctaaacagtacgctgacatcattgtgccgcgtggcggtaaaaaccgaattgcgattgatgtactcaaagcgcatatcgcaaaattgctcaaatcgtaa

SEQ ID NO: 9118 - protein, 213 aa, Vibrio cholerae
MSENNQCVIVGIAGASASGKSLIASTIYNELRAKVGDHQIGVITEDCYYKDQSHLSMEERVKTNYDHPSALDHDLLCQHLQMLARGEAVEVPEYSYTEHTRTEQTTTMTPKKVIILEGILLLTDPRLRDLMHATVFMDTPLDICLLRRVKRDVQERGRTMESVLKQYQETVRPMFMQFIEPSKQYADIIVPRGGKNRIAIDVLKAHIAKLLKS

SEQ ID NO: 9119 - DNA, 642 bp, Yersinia pestis
  CDS (1)..(642): transl_table=11
atgactgacaaagcacatcagtgcgtcattattgggatagcgggtgcttctgcctccggaaaaagtcttatcgccagcacgttgtatcgcgaattacgtgaacaagtaggcgaccaacatattggtgttattcctgaagatggttattacaaagaccagagccatctgtcaatggaagagcgggtcaaaacgaactacgaccacccaagcgccatggaccacaatttattgttggaacatttgcaggcgttgaaggcgggtaagcccgttgaattgcctctgtacagctatactgagcacacacgtaaaaaagaaacggttcatttagaacctaaaaaagtgatcattcttgaaggtatactgctgctgacggatatccgcttacggcaggaaatgaacttctcaatcttcgttgataccccattggatatctgcctgatgcgcagaatgaagcgtgatgtcaatgagcgtggccgttcgatggactctgttatggcccaatatcagaaaacagtccgtcctatgtttctgcaatttatagaaccatctaagcaatatgctgacattatcgttcctcgtggcggtaaaaatagaattgcgatcgatattctaaaagcgaaaatcagtcagttctttgagtaa

SEQ ID NO: 9120 - protein, 213 aa, Yersinia pestis
MTDKAHQCVIIGIAGASASGKSLIASTLYRELREQVGDQHIGVIPEDGYYKDQSHLSMEERVKTNYDHPSAMDHNLLLEHLQALKAGKPVELPLYSYTEHTRKKETVHLEPKKVIILEGILLLTDIRLRQEMNFSIFVDTPLDICLMRRMKRDVNERGRSMDSVMAQYQKTVRPMFLQFIEPSKQYADIIVPRGGKNRIAIDILKAKISQFFE

SEQ ID NO: 9121 - DNA, 1290 bp, Oryza sativa
  CDS (1)..(1290)
atgggttcaagaccagttgatgaggttcttgatgctgccgcggctggggtccactactccacgctccgtttggatgagcttaacatcaatggctccatgacaggggaggaacaaccaacgacctcaggggtggagaatgggcaccaggagccatttgtcattggtgttgccgggggtgcatcttcaggcaaaagtactgtatgcaaaatgataatcgatcagctacgtgatcagcgtgtagttgttgttactcaggagtctttttattatgggttgtctgatgaggaattggtccatgttcatgattataactttgatcatccagatgcatttgatacggagttactactctcttgtatggagaacttgaaacatggcaaggctgtggacattcctaattacaacttcaaaacatataagagtgttgcaagtgcaagaaaggtcaatccttcagatgtaattattttggaaggaattctggttttccatgattcacgtgtccgggatttgatgaacatgaagatctttgttgacacagatgctgatgtgcgattaacaaggaggattcgacgtgacaccattgagaagggtagagatatcaaaactgtgctagatcagtactcaaagtttgttaagcctgcttttgaagacttcatcctcccaaccaagaagtatgctgatattatcatcccacgaggtggcgataatgatgttgcaattgacttaatagttcagcatattcgtactaagcttggtcaacatgatctctgtaaagtacaccccaatttgtatgtcattcagactacttatcagatacgaggtatgcacacaataatacgggatgctgccacaacaacacatgatttcatattctatgctgatcggttgattcgattggttgttgagcatggtcttggtcatcttccattcaaggaaaagcaggtcataactccaactggatcggtttacactggggtagagttctccaaaagattgtgtggtatctcagtgattagaagtggtgagagtatggagaatgcattgcgggcatgctgcaaaggtataaaaattgggaagattcttattcacagggaaggagacaatggcaaacagctaatctatcacaatttaccgaaagatattgcaaacaggcatgtgctgttgttggatcccatactgggaacaggaaattcagctgttcaagctatatctctactcttgaaaaagggtgtacaggaaacaaatattatttttctgaatcttatatcagtaagtctactgaagtgctga

SEQ ID NO: 9122 - protein, 429 aa, Oryza sativa
MGSRPVDEVLDAAAAGVHYSTLRLDELNINGSMTGEEQPTTSGVENGHQEPFVIGVAGGASSGKSTVCKMIIDQLRDQRVVVVTQESFYYGLSDEELVHVHDYNFDHPDAFDTELLLSCMENLKHGKAVDIPNYNFKTYKSVASARKVNPSDVIILEGILVFHDSRVRDLMNMKIFVDTDADVRLTRRIRRDTIEKGRDIKTVLDQYSKFVKPAFEDFILPTKKYADIIIPRGGDNDVAIDLIVQHIRTKLGQHDLCKVHPNLYVIQTTYQIRGMHTIIRDAATTTHDFIFYADRLIRLVVEHGLGHLPFKEKQVITPTGSVYTGVEFSKRLCGISVIRSGESMENALRACCKGIKIGKILIHREGDNGKQLIYHNLPKDIANRHVLLLDPILGTGNSAVQAISLLLKKGVQETNIIFLNLISVSLLKC

SEQ ID NO: 9123 - DNA, 1476 bp, Oryza sativa
  CDS (1)..(1476)
atgggttcaacttcaaggccagttgatgatgaagttcttgatgccgccaccggggtacactactctgcgctccgtttggaagagcttaacatgaatggctccgtgtcaggggaggaccaaccgacaacctcgggcgtggagaatgggcaccaggagccatttgtcattggtgtcgctgggggtgcatcttcaggtaaaagtactgtatgcaagatgataattgatcagctacgtgatcagcgtgtggttgttgttactcaggagtccttttattatgggttatctgatgaggaattggtccatgttcatgattataactttgatcatccagatgcatttgatacggagttactactctcttgtatggagaacttgaaacatggcaaggctgtggacattcctaattataacttcaaaacatataagagtgtagcaagcgcaagaaaggtcaatccttcagatgtaattattttggaaggtattctggttttccatgattcacgtgtccgggacttgatgaacatgaagatatttgttgatacagatgctgatgtgcgattaacaaggaggattcgacgtgacaccattgagaagggtagagatatcaaaactgtgctagatcagtattcaaagtttgttaagcctgcttttgaagacttcatcctcccaaccaagaagtatgctgatattatcatcccacgaggtggagataatgatgttgcgattgacttaatcgttcagcatattcgcactaagcttggtcaacatgatctctgtaaagtacaccccaatttgtatgtcattcagactacttatcagatacgaggtatgcacacaataatacgcgatgctgccacaacaacacatgatttcatattctatgccgatcggttgattcgattggttgtcgagcatggtcttggtcatcttccattcaaggaaaaacaggtcataactccaactggttctgtttacactggggtagagttctctaaaagattgtgcggtatctcagtgattagaagtggtgagagtatggagaatgcattgcgggcatgctgtaaaggtataaaaattgggaagattcttattcacagagaaggagacaatggcaaacagctaatctatcacaatgtaccaaaagatatagcaaacaggcatgttctattgttggatcccatactgggaacaggaaattcagctgttcaagctatatccctactcttgaagaagggtgtacaggaaacaaacattatctttctgaatcttatatcagctccccaaggagtgcatgtcgttagcaagagatttccgagagtcaagatcgtgacatcagaaattgactttggtctgaacgatgatttccgcgtcatccctggaatgggtgagtttggagataggtacttcggaacagatgattatcagtcatcaacaccattcttttgcgacgagaaaaatcgtgtcaggcttttgtga

SEQ ID NO: 9124 - protein, 491 aa, Oryza sativa
MGSTSRPVDDEVLDAATGVHYSALRLEELNMNGSVSGEDQPTTSGVENGHQEPFVIGVAGGASSGKSTVCKMIIDQLRDQRVVVVTQESFYYGLSDEELVHVHDYNFDHPDAFDTELLLSCMENLKHGKAVDIPNYNFKTYKSVASARKVNPSDVIILEGILVFHDSRVRDLMNMKIFVDTDADVRLTRRIRRDTIEKGRDIKTVLDQYSKFVKPAFEDFILPTKKYADIIIPRGGDNDVAIDLIVQHIRTKLGQHDLCKVHPNLYVIQTTYQIRGMHTIIRDAATTTHDFIFYADRLIRLVVEHGLGHLPFKEKQVITPTGSVYTGVEFSKRLCGISVIRSGESMENALRACCKGIKIGKILIHREGDNGKQLIYHNVPKDIANRHVLLLDPILGTGNSAVQAISLLLKKGVQETNIIFLNLISAPQGVHVVSKRFPRVKIVTSEIDFGLNDDFRVIPGMGEFGDRYFGTDDYQSSTPFFCDEKNRVRLL

SEQ ID NO: 9125 - DNA, 1452 bp, Brassica napus
  CDS (1)..(1452)
atgcctgaagactctacgtcgattgactacgtcatggagaaggcatcggggcctcacttctccggtcttcgcctcgacggccttctctcttctccgtccaaatccaccaactcttccccttctcccttccgttccggcgttccatctttctcccagatttccgatcccgccgcgcctaatcagcctttcgtcatcggagttactggtggtacagcttctggtaagaccacggtgtgtgacatgattatccagcagcttcatgatcatcgcattgttctagttaaccaggattccttttaccgtggtctgacatctgaagaactggagcgtgcgcaagaatacaacttcgatcatcctgatgcatttgacactgaacagcttttgcattgcatcgatacactcaagagtgggcaaccctatcaaattccaatttacgacttcaagacccatcaacgtaaatcagatgcttttcgccaggtcaatgcttgcgatgtcataattttggaagggattctagtttttcatgactcacgagttcgggatctgatgaatatgaagatcttcgttgacacagatgctgatgtgaggcttgctcgcagaatcagacgtgacactgttgagaggggtagggatgttgattctgtccttgaacagtatgcaaagtttgtgaagcctgcgtttgatgattttgtgctgccttcaaagaaatatgccgatgtgatcattcctcgaggaggtgacaatcacgttgcagttgatttgattgtgcaacatatccacacaaaacttgggcaacatgatctctgcaaaatctacccaaatctttttgttatccaatcgacatttcagataagaggcatgcatacacttattcgagagaaggacatatcaaaacatgactttgtgttttactcagatcgactcattcgtctggttgtagagcatggtcttggccatttgccattcactgagaaacaagtagttactccaacaggatctgtgtatagcggtgttgatttctgcaagaaactttgtggggtctcaatcattcgaagtggtgaaagcatggaaaacgcgttacgtgcatgttgtaaagggatcaaaatagggaagattcttattcatcgtgaaggcgacaacggaatgcagcttatatatgagaagcttccaagtgatatctccgagcgccatgtcctgcttctagatcccgttttaggcacaggtaactgtgcaagtcaggcgatagagctactcatacgtaaaggagtccctgaatctcacataatattcctcaatcttatctcggctccggaaggaatccactgcatctgcaaacggtttccgctgttgaagattgtgacatcggaaatagatcagtgtctgaatgaagactttcgggttataccaggcttgggtgaatatggcgatcgctactttggtactgacgagtaa

SEQ ID NO: 9126 - protein, 483 aa, Brassica napus
MPEDSTSIDYVMEKASGPHFSGLRLDGLLSSPSKSTNSSPSPFRSGVPSFSQISDPAAPNQPFVIGVTGGTASGKTTVCDMIIQQLHDHRIVLVNQDSFYRGLTSEELERAQEYNFDHPDAFDTEQLLHCIDTLKSGQPYQIPIYDFKTHQRKSDAFRQVNACDVIILEGILVFHDSRVRDLMNMKIFVDTDADVRLARRIRRDTVERGRDVDSVLEQYAKFVKPAFDDFVLPSKKYADVIIPRGGDNHVAVDLIVQHIHTKLGQHDLCKIYPNLFVIQSTFQIRGMHTLIREKDISKHDFVFYSDRLIRLVVEHGLGHLPFTEKQVVTPTGSVYSGVDFCKKLCGVSIIRSGESMENALRACCKGIKIGKILIHREGDNGMQLIYEKLPSDISERHVLLLDPVLGTGNCASQAIELLIRKGVPESHIIFLNLISAPEGIHCICKRFPLLKIVTSEIDQCLNEDFRVIPGLGEYGDRYFGTDE

SEQ ID NO: 9127 - DNA, 1452 bp, Linum usitatissimum
  CDS (1)..(1452)
atgccggaggaaaccgactccatcgactatgccatggagaaggcctctggtcctcacttctccggccttcgcatcgacagcctcctttcttcccctcctgcttcttccacttcatctcctgctcatcgttcttctcctaccgctgctggttctgttttcgctgacgccaatgctctcaggcagcccttcgtcattggggtttctggaggtaccgcttcggggaagactacggtgtgtgacatgatcattcagcagctccacgatcaccgtgttgtgcttgtcaatcaggattcattctatcgtggattgacgcctcaagaactagaacgcgttcacgaatacaacttcgatcatccagatgcatttgacactgaccagcttttggactgcgttgaaacacttaagcgtgggcttccttatcaagtccctatatatgacttcaagacccatcagcgttgttcagatagctttaggcaggtgaatgcttctgatgttattatattagagggtatattggttttccatgatcaacgtgttcgcaagcttatgaatatgaagatctttgttgatacagatcccgatgtgaggcttgctcgcagaattcggcgtgacactgttgagaggggtagagatataaactctgttcttgagcagtatgctaaatttgtgaagcctgcttttgatgatttcgtacttccttcgaaaaagtatgccgatgtgatcatacctcgtggaggtgataatcatgttgccattgatttgatagttcagcatatccagacgaagcttggtctacatgacctctgcaaaatatatccaaatgtgtatgttattcaaacaacttttcagattagaggcatgcataccttgattcgagacagggaaatttcaaagcatgattttgttttttactcggatagacttattcggctggttgttgaacatggccttggtcatttgccattcacggagaagcaagttgttacccctaccgggtcagtttatactggcgttgacttctgcaaaaaattatgcggagtttctatcgtacgaagtggagaaagcatggaaaatgcattgcgtgcatgttgcaaagggataaaaattggtaaaattttaatccacagggatggcgacaacggaaagcagcttatatatgagaagcttccaaacgacatttccgaaaggcacgtcctgcttctagatcctgttcttgccactggtaactcggccaaccaagcaatcgatctactcatacagaaaggagttccagaatcccatattatattcttaaacctaatctctgcacccgaaggcatccactgcgtctgcaagagttttccatctcttaaaatcgtgacttctgaaatcgatatagcaataaacgacgaatttcgggttgtacctgggctgggagagttcggtgatcggtactttgggactgatgattga

SEQ ID NO: 9128 - protein, 483 aa, Linum usitatissimum
MPEETDSIDYAMEKASGPHFSGLRIDSLLSSPPASSTSSPAHRSSPTAAGSVFADANALRQPFVIGVSGGTASGKTTVCDMIIQQLHDHRVVLVNQDSFYRGLTPQELERVHEYNFDHPDAFDTDQLLDCVETLKRGLPYQVPIYDFKTHQRCSDSFRQVNASDVIILEGILVFHDQRVRKLMNMKIFVDTDPDVRLARRIRRDTVERGRDINSVLEQYAKFVKPAFDDFVLPSKKYADVIIPRGGDNHVAIDLIVQHIQTKLGLHDLCKIYPNVYVIQTTFQIRGMHTLIRDREISKHDFVFYSDRLIRLVVEHGLGHLPFTEKQVVTPTGSVYTGVDFCKKLCGVSIVRSGESMENALRACCKGIKIGKILIHRDGDNGKQLIYEKLPNDISERHVLLLDPVLATGNSANQAIDLLIQKGVPESHIIFLNLISAPEGIHCVCKSFPSLKIVTSEIDIAINDEFRVVPGLGEFGDRYFGTDD

SEQ ID NO: 9129 - DNA, 1473 bp, Zea mays
  CDS (1)..(1473)
atgccggacaaggcggtggacgacgtcatggaggccgcggtgggggcccacttcagcggcctccgcctcgaggcgctgcgcctctccacctctgcgccctcttccccttcctcctcccccgccgccgcggcgcacacgcactccaacggagccgtctacgccaacggcaccaccgagcttccctctcctgccgctgcccggcagccattcgtcatcggggtttctggagggacggcgtcggggaagacgacggtgtgcgacatgatcatccagcagctgcacgaccaccgtgtcgtgctcgttaaccaggattcgttttaccgtggccttactgctgaagagtctgcacatgcacaagactataattttgatcaccctgatgcatttgatacagagcaacttctagaatgcatggggcagctgaaatgtgctcaacctgtaaatgttcctatatatgatttcaagaagcatcgacggtgttctgaaagctttagaaaggtcaatgcatcagatgtcattattttggagggcattttagtgttccatgaccagagagttcgcaatctgatggacatgaaaatttttgtagacacagatgctgacattaggcttgctcgacgaatcagacgtgatacagttgaaagaggaagagatatcagctccgtgcttgaccaatatgggaggtttgtgaagccagcgttcgatgattttgttttgccttcaaagaagtatgctgacgtgatcattcctcgaggtggtgataaccatgtagcagttgatctgattgttcaacatatccgtacaaaacttggtcagcatgacttgtgcaaaatctatccaaatgttcatgttgttcaatcaacttttcagatccgaggaatgcatactcttatccgtgatagggacatcaccacacctgactttgtattttattcagatcgattgatccgtttggtagtggagcatggtcttggacatttgccatttacagaaaagcaggttattaccccaacaggatctgtttatatgggagttgacttttgtaagaagctctgtggagtctctattgtgcgaagtggtgagagtatggagaacgcattgcgtgcttgttgtaaaggaataaaaattgggaaaattctaattcatcgtgttggagacaatggacaacagcttgtttatcacaaactgcccatggatattgctgaacgacatgttctacttttggatccggtgcttggtacaggcaactcagtagcccaagcaattgaccttcttataagaaaaggtgttcctgaggatcggatcatttttctcaatctcatctcggctcctgaagggattcagtgtatctgcaagcgatttccttcgctgaagattgttacatctgaaatcgattatggtctgaacgaggaattcagggtgatcccaggactgggagaatatggcgaccgctacttcggcacagacaattga

SEQ ID NO: 9130 - protein, 490 aa, Zea mays
MPDKAVDDVMEAAVGAHFSGLRLEALRLSTSAPSSPSSSPAAAAHTHSNGAVYANGTTELPSPAAARQPFVIGVSGGTASGKTTVCDMIIQQLHDHRVVLVNQDSFYRGLTAEESAHAQDYNFDHPDAFDTEQLLECMGQLKCAQPVNVPIYDFKKHRRCSESFRKVNASDVIILEGILVFHDQRVRNLMDMKIFVDTDADIRLARRIRRDTVERGRDISSVLDQYGRFVKPAFDDFVLPSKKYADVIIPRGGDNHVAVDLIVQHIRTKLGQHDLCKIYPNVHVVQSTFQIRGMHTLIRDRDITTPDFVFYSDRLIRLVVEHGLGHLPFTEKQVITPTGSVYMGVDFCKKLCGVSIVRSGESMENALRACCKGIKIGKILIHRVGDNGQQLVYHKLPMDIAERHVLLLDPVLGTGNSVAQAIDLLIRKGVPEDRIIFLNLISAPEGIQCICKRFPSLKIVTSEIDYGLNEEFRVIPGLGEYGDRYFGTDN

SEQ ID NO: 9131 - DNA, 1434 bp, Glycine max
  CDS (1)..(1434)
atggatgctaagtcggctgtagaattaatggagtcttccgcagaggttcatttttctggatttcacatggatggttttgagcaaagaaaggctagcatagaacaaccaacaacctcagaaactgacatgtataaacaaccttttgtcataggtgttgctgggggtgcagcatctggcaagacaacagtttgtgatatgattattcagcagcttcatgatcaacgagttgtacttgttaatcaggattctttttacaataacttgacggaggaggaacttacaagagtacaagattacaactttgaccatcctgatgcttttgatactaagcaattactacgtgttatggacaagttgaagcatggcgaagcagtagatattccaaagtatgattttaagagttacaagagtgatgatgttttaagaagggtgaacccttcagatgttataattttggaaggcatccttgttttccatgacccacgtgttcgggagttgatgaatatgaagatatttgttgacacagatgctgatgttcgtttggcaagaaggattaggcgtgacactactgaaaagggtcgggatattggagcagtccttgatcagtattcaaaatttgtgaagccagcttttgatgactttattcttccaacaaagaagtatgctgatataattataccccgtggaggagataatcatgtggccattgatttgattgtacagcatattcgcacaaagcttggtcagcatgacctgtgtaaaatatatcctaatttgtatgtcattcagtcaacttttcagatacggggtatgcataccctgatacgtgatgccaagacaacaaagcatgattttgtattttactctgatcgattgattcgattggttgtggaacatggtttggggcatctgccatttacagaaaagcaagtaatcactcctactggttctgtatacactggtgttgatttttgtaaaaggttgtgtggtgtctctgttatcagaagtggggagagtatggagaatgctttgagagcatgctgtaaaggtatcaagattgggaaaattttaattcacagagaaggtgacaatggtcagcagctaatatatgaaaagttgccaaatgatatctctgataggcatgtgttactgttggaccctatacttggcacagggaattcggctgttcaagcaatttctttactcataaaaaagggtgtacctgagtccaacattatatttcttaatctcatatctgcacctaaaggtgtgcatgtggtatgcaaaagttttccaagaataaagatagtaacatctgagattgagattggtttgaatgaagatttccgtgtcatacctggcatgggcgagtttggagatcggtactttggaacagatgatgatgatgagcaagtggtagtttcttcccagtag

SEQ ID NO: 9132 - protein, 477 aa, Glycine max
MDAKSAVELMESSAEVHFSGFHMDGFEQRKASIEQPTTSETDMYKQPFVIGVAGGAASGKTTVCDMIIQQLHDQRVVLVNQDSFYNNLTEEELTRVQDYNFDHPDAFDTKQLLRVMDKLKHGEAVDIPKYDFKSYKSDDVLRRVNPSDVIILEGILVFHDPRVRELMNMKIFVDTDADVRLARRIRRDTTEKGRDIGAVLDQYSKFVKPAFDDFILPTKKYADIIIPRGGDNHVAIDLIVQHIRTKLGQHDLCKIYPNLYVIQSTFQIRGMHTLIRDAKTTKHDFVFYSDRLIRLVVEHGLGHLPFTEKQVITPTGSVYTGVDFCKRLCGVSVIRSGESMENALRACCKGIKIGKILIHREGDNGQQLIYEKLPNDISDRHVLLLDPILGTGNSAVQAISLLIKKGVPESNIIFLNLISAPKGVHVVCKSFPRIKIVTSEIEIGLNEDFRVIPGMGEFGDRYFGTDDDDEQVVVSSQ

SEQ ID NO: 9133 - DNA, 1437 bp, Glycine max
  CDS (1)..(1437)
atgggtactaaatcggctgttgacttaatggagtctttatctgaggttcatttttctggatttcacattgatggcttagagcaaagaaaggctggcacagagcaaccaaccacttcaacaactgacatgtataaacaaccttttgtgataggtgttgctggtggagcagcatccggtaagacatcagtttgtgatatgattgttcagcagcttcatgatcaacgagtcgtacttgttaatcaggactctttttaccataatttgactcaggaggaacttacaagagtacaagattacaactttgaccatcctgaagcttttgatactgagcaattgctacgtgtcatggacaagttgaagcatagccaagcagtagatattccaaagtatgactttaagggttacaagaatgatgtttttccagcaagacgggtaaacccagcggatgttattattttggaaggtatccttgttttccatgatccacgagtgcgggcattgatgaatatgaagatatttgttgacacagatgctgatgttcgtctggctagaagaattaagcgtgatactgctgacaatgctcgtgaaattggagctgtgcttgatcagtattctaaatttgtgaagccagcttttgatgactttattcttcccaccaagaagtacgctgatatcattataccccgtggaggagataatcatgtggctattgatttgattgtacaacatattcgcacgaagcttggtcagcatgacttgtgtaaaatatatcctaatttatatgtcattcagtctacttttcagatacggggtatgcatactctgatacgtgattctcaaacaacgaaacatgactttgtattttattctgaccgtttgattcgtttggttgtagaacatggcctagggcatcttccatttacagaaaagcaagtaatcactccaactggatcggtatacagtggcgtggatttctgtaagaggttgtgtggtgtctccatcatccggagtggggagagtatggaaaatgctttacgagcatgctgcaaaggtatcaagattgggaaaattcttattcatagagaaggtgacaatggtcaacagctaatatatgagaagttgcctaatgacatctcagataggcatgtattactgctggatcccatcttaggcacaggtaattcagctgttcaagcaatttctttgcttttaaagaagggtgtaccagagtccaacattatatttctcaatctcgtatcagcacctcaaggtgttcatgtggtctgtaaaagatttccaagaataaaaatcctgacatctgagattgagattggtttgaatgaagatttccgtgtcatacctggcatgggtgagtttggggaccggtactttggaacagataatgatgaccagcaggtggtacccccttcacagtag

SEQ ID NO: 9134 - protein, 478 aa, Glycine max
MGTKSAVDLMESLSEVHFSGFHIDGLEQRKAGTEQPTTSTTDMYKQPFVIGVAGGAASGKTSVCDMIVQQLHDQRVVLVNQDSFYHNLTQEELTRVQDYNFDHPEAFDTEQLLRVMDKLKHSQAVDIPKYDFKGYKNDVFPARRVNPADVIILEGILVFHDPRVRALMNMKIFVDTDADVRLARRIKRDTADNAREIGAVLDQYSKFVKPAFDDFILPTKKYADIIIPRGGDNHVAIDLIVQHIRTKLGQHDLCKIYPNLYVIQSTFQIRGMHTLIRDSQTTKHDFVFYSDRLIRLVVEHGLGHLPFTEKQVITPTGSVYSGVDFCKRLCGVSIIRSGESMENALRACCKGIKIGKILIHREGDNGQQLIYEKLPNDISDRHVLLLDPILGTGNSAVQAISLLLKKGVPESNIIFLNLVSAPQGVHVVCKRFPRIKILTSEIEIGLNEDFRVIPGMGEFGDRYFGTDNDDQQVVPPSQ

SEQ ID NO: 9135 - DNA, 1434 bp, Glycine max
  CDS (1)..(1434)
atggatgctaagtcggctgtagaattaatggagtcttccgcagaggttcatttttctggatttcacatggatggttttgagcaaagaaaggctagcatagaacaaccaacaacctcagaaactgacatgtataaacaaccttttgtcataggtgttgctgggggtgcagcatctggcaagacaacagtttgtgatatgattattcagcagcttcatgatcaacgagttgtacttgttaatcaggattctttttacaataacttgacggaggaggaacttacaagagtacaagattacaactttgaccatcctgatgcttttgatactaagcaattactacgtgttatggacaagttgaagcatggcgaagcagtagatattccaaagtatgattttaagagttacaagagtgatgatgttttaagaagggtgaacccttcagatgttataattttggaaggcatccttgttttccatgatccacgtgttcgggagttgatgaatatgaagatatttgttgacacagatgctgatgttcgtttggcaagaaggattaggcgtgacactactgagaagggtcgggatattggagcagttcttgatcagtattcaaaatttgtgaagccagcttttgatgactttattcttccaacaaagaagtatgctgatataattataccccgtggaggagataatcatgtggccattgatttgattgtacagcatattcgcacaaagcttggtcagcatgacctgtgtaaaatatatcctaatttgtatgtcattcagtcaacttttcagatacggggtatgcataccctgatacgtgatgccaagacaacaaagcatgattttatattttactctgatcgtttgattcgattggttgtggaacatggtttggggcatctgccatttacagaaaagcaagtaatcactcctactggttctgtatacactggtgttgatttttgtaaaaggttgtgtggtgtctctgttatcagaagtggggagagtatggagaatgctttgagagcatgctgtaaaggtatcaagattgggaaaattttaattcacagagaaggtgacaatggtcagcagctaatatatgaaaagttgccaaatgatatctctgataggcatgtgttactgttggaccctatacttggcacagggaattcggctgttcaagcaatttctttactcataaaaaagggtgtacctgagtccaacattatatttcttaatctcatatctgcacctaaaggtgtgcatgtggtatgcaaaagttttccaagaataaagatagtaacatctgagattgagattggtttgaatgaagatttccgtgtcatacctggcatgggcgagtttggagatcggtactttggaacagatgatgatgatgagcaagtggtagtttcttcccagtag

SEQ ID NO: 9136 - protein, 477 aa, Glycine max
MDAKSAVELMESSAEVHFSGFHMDGFEQRKASIEQPTTSETDMYKQPFVIGVAGGAASGKTTVCDMIIQQLHDQRVVLVNQDSFYNNLTEEELTRVQDYNFDHPDAFDTKQLLRVMDKLKHGEAVDIPKYDFKSYKSDDVLRRVNPSDVIILEGILVFHDPRVRELMNMKIFVDTDADVRLARRIRRDTTEKGRDIGAVLDQYSKFVKPAFDDFILPTKKYADIIIPRGGDNHVAIDLIVQHIRTKLGQHDLCKIYPNLYVIQSTFQIRGMHTLIRDAKTTKHDFIFYSDRLIRLVVEHGLGHLPFTEKQVITPTGSVYTGVDFCKRLCGVSVIRSGESMENALRACCKGIKIGKILIHREGDNGQQLIYEKLPNDISDRHVLLLDPILGTGNSAVQAISLLIKKGVPESNIIFLNLISAPKGVHVVCKSFPRIKIVTSEIEIGLNEDFRVIPGMGEFGDRYFGTDDDDEQVVVSSQ

SEQ ID NO: 9137 - DNA, 1473 bp, Zea mays
  CDS (1)..(1473)
atgccggacaaggcggtggacgacgtcatggaggccgcggtgggggcccacttcagcggcctccgcctcgaggcgctgcgcctctccacctctgcgccctcttccccttcctcctcccccgccgccgcggcgcacacgcactccaacggagccgtctacgccaacggcaccaccgagcttccctctcctgccgctgcccggcagccattcgtcatcggggtttctggagggacggcgtcggggaagacgacggtgtgcgacatgatcatccagcagctgcacgaccaccgtgtcgtgctcgttaaccaggattcgttttaccgtggccttactgctgaagagtctgcacatgcacaagactataattttgatcaccctgatgcatttgatacagagcaacttctagaatgcatggggcagctgaaatgtgctcaacctgtaaatgttcctatatatgatttcaagaagcatcgacggtgttctgaaagctttagaaaggtcaatgcatcagatgtcattattttggagggcattttagtgttccatgaccagagagttcgcaatctgatggacatgaaaatttttgtagacacagatgctgacattaggcttgctcgacgaatcagacgtgatacagttgaaagaggaagagatatcagctccgtgcttgaccaatatgggaggtttgtgaagccagcgttcgatgattttgttttgccttcaaagaagtatgctgacgtgatcattcctcgaggtggtgataaccatgtagcagttgatctgattgttcaacatatccgtacaaaacttggtcagcatgacttgtgcaaaatctatccaaatgttcatgttgttcaatcaacttttcagatccgaggaatgcatactcttatccgtgatagggacatcaccacacctgactttgcattttattcagatcgattgatccgtttggtagtggagcatggtcttggacatttgccatttacagaaaagcaggttattaccccaacaggatctgtttatatgggagttgacttttgtaagaagctctgtggagtctctattgtgcgaagtggtgagagtatggagaacgcattgcgtgcttgttgtaaaggaataaaaattgggaaaattctaattcatcgtgttggagacaatggacaacagcttgtttatcacaaactgcccatggatattgctgaacgacatgttctacttttggatccggtgcttggtacaggcaactcagtagcccaagcaattgaccttcttataagaaaaggtgttcctgaggatcggatcatttttctcaatctcatctcggctcctgaagggattcagtgtatctgcaagcgatttccttcgctgaagattgttacatctgaaatcgattatggtctgaacgaggaattcagggtgatcccaggactgggagaatatggcgaccgctacttcggcacagacaattga

SEQ ID NO: 9138 - protein, 490 aa, Zea mays
MPDKAVDDVMEAAVGAHFSGLRLEALRLSTSAPSSPSSSPAAAAHTHSNGAVYANGTTELPSPAAARQPFVIGVSGGTASGKTTVCDMIIQQLHDHRVVLVNQDSFYRGLTAEESAHAQDYNFDHPDAFDTEQLLECMGQLKCAQPVNVPIYDFKKHRRCSESFRKVNASDVIILEGILVFHDQRVRNLMDMKIFVDTDADIRLARRIRRDTVERGRDISSVLDQYGRFVKPAFDDFVLPSKKYADVIIPRGGDNHVAVDLIVQHIRTKLGQHDLCKIYPNVHVVQSTFQIRGMHTLIRDRDITTPDFAFYSDRLIRLVVEHGLGHLPFTEKQVITPTGSVYMGVDFCKKLCGVSIVRSGESMENALRACCKGIKIGKILIHRVGDNGQQLVYHKLPMDIAERHVLLLDPVLGTGNSVAQAIDLLIRKGVPEDRIIFLNLISAPEGIQCICKRFPSLKIVTSEIDYGLNEEFRVIPGLGEYGDRYFGTDN

SEQ ID NO: 9139 - DNA, 1467 bp, Zea mays
  CDS (1)..(1467)
atgggttcgaaatcggtagatgaggtgctcgatgccgccgccggagtccattgctctgctctccgtctggacggtcccaacgtccagttttccgcctcctccgaggaagaaccaacgacgggtggcctggagaatggccatcaggagccctttgttattggcgttgctgggggtgcatcgtcaggcaaaagtaccgtgtgcaagatgatcattgatcagctccgtgaccagcgcgttgtggctgttacacaggagtccttttattatggattgacggatgaagaattagtccatgttcatgattataattttgatcatccagatgcatttcatacagagctacttctctcttgtatgcaaaacttgaaacatggcaaagctgtcgacatccctaattacaacttcaagacatacaagagtgtaccaaatgcaaggaaggttaatccttcagatgttattattttggaaggaattctagtttttcatgattcacgcctcagggatttgatgaacatgaagatcttcgttgatacagatgccgacgtacggttaacaaggaggatccgtcgtgataccattgacaagggtagagatatcaaagctgtgttagatcagtactcaaaatttgttaagcctgcttttgaagacttcatcctcccaacgaagaagtatgctgatattatcatcccacgaggtggagacaatgatgtggcaattgacctaattgttcaacatattcggactaaacttggacagcatgatctttgcaaaatacaccccaatttgtatgtaattcagactacttatcagatacgaggcatgcacacaataataagggatgctgccacagcaacacatgatttcatattttatgctgatcggttgattcgactggttgtggaacatggtcttggtcatcttccttttcaggaaaagcaggtcatcactccgactggatctgtttacactggtgtggagttctccaaaaggttgtgtggtgtctcagtgatcaggagtggcgaaagcatggagaatgcgttacgagcatgctgtaaaggtataaagattgggaagattcttattcatcgggaaggagacaatggacaacagctcatctatcaaaatttaccaaaagatattgcaaataggcatgttcttctgttggaccccatattgggaacaggaaattcagcagttcaggccatctcccttctattgaagaagggtgtacaagaagcaaatattatattccttaatcttatttcagcgccccaaggagtgcatgtggtgagcaagagattccctagagtgaagatcgttacttcggagattgagtttggtctaaatgatgatttccgtgttgtgcctgggatgggcgaatttggagacagatactttggaacagatgattatcagtcatcgacgccattcttttgtgacgataaaaatcgtgtcaggctcttgtga

SEQ ID NO: 9140 - protein, 488 aa, Zea mays
MGSKSVDEVLDAAAGVHCSALRLDGPNVQFSASSEEEPTTGGLENGHQEPFVIGVAGGASSGKSTVCKMIIDQLRDQRVVAVTQESFYYGLTDEELVHVHDYNFDHPDAFHTELLLSCMQNLKHGKAVDIPNYNFKTYKSVPNARKVNPSDVIILEGILVFHDSRLRDLMNMKIFVDTDADVRLTRRIRRDTIDKGRDIKAVLDQYSKFVKPAFEDFILPTKKYADIIIPRGGDNDVAIDLIVQHIRTKLGQHDLCKIHPNLYVIQTTYQIRGMHTIIRDAATATHDFIFYADRLIRLVVEHGLGHLPFQEKQVITPTGSVYTGVEFSKRLCGVSVIRSGESMENALRACCKGIKIGKILIHREGDNGQQLIYQNLPKDIANRHVLLLDPILGTGNSAVQAISLLLKKGVQEANIIFLNLISAPQGVHVVSKRFPRVKIVTSEIEFGLNDDFRVVPGMGEFGDRYFGTDDYQSSTPFFCDDKNRVRLL

SEQ ID NO: 9141 - DNA, 1440 bp, Zea mays
  CDS (1)..(1440)
atggaggacgcgttgggctccgcggtgggtccccacttcagcggcctccgtctcgactcgcgccgcctctccctctccccttcctcctccccctcccgctccgccagcggcaacggcacgctcgtcgccgcgccggggctcgcgttccccaaggcggaggacgggaccaggaagcccttcgtcataggcgtgtgtggaggcaccgcgtcgggcaagacgacggtgtgcgacgcgatcattcagcagctccacgaccaccgcgtcgcgctcgtcaaccaggattcattctaccatggtttaactgaggaacagtctgagcatgtgcaagactataattttgatcatcctgatgcattcgatacagatcgacttttggagtgcatgggaaagctaacaagtggacagtccgtgaatattcctatatacgattttaagaatcacaggcgatgctctgaaaaatttaggaaggtcaatgaatcagatgtcatcattttggaggggatcttggtttttcatgatcagagggttcgtgatttgatggacatgaaaatttttgttgacgcagacgctgatactagacttgctagacgtgtgaggcgtgatactgttgaaagaggtagagatgttacctcagtgcttgagcagtatgtgagatttgtcaagcctgcatttgatgcttttgtcctgccttcgaagaaatatgctgatgtgatcataccaagagggggagataaccttgttgcaattgatctaattgtgcaacatatcaacacaaaacttggccagcataacttgtgcaaagcctacccaaatgtctttgtagttcacacaactttccagataagaggaatgcatactctaattcgtgacaagaacattactacacctgactttgttttctactcagataggctgattcgtctggtggttgagcatggtcttgggcatttgccatttacagagaagcaggtggttacaccaacaggatctctttacatgggagttgacttctgcaagaagctctgtggagtgtctattattcgaagtggagaaagcatggaaaatgcactgcgtgcttgttgtaaggggataaaaataggcaaaattctatttcatcgcattggagacaatggacaacaactcatataccataagctgcccgtggatattgctgaacgccatgttttgcttttggaccctgtgcttggtacaggtaattcagctaatcaagccattgagcttcttatgagcaaaggagttcctgaggaccgtatcatttttctgactctcgtctcggcccctgaaggcatccattgtgtgtgcaagcgcttccctcatttgaagattgtaacctcagagattgatagtggattgaacgatgaatatcgtgtcataccaggacttggagagtatggtgatcgatacttcggcacagactaa

SEQ ID NO: 9142 - protein, 479 aa, Zea mays
MEDALGSAVGPHFSGLRLDSRRLSLSPSSSPSRSASGNGTLVAAPGLAFPKAEDGTRKPFVIGVCGGTASGKTTVCDAIIQQLHDHRVALVNQDSFYHGLTEEQSEHVQDYNFDHPDAFDTDRLLECMGKLTSGQSVNIPIYDFKNHRRCSEKFRKVNESDVIILEGILVFHDQRVRDLMDMKIFVDADADTRLARRVRRDTVERGRDVTSVLEQYVRFVKPAFDAFVLPSKKYADVIIPRGGDNLVAIDLIVQHINTKLGQHNLCKAYPNVFVVHTTFQIRGMHTLIRDKNITTPDFVFYSDRLIRLVVEHGLGHLPFTEKQVVTPTGSLYMGVDFCKKLCGVSIIRSGESMENALRACCKGIKIGKILFHRIGDNGQQLIYHKLPVDIAERHVLLLDPVLGTGNSANQAIELLMSKGVPEDRIIFLTLVSAPEGIHCVCKRFPHLKIVTSEIDSGLNDEYRVIPGLGEYGDRYFGTD

SEQ ID NO: 9143 - DNA, 1443 bp, Zea mays
  CDS (1)..(1443)
atgggttcgaaatcggtagacgaggtgctcgacgccgccgccgccggagtccattactccgcactccgtctggacggccaggcttccgcaacgacgtctggcctggagaacggccaccaggagccctttgtcattggtgttgctgggggtgcatcgtcaggcaagagtaccgtgtgcaagatgatcattgatcagctccgtgaccagcgtgtcgtggttgttacgcaggagtccttttattatggattgacggatgaagaattagtacatgtccataattataactttgatcatccagacgcatttcatacagagctacttctctcttgtatgcaaaacttgaaatgtggcaaagctgttgacatccctaactacaacttcaagacatacaaaagtgtcccaaatgcaaggaaggttaatccttcggatgttattattttggaaggaattctagtttttcatgattcacgcctcagggatttgatgaacatgaagattttcgttgatacagacgctgacgtacggttaacaaggaggatccatcgtgataccattgacaagggtagagatctcaaagctgtgttagaacagttctcaaaatttgttaagcctgcttttgaagacttcatcctcccaacgaagaagtatgctgatgttatcatcccacgcggaggagacaatgatgtggcaattgacctaatcgttcagcatattcggactaaacttggacaacatgatcttcgtaaaatacaccctaatctgtatgtaattcagactacttatcagatacgaggcatgcacacaataataagggatgctgccacagcaacacatgatttcatattttatgctgatcggttgattcgattggttgtcgaacatggtcttggtcatcttcctttccaggaaaagcaggtcatcactccgactgggtctgtttacactggtgtggagttctccaaaaggttgtgtggtatctcagtgatcaggagtggcgaaagtatggagaatgcactacgtgcatgctgtaaaggtataaagattgggaagattcttattcatcgggaaggtgacaatggacaacagctcatctatcaaaatttaccaaaagatattgcaaataggcatgttcttctgttggaccccatattgggaacaggaaattcagcagttcaggccatctcccttctattgaagaagggtgtacaggaagcaaatattatatttcttaatcttatttcagcgccccaaggagtgcatgtggtgggcaagagattccctagagtgaagatcgttacttcggagattgagtttggtctaaatgatgatttccgtgtcgtacctgggatgggcgaatttggagacagatactttggaacagatgaatatcagtcatcgacgccatttttttgtgacgataaaaatcgtgtcaggctcttgtga

SEQ ID NO: 9144 - protein, 480 aa, Zea mays
MGSKSVDEVLDAAAAGVHYSALRLDGQASATTSGLENGHQEPFVIGVAGGASSGKSTVCKMIIDQLRDQRVVVVTQESFYYGLTDEELVHVHNYNFDHPDAFHTELLLSCMQNLKCGKAVDIPNYNFKTYKSVPNARKVNPSDVIILEGILVFHDSRLRDLMNMKIFVDTDADVRLTRRIHRDTIDKGRDLKAVLEQFSKFVKPAFEDFILPTKKYADVIIPRGGDNDVAIDLIVQHIRTKLGQHDLRKIHPNLYVIQTTYQIRGMHTIIRDAATATHDFIFYADRLIRLVVEHGLGHLPFQEKQVITPTGSVYTGVEFSKRLCGISVIRSGESMENALRACCKGIKIGKILIHREGDNGQQLIYQNLPKDIANRHVLLLDPILGTGNSAVQAISLLLKKGVQEANIIFLNLISAPQGVHVVGKRFPRVKIVTSEIEFGLNDDFRVVPGMGEFGDRYFGTDEYQSSTPFFCDDKNRVRLL

SEQ ID NO: 9145 - DNA, 1443 bp, Zea mays
  CDS (1)..(1443)
atgggttcgaaatcggtagacgaggtgctcgacgccgccgccgccggagtccattactccgcactccgtctggacggccaggcttccgcaacgacgtctggcctggagaacggccaccaggagccctttgtcattggtgttgctgggggtgcatcgtcaggcaagagtaccgtgtgcaagatgatcattgatcagctccgtgaccagcgtgtcgtggttgttacgcaggagtccttttattatggattgacggatgaagaattagtacatgtccataattataactttgatcatccagacgcatttcatacagagctacttctctcttgtatgcaaaacttgaaatgtggcaaagctgttgacatccctaactacaacttcaagacatacaaaagtgtcccaaatgcaaggaaggttaatccttcggatgttattattttggaaggaattctagtttttcatgattcacgcctcagggatttgatgaacatgaagattttcgttgatacagacgctgacgtacggttaacaaggaggatccatcgtgataccattgacaagggtagagatctcaaagctgtgttagaacagttctcaaaatttgttaagcctgcttttgaagacttcatcctcccaacgaagaagtatgctgatgttatcatcccacgcggaggagacaatgatgtggcaattgacctaatcgttcagcatattcggactaaacttggacaacatgatcttcgtaaaatacaccctaatctgtatgtaattcagactacttatcagatacgaggcatgcacacaataataagggatgctgccacagcaacacatgatttcatattttatgctgatcggttgattcgattggttgtcgaacatggtcttggtcatcttcctttccaggaaaagcaggtcatcactccgactgggtctgtttacactggtgtggagttctccaaaaggttgtgtggtatctcagtgatcaggagtggcgaaagtatggagaatgcactacgtgcatgctgtaaaggtataaagattgggaagattcttattcatcgggaaggtgacaatggacaacagctcatctatcaaaatttaccaaaagatattgcaaataggcatgttctgctgttggaccccatattgggaacaggaaattcagcagttcaggccatctcccttctattgaagaagggtgtacaagaagcaaatattatatttcttaatcttatttcagcgccccaaggagtgcatgtggtgagcaagagattccctagagtgaagatcgttacttcggagattgagtttggtctaaatgatgatttccgtgttgtgcctgggatgggcgaatttggagacagatactttggaacagatgattatcagtcatcgacgccattcttttgtgacgataaaaatcgtgtcaggctcttgtga

SEQ ID NO: 9146 - protein, 480 aa, Zea mays
MGSKSVDEVLDAAAAGVHYSALRLDGQASATTSGLENGHQEPFVIGVAGGASSGKSTVCKMIIDQLRDQRVVVVTQESFYYGLTDEELVHVHNYNFDHPDAFHTELLLSCMQNLKCGKAVDIPNYNFKTYKSVPNARKVNPSDVIILEGILVFHDSRLRDLMNMKIFVDTDADVRLTRRIHRDTIDKGRDLKAVLEQFSKFVKPAFEDFILPTKKYADVIIPRGGDNDVAIDLIVQHIRTKLGQHDLRKIHPNLYVIQTTYQIRGMHTIIRDAATATHDFIFYADRLIRLVVEHGLGHLPFQEKQVITPTGSVYTGVEFSKRLCGISVIRSGESMENALRACCKGIKIGKILIHREGDNGQQLIYQNLPKDIANRHVLLLDPILGTGNSAVQAISLLLKKGVQEANIIFLNLISAPQGVHVVSKRFPRVKIVTSEIEFGLNDDFRVVPGMGEFGDRYFGTDDYQSSTPFFCDDKNRVRLL

SEQ ID NO: 9147 - DNA, 1473 bp, Zea mays
  CDS (1)..(1473)
atgccggacaaggcggtggacgacgtcatggaggccgcggtgggggcccacttcagcggcctccgcctcggggcgctgcgcctctccacctctgcgccctcttccccttcctcctcccccgccgccgcggcgcacacgcactccaacggagccgtctacgccaacggcaccaccgagcttccctctcctgccgctgcccggcagccattcgtcatcggggtttctggagggacggcgtcggggaagacgacggtgtgcgacatgatcatccagcagctgcacgaccaccgtgtcgtgctcgttaaccaggattcgttttaccgtggccttactgctgaagagtctgcacatgcacaagactataattttgatcaccctgatgcatttgatacagagcaacttctagaatgcatggggcagctgaaatgtgctcaacctgtaaatgttcctatatatgatttcaagaagcatcgacggtgttctgaaagctttagaaaggtcaatgcatcagatgtcattattttggagggcattttagtgttccatgaccagagagttcgcaatctgatggacatgaaaatttttgtagacacagatgctgacattaggcttgctcgacgaatcagacgtgatacagttgaaagaggaagagatatcagctccgtgcttgaccaatatgggaggtttgtgaagccagcgttcgatgattttgttttgccttcaaagaagtatgctgacgtgatcattcctcgaggtggtgataaccatgtagcagttgatctgattgttcaacatatccgtacaaaacttggtcagcatgacttgtgcaaaatctatccaaatgttcatgttgttcaatcaacttttcagatccgaggaatgcatactcttatccgtgatagggacatcaccacacctgactttgtattttattcagatcgattgatccgtttggtagtggagcatggtcttggacatttgccatttacagaaaagcaggttattaccccaacaggatctgtttatatgggagttgacttttgtaagaagctctgtggagtctctattgtgcgaagtggtgagagtatggagaacgcattgcgtgcttgttgtaaaggaataaaaattgggaaaattctaattcatcgtgttggagacaatggacaacagcttgtttatcacaaactgcccatggatattgctgaacgacatgttctacttttggatccggtgcttggtacaggcaactcagtagcccaagcaattgaccttcttataagaaaaggtgttcctgaggatcggatcatttttctcaatctcatctcggctcctgaagggattcagtgtatctgcaagcgatttccttcgctgaagattgttacatctgaaatcgattatggtctgaacgaggaattcagggtgatcccaggactgggagaatatggcgaccgctacttcggcacagacaattga

SEQ ID NO: 9148 - protein, 490 aa, Zea mays
MPDKAVDDVMEAAVGAHFSGLRLGALRLSTSAPSSPSSSPAAAAHTHSNGAVYANGTTELPSPAAARQPFVIGVSGGTASGKTTVCDMIIQQLHDHRVVLVNQDSFYRGLTAEESAHAQDYNFDHPDAFDTEQLLECMGQLKCAQPVNVPIYDFKKHRRCSESFRKVNASDVIILEGILVFHDQRVRNLMDMKIFVDTDADIRLARRIRRDTVERGRDISSVLDQYGRFVKPAFDDFVLPSKKYADVIIPRGGDNHVAVDLIVQHIRTKLGQHDLCKIYPNVHVVQSTFQIRGMHTLIRDRDITTPDFVFYSDRLIRLVVEHGLGHLPFTEKQVITPTGSVYMGVDFCKKLCGVSIVRSGESMENALRACCKGIKIGKILIHRVGDNGQQLVYHKLPMDIAERHVLLLDPVLGTGNSVAQAIDLLIRKGVPEDRIIFLNLISAPEGIQCICKRFPSLKIVTSEIDYGLNEEFRVIPGLGEYGDRYFGTDN

SEQ ID NO: 9149 - DNA, 21 bp, Artificial sequence
  primer
atggcgcttcgtcgccccctt

SEQ ID NO: 9150 - DNA, 27 bp, Artificial sequence
  primer
ttattcaaagaactgacttattttcgc

SEQ ID NO: 9151 - protein, 223 aa, Artificial sequence
  consensus sequence
  Variant (3)..(4): Xaa in position 3 to 4 is any amino acid
  Variant (6)..(8): Xaa in position 6 to 8 is any amino acid
  Variant (12)..(26): Xaa in position 12 to 26 is any amino acid
  Variant (27)..(39): Xaa in position 27 to 39 is any or no amino acid
  Variant (41)..(42): Xaa in position 41 to 42 is any amino acid
  Variant (44)..(56): Xaa in position 44 to 56 is any amino acid
  Variant (57)..(65): Xaa in position 57 to 65 is any or no amino acid
  Variant (67)..(67): Xaa in position 67 is any amino acid
  Variant (71)..(73): Xaa in position 71 to 73 is any amino acid
  Variant (75)..(77): Xaa in position 75 to 77 is any amino acid
  Variant (79)..(84): Xaa in position 79 to 84 is any amino acid
  Variant (86)..(93): Xaa in position 86 to 93 is any amino acid
  Variant (95)..(95): Xaa in position 95 is any amino acid
  Variant (97)..(102): Xaa in position 97 to 102 is any amino acid
  Variant (104)..(113): Xaa in position 104 to 113 is any amino acid
  Variant (114)..(115): Xaa in position 114 to 115 is any or no amino acid
  Variant (117)..(119): Xaa in position 117 to 119 is any amino acid
  Variant (124)..(139): Xaa in position 124 to 139 is any amino acid
  Variant (140)..(140): Xaa in position 140 is any or no amino acid
  Variant (144)..(145): Xaa in position 144 to 145 is any amino acid
  Variant (147)..(150): Xaa in position 147 to 150 is any amino acid
  Variant (153)..(154): Xaa in position 153 to 154 is any amino acid
  Variant (157)..(158): Xaa in position 157 to 158 is any amino acid
  Variant (159)..(159): Xaa in position 159 is any or no amino acid
  Variant (163)..(166): Xaa in position 163 to 166 is any amino acid
  Variant (168)..(169): Xaa in position 168 to 169 is any amino acid
  Variant (172)..(174): Xaa in position 172 to 174 is any amino acid
  Variant (176)..(176): Xaa in position 176 is any amino acid
  Variant (178)..(181): Xaa in position 178 to 181 is any amino acid
  Variant (183)..(184): Xaa in position 183 to 184 is any amino acid
  Variant (186)..(186): Xaa in position 186 is any amino acid
  Variant (188)..(189): Xaa in position 188 to 189 is any amino acid
  Variant (192)..(192): Xaa in position 192 is any amino acid
  Variant (194)..(194): Xaa in position 194 is any amino acid
  Variant (196)..(196): Xaa in position 196 is any amino acid
  Variant (198)..(198): Xaa in position 198 is any amino acid
  Variant (199)..(207): Xaa in position 199 to 207 is any or no amino acid
  Variant (209)..(209): Xaa in position 209 is any amino acid
  Variant (210)..(210): Xaa in position 210 is any or no amino acid
  Variant (212)..(218): Xaa in position 212 to 218 is any amino acid
  Variant (220)..(222): Xaa in position 220 to 222 is any amino acid
IGXXGXXXSGKXXXXXXXXXXXXXXXXXXXXXXXXXXXXDXXYXXXXXXXXXXXXXXXXXXXXXXNXDHPXXXDXXXLXXXXXXLXXXXXXXXPXYXXXXXXRXXXXXXXXXXXXVXXXEGILXXXXXXXXXXXXXXXXXVDTXXDXXXXRRXXRDXXXRGRXXXXVXXQYXXXVXPXXXXFXXPXKXXADXIXPXGXXXXXXXXXXNXXAXXXXXXXIXXXL

SEQ ID NO: 9152 - protein, 34 aa, Artificial sequence
  protein pattern
  Variant (3)..(3): Xaa in position 3 is Asp, Glu, Asn, Ser or Thr
  Variant (4)..(9): Xaa in position 4 to 9 is any amino acid
  Variant (11)..(14): Xaa in position 11 to 14 is any amino acid
  Variant (16)..(16): Xaa in position 16 is any amino acid
  Variant (18)..(21): Xaa in position 18 to 21 is any amino acid
  Variant (22)..(22): Xaa in position 22 is Phe or Tyr
  Variant (23)..(29): Xaa in position 23 to 29 is any amino acid
  Variant (31)..(33): Xaa in position 31 to 33 is any amino acid
  Variant (34)..(34): Xaa in position 34 is Ile, Leu or Val
GRXXXXXXXQXXXXVXPXXXXXXXXXXXXAXXXX

SEQ ID NO: 9153 - protein, 16 aa, Artificial sequence
  protein pattern
  Variant (2)..(2): Xaa in position 2 is Ala or Thr
  Variant (3)..(3): Xaa in position 3 is Asp or Pro
  Variant (4)..(4): Xaa in position 4 is any amino acid
  Variant (6)..(7): Xaa in position 6 to 7 is any amino acid
  Variant (8)..(8): Xaa in position 8 is Phe, Ile or Leu
  Variant (9)..(9): Xaa in position 9 is any amino acid
  Variant (12)..(12): Xaa in position 12 is any amino acid
  Variant (13)..(13): Xaa in position 13 is any or no amino acid
  Variant (15)..(15): Xaa in position 15 is any or no amino acid
DXXXDXXXXRRXXRXD

SEQ ID NO: 9154 - protein, 36 aa, Artificial sequence
  protein pattern
  Variant (4)..(4): Xaa in position 4 is any amino acid
  Variant (5)..(5): Xaa in position 5 is Ala or Ser
  Variant (6)..(6): Xaa in position 6 is Phe, Ile, Leu, Met or Val
  Variant (7)..(10): Xaa in position 7 to 10 is any amino acid
  Variant (11)..(11): Xaa in position 11 is Phe, Leu or Met
  Variant (12)..(17): Xaa in position 12 to 17 is any amino acid
  Variant (19)..(26): Xaa in position 19 to 26 is any amino acid
  Variant (28)..(28): Xaa in position 28 is any amino acid
  Variant (30)..(30): Xaa in position 30 is Cys, Asp, Asn or Ser
  Variant (31)..(35): Xaa in position 31 to 35 is any amino acid
  Variant (36)..(36): Xaa in position 36 is Asn, Arg or Ser
DHPXXXXXXXXXXXXXXLXXXXXXXXPXYXXXXXXX

SEQ ID NO: 9155 - protein, 20 aa, Artificial sequence
  protein pattern
  Variant (2)..(2): Xaa in position 2 is Gly, Ile or Val
  Variant (3)..(3): Xaa in position 3 is Ala, Gly, Ile or Val
  Variant (4)..(4): Xaa in position 4 is any amino acid
  Variant (5)..(5): Xaa in position 5 is Ala, Gly, Ser or Thr
  Variant (7)..(7): Xaa in position 7 is any amino acid
  Variant (8)..(8): Xaa in position 8 is any or no amino acid
  Variant (10)..(11): Xaa in position 10 to 11 is any or no amino acid
  Variant (14)..(14): Xaa in position 14 is Ser or Thr
  Variant (15)..(15): Xaa in position 15 is any amino acid
  Variant (16)..(16): Xaa in position 16 is Phe, Ile, Leu or Val
  Variant (17)..(17): Xaa in position 17 is Ala, Cys, Ser, Thr or Val
  Variant (18)..(19): Xaa in position 18 to 19 is any amino acid
  Variant (20)..(20): Xaa in position 20 is Ile, Leu or Val
IXXXXGXXSXXGKXXXXXXX

SEQ ID NO: 9156 - DNA, 1059 bp, Escherichia coli
  CDS (1)..(1059): transl_table=11
atgctaccatctatttcaatcaacaataccagcgcagcttacccagaatccatcaatgaaaataacaatgatgaagttaatggattagtacaagagttcaaaaacctttttaatggtaaggaaggaataagcacctgtattaaacatctacttgagcttataaaaaacgccatacgagtaaacgacgatccttatagatttaatattaataattcctcagttacttatattgatattgactccaatgatacagaccatattactattggtatcgacaaccaagaaccaatagaattacctgcgaactataaagacaaagaactcgtccgtactatcattaatgacaacatagttgagaagactcatgatatcaataacaaggaaatgatcttcagcgcattaaaagaaatatatgatggagatcctggttttatcttcgataagatatcacacaaactcagacatacggtaacggaatttgatgagagcgggaaaagcgaaccaacggacttatttacctggtacggtaaagataaaaaaggcgactctctcgctattgtaattaaaaataaaaacggaaatgattacttatctctcggttactacgatcaggacgactaccacattcaaagaggaattcgtattaatggtgatagtctcacccaatattgtagtgaaaacgccaggagtgcttcagcgtggtttgaaagcagtaaagctatcatggcagaatcatttgcaactggttccgatcatcaggttgtaaacgagctcaacggggaaagactgagagaaccaaacgacgtttttaaacgttatggtcgagcaataagatatgattttcaagtggacgatgcaaaatataaatgcgaccatctaaaagaaatagtttctactttagtcggtaacaaaattaacgttggccattctcaaaaaatatataagcattttaaggatctcgaaggtaaaattgaagaaaggcttcaaaatcgccaggctgaatatcaaaatgaaattaatcaaccatctgcgccaggtgttaattttgatgatatttaa

SEQ ID NO: 9157 - protein, 352 aa, Escherichia coli
MLPSISINNTSAAYPESINENNNDEVNGLVQEFKNLFNGKEGISTCIKHLLELIKNAIRVNDDPYRFNINNSSVTYIDIDSNDTDHITIGIDNQEPIELPANYKDKELVRTIINDNIVEKTHDINNKEMIFSALKEIYDGDPGFIFDKISHKLRHTVTEFDESGKSEPTDLFTWYGKDKKGDSLAIVIKNKNGNDYLSLGYYDQDDYHIQRGIRINGDSLTQYCSENARSASAWFESSKAIMAESFATGSDHQVVNELNGERLREPNDVFKRYGRAIRYDFQVDDAKYKCDHLKEIVSTLVGNKINVGHSQKIYKHFKDLEGKIEERLQNRQAEYQNEINQPSAPGVNFDDI

SEQ ID NO: 9158 - DNA, 1068 bp, Shigella flexneri 2a str. 301
  CDS (1)..(1068): transl_table=11
atggttacgttttggggaaattatgaggggatctctcagagcgcagcttacccagaatccatcaatgaaaataacaatgatgaaattaatggattagtacaagagttcaaaaacctttttaatggtaaggaaggaataagcacctgtattaaacatctacttgagcttataaaaaacgccatacgagtaaacgacgatccttatagatctaatattaataattcctcagttacttatattgatattggctccaatgatacagaccatattactattggtatcgacaaccaagaaccaatagaattacctgcgaactataaagacaaagaactcgtccgtactatcattaatgacaacatagttgagaagactcatgatatcaataacaaggaaatgatcttcagcgcattaaaagaaatatatgatggagatcctggttttatcttcgataagatatcacacaaactcagacatacggtaacggaatttgatgagagcgggaaaagcgaaccaacggacttatttacctggtacggtaaagataaaaaaggcgactctctcgctattgtaattaaaaataaaaacggaaatgattacttatctctcggttactacgatcaggacgactaccacattcaaagaggaattcgtattaatggtgatagtctcacccaatattgtagtgaaaacgccaggagtgcttcagcgtggtttgaaagcagtaaagctatcatggcagaatcatttgcaactggttccgatcatcaggttgtaaacgagctcaacggggaaagactgagagaacctaacgaagtttttaaacgtttaggtcgagcaataagatataattttcaagtggacgatgcaaaatttagacgcgataatgtaaaagaaataatttctactttattcgctaacaaagttgacgttgaccatcctgaaaataaatacaaagactttaagaatctcgaagataaagttgaaaaaagacttcaaaatcgccagacgaaatatcaaaatgaaattaatcaactatctgcactaggtgttaattttgatgatatttaa

SEQ ID NO: 9159 - protein, 355 aa, Shigella flexneri 2a str. 301
MVTFWGNYEGISQSAAYPESINENNNDEINGLVQEFKNLFNGKEGISTCIKHLLELIKNAIRVNDDPYRSNINNSSVTYIDIGSNDTDHITIGIDNQEPIELPANYKDKELVRTIINDNIVEKTHDINNKEMIFSALKEIYDGDPGFIFDKISHKLRHTVTEFDESGKSEPTDLFTWYGKDKKGDSLAIVIKNKNGNDYLSLGYYDQDDYHIQRGIRINGDSLTQYCSENARSASAWFESSKAIMAESFATGSDHQVVNELNGERLREPNEVFKRLGRAIRYNFQVDDAKFRRDNVKEIISTLFANKVDVDHPENKYKDFKNLEDKVEKRLQNRQTKYQNEINQLSALGVNFDDI

SEQ ID NO: 9160 - DNA, 1059 bp, Shigella flexneri 2a str. 2457T
  CDS (1)..(1059): transl_table=11
atgctaccatctatttcaatcaacaataccagcgcagcttacccagaatccatcaatgaaaataacaatgatgaaattaatggattagtacaagagttcaaaaacctttttaatggtaaggaaggaataagcacctgtattaaacatctacttgagcttataaaaaacgccatacgagtaaacgacgatccttatagatctaatattaataattcctcagttacttatattgatattggctccaatgatacagaccatattactattggtatcgacaaccaagaaccaatagaattacctgcgaactataaagacaaagaactcgtccgtactatcattaatgacaacatagttgagaagactcatgatatcaataacaaggaaatgatcttcagcgcattaaaagaaatatatgatggagatcctggttttatcttcgataagatatcacacaaactcagacatacggtaacggaatttgatgagagcgggaaaagcgaaccaacggacttatttacctggtacggtaaagataaaaaaggcgactctctcgctattgtaattaaaaataaaaacggaaatgattacttatctctcggttactacgatcaggacgactaccacattcaaagaggaattcgtattaatggtgatagtctcacccaatattgtagtgaaaacgccaggagtgcttcagcgtggtttgaaagcagtaaagctatcatggcagaatcatttgcaactggttccgatcatcaggttgtaaacgagctcaacggggaaagactgagagaacctaacgaagtttttaaacgtttaggtcgagcaataagatataattttcaagtggacgatgcaaaatttagacgcgataatgtaaaagaaataatttctactttattcgctaacaaagttgacgttgaccatcctgaaaataaatacaaagactttaagaatctcgaagataaagttgaaaaaagacttcaaaatcgccagacgaaatatcaaaatgaaattaatcaactatctgcactaggtgttaattttgatgatatttaa

SEQ ID NO: 9161 - protein, 352 aa, Shigella flexneri 2a str. 2457T
MLPSISINNTSAAYPESINENNNDEINGLVQEFKNLFNGKEGISTCIKHLLELIKNAIRVNDDPYRSNINNSSVTYIDIGSNDTDHITIGIDNQEPIELPANYKDKELVRTIINDNIVEKTHDINNKEMIFSALKEIYDGDPGFIFDKISHKLRHTVTEFDESGKSEPTDLFTWYGKDKKGDSLAIVIKNKNGNDYLSLGYYDQDDYHIQRGIRINGDSLTQYCSENARSASAWFESSKAIMAESFATGSDHQVVNELNGERLREPNEVFKRLGRAIRYNFQVDDAKFRRDNVKEIISTLFANKVDVDHPENKYKDFKNLEDKVEKRLQNRQTKYQNEINQLSALGVNFDDI

SEQ ID NO: 9162 - DNA, 1059 bp, Escherichia coli B
  CDS (1)..(1059): transl_table=11
atgctaccatctatttcaatcaacaataccagcgcagcttacccagaatccatcaatgaaaataacaatgatgaagttaatggattagtacaagagttcaaaaacctttttaatggtaaggaaggaataagcacctgtattaaacatctacttgagcttataaaaaacgccatacgagtaaacgacgatccttatagatttaatattaataattcctcagttacttatattgatattgactccaatgatacagaccatattactattggtatcgacaaccaagaaccaatagaattacctgcgaactataaagacaaagaactcgtccgtactatcattaatgacaacatagttgagaagactcatgatatcaataacaaggaaatgatcttcagcgcattaaaagaaatatatgatggagatcctggttttatcttcgataagatatcacacaaactcagacatacggtaacggaatttgatgagagcgggaaaagcgaaccaacggacttatttacctggtacggtaaagataaaaaaggcgactctctcgctattgtaattaaaaataaaaacggaaatgattacttatctctcggttactacgatcaggacgactaccacattcaaagaggaattcgtattaatggtgatagtctcacccaatattgtagtgaaaacgccaggagtgcttcagcgtggtttgaaagcagtaaagctatcatggcagaatcatttgcaacaggttccgatcatcaggttataaacgagctcaacggggaaagactgagagaacctaacgaagtttttaaacgtttaggtcgagcaataagatataattttcaagtggacgatgcaaaatttagacgcgataatgtaaaagaaataatttctaatttattcgctaacaaagttgacgttgaccatcctgaaaataaatacaaagactttaaggatctcgaagataacgttgaaaaaagacttcaaaatcgccaggcgaaatatcaaaatgaaattaatcaactatctgcgccaggtgttaattttgatgatatttaa

SEQ ID NO: 9163 - protein, 352 aa, Escherichia coli B
MLPSISINNTSAAYPESINENNNDEVNGLVQEFKNLFNGKEGISTCIKHLLELIKNAIRVNDDPYRFNINNSSVTYIDIDSNDTDHITIGIDNQEPIELPANYKDKELVRTIINDNIVEKTHDINNKEMIFSALKEIYDGDPGFIFDKISHKLRHTVTEFDESGKSEPTDLFTWYGKDKKGDSLAIVIKNKNGNDYLSLGYYDQDDYHIQRGIRINGDSLTQYCSENARSASAWFESSKAIMAESFATGSDHQVINELNGERLREPNEVFKRLGRAIRYNFQVDDAKFRRDNVKEIISNLFANKVDVDHPENKYKDFKDLEDNVEKRLQNRQAKYQNEINQLSAPGVNFDDI

SEQ ID NO: 9164 - DNA, 24 bp, Artificial sequence
  primer
atgctaccatctatttcaatcaac

SEQ ID NO: 9165 - DNA, 27 bp, Artificial sequence
  primer
ttaaatatcatcaaaattaacacctgg

SEQ ID NO: 9166 - protein, 355 aa, Artificial sequence
  consensus sequence
  Variant (2)..(10): Xaa in position 2 to 10 is any amino acid
  Variant (11)..(13): Xaa in position 11 to 13 is any or no amino acid
  Variant (29)..(29): Xaa in position 29 is any amino acid
  Variant (70)..(70): Xaa in position 70 is any amino acid
  Variant (83)..(83): Xaa in position 83 is any amino acid
  Variant (258)..(258): Xaa in position 258 is any amino acid
  Variant (271)..(271): Xaa in position 271 is any amino acid
  Variant (276)..(276): Xaa in position 276 is any amino acid
  Variant (283)..(283): Xaa in position 283 is any amino acid
  Variant (291)..(293): Xaa in position 291 to 293 is any amino acid
  Variant (295)..(296): Xaa in position 295 to 296 is any amino acid
  Variant (300)..(300): Xaa in position 300 is any amino acid
  Variant (302)..(302): Xaa in position 302 is any amino acid
  Variant (304)..(305): Xaa in position 304 to 305 is any amino acid
  Variant (308)..(309): Xaa in position 308 to 309 is any amino acid
  Variant (311)..(311): Xaa in position 311 is any amino acid
  Variant (313)..(316): Xaa in position 313 to 316 is any amino acid
  Variant (319)..(319): Xaa in position 319 is any amino acid
  Variant (322)..(322): Xaa in position 322 is any amino acid
  Variant (325)..(327): Xaa in position 325 to 327 is any amino acid
  Variant (329)..(329): Xaa in position 329 is any amino acid
  Variant (336)..(337): Xaa in position 336 to 337 is any amino acid
  Variant (345)..(345): Xaa in position 345 is any amino acid
  Variant (348)..(348): Xaa in position 348 is any amino acid
MXXXXXXXXXXXXSAAYPESINENNNDEXNGLVQEFKNLFNGKEGISTCIKHLLELIKNAIRVNDDPYRXNINNSSVTYIDIXSNDTDHITIGIDNQEPIELPANYKDKELVRTIINDNIVEKTHDINNKEMIFSALKEIYDGDPGFIFDKISHKLRHTVTEFDESGKSEPTDLFTWYGKDKKGDSLAIVIKNKNGNDYLSLGYYDQDDYHIQRGIRINGDSLTQYCSENARSASAWFESSKAIMAESFATGSDHQVXNELNGERLREPNXVFKRXGRAIRYXFQVDDAKXXXDXXKEIXSXLXXNKXXVXHXXXXYKXFKXLEXXXEXRLQNRQXXYQNEINQXSAXGVNFDDI

SEQ ID NO: 9167 - DNA, 621 bp, Escherichia coli
  CDS (1)..(621): transl_table=11
atggaaatttacgagaacgaaaacgaccaggtagaagcggttaaacgcttttttgctgaaaatggcaaagcactggctgttggggtgattttgggcgttggcgcactgattggctggcgctactggaacagccatcaggttgattctgcacgctccgcttctcttgcctatcaaaatgcggttaccgcagtgagcgaaggcaaaccggatagcatcccggcggcggaaaaatttgctgctgaaaataaaaatacttatggtgcgctggcttctttggaacttgcgcagcaatttgttgacaaaaatgaactagagaaagctgccgcccagttacaacaggggctggcagacacgagcgatgaaaatctcaaagccgtgataaatctgcgtcttgctcgcgttcaggtacagctcaagcaggctgatgccgcgctgaaaacccttgataccatcaaaggtgaagggtgggctgccattgttgccgacctgcgtggtgaagcattgctgagcaaaggtgataagcaaggtgcgcgtagtgcatgggaagcaggcgtgaaaagcgatgttactccggcactgagcgaaatgatgcagatgaaaattaataatttgtccatctaa

SEQ ID NO: 9168 - protein, 206 aa, Escherichia coli
MEIYENENDQVEAVKRFFAENGKALAVGVILGVGALIGWRYWNSHQVDSARSASLAYQNAVTAVSEGKPDSIPAAEKFAAENKNTYGALASLELAQQFVDKNELEKAAAQLQQGLADTSDENLKAVINLRLARVQVQLKQADAALKTLDTIKGEGWAAIVADLRGEALLSKGDKQGARSAWEAGVKSDVTPALSEMMQMKINNLSI

SEQ ID NO: 9169 - DNA, 615 bp, Vibrio cholerae O1 biovar eltor str. N16961
  CDS (1)..(615): transl_table=11
gtggaactctacgatactgaagaacaacaagttgaagcgatcaaagattggtggaaagagaacggcaaagcggtgatctttggcgcggtaattggtcttggtggcctatttggctggcgctactatcaagactctgtggttgctgcgcaagaagcagcatcgcaaagctacagcaaagcgatggatgcactgcaggcaaaaggcattgaatcagaaggcactatccaaacttttattgatgccaataaagagaccgaatacgcagttttggctgcaatgcagttagccaaagctcaagtggacgcgggtcaactggatgaagcgttagcgcaattggagtgggcaaaaggagcaaccaaggatgctgcactgaaacctttgctgacattccgtgttgctcgcttacaggctgagcaaggccaatttgatgacgcattaactcagctaaccagcattcaagagaaatcttgggctggccgagtggcagagctgcgcggtgatatcttgatgcgtaaaggggatagtgcagctgcttatgccgcttataccgaagcgcaacaggcagaggatgctagccaaactctgcaaatgaaactggatgatctcgcgaagtaa

SEQ ID NO: 9170 - protein, 204 aa, Vibrio cholerae O1 biovar eltor str. N16961
MELYDTEEQQVEAIKDWWKENGKAVIFGAVIGLGGLFGWRYYQDSVVAAQEAASQSYSKAMDALQAKGIESEGTIQTFIDANKETEYAVLAAMQLAKAQVDAGQLDEALAQLEWAKGATKDAALKPLLTFRVARLQAEQGQFDDALTQLTSIQEKSWAGRVAELRGDILMRKGDSAAAYAAYTEAQQAEDASQTLQMKLDDLAK

SEQ ID NO: 9171 - DNA, 612 bp, Pasteurella multocida subsp. multocida str. Pm70
  CDS (1)..(612): transl_table=11
atggcttatactgcggaagaagaacaagagctaaatgagattaaaacatggtggaaggaaaattataaaactttaatcgcctcggtcattattgcatttggtggtgtgttcggttggaattactggcaaagtcatcagttaaataaaattcaacaaacttcagctcagtatgaacaggcactgtatagtacagcagattttgctagcaagagtgcgcaaattgagcagtttgtacaagcgaacagcaaaaccagttatgcggttttagccttgttagaaaaggcaaaagttgaagtggaaaaaaaggagtttgcccaagcagagcaatccttaaaacaagccctagcgcagtcaacagatgaaaacttatcctcgattacagcattacgtttagcatcagtacaataccaacaacaagcctttgacatggcattagacagcttgaaacaggtgaaagaaagcagttgggatagtcgtaaaaacttactgattggtgatattttattagccaaaggggataaggtggcggcaaaagccagttatcaacaagcgttaaataatgcctcaccattagaagcacagtggttacaagtgcggttgaataatttataa

SEQ ID NO: 9172 - protein, 203 aa, Pasteurella multocida subsp. multocida str. Pm70
MAYTAEEEQELNEIKTWWKENYKTLIASVIIAFGGVFGWNYWQSHQLNKIQQTSAQYEQALYSTADFASKSAQIEQFVQANSKTSYAVLALLEKAKVEVEKKEFAQAEQSLKQALAQSTDENLSSITALRLASVQYQQQAFDMALDSLKQVKESSWDSRKNLLIGDILLAKGDKVAAKASYQQALNNASPLEAQWLQVRLNNL

SEQ ID NO: 9173 - DNA, 621 bp, Escherichia coli O157:H7 EDL933
  CDS (1)..(621): transl_table=11
  misc_feature (146)..(146): y is t or c
gtggaaatttacgagaacgaaaacgaccaggtagaagcgattaaacgcttttttgctgaaaatggcaaagcactggctgttggggtgattttgggcgttggcgcactgattggctggcgctactggaacagccatcaggttgattytgcacgctccgcttctcttgcctatcaaaatgcggttaccgcagtgagcgaaggcaaaccggatagcatcccggcggcggaaaaatttgctgctgaaaataaaaatacttatggtgcgctggcttctttggaacttgcgcagcaatttgttgacaaaaatgaactagagaaagctgccgcccagttacaacaggggctggcagacacgagcgatgaaaatctcaaagccgtgataaatctgcgtcttgctcgcgttcaggtacagctcaagcaggctgatgccgcgctgaaaacccttgataccatcaaaggtgaagggtgggctgccattgttgccgacctgcgtggtgaagcattgctgagcaaaggtgataagcaaggtgcgcgtagtgcatgggaagcaggcgtgaaaagcgatgttactccggcactgagcgaaatgatgcagatgaaaattaataatttgtccatctga

SEQ ID NO: 9174 - protein, 206 aa, Escherichia coli O157:H7 EDL933
  misc_feature (49)..(49): The Xaa at location 49 stands for Phe, or Ser.
MEIYENENDQVEAIKRFFAENGKALAVGVILGVGALIGWRYWNSHQVDXARSASLAYQNAVTAVSEGKPDSIPAAEKFAAENKNTYGALASLELAQQFVDKNELEKAAAQLQQGLADTSDENLKAVINLRLARVQVQLKQADAALKTLDTIKGEGWAAIVADLRGEALLSKGDKQGARSAWEAGVKSDVTPALSEMMQMKINNLSI

SEQ ID NO: 9175 - DNA, 642 bp, Pseudomonas putida KT2440
  CDS (1)..(642): transl_table=11
gtgtcgagtaccgatgatgatgacctggcaggcgtcaaggactggtggaaccgcaacggcaagccgctgctgaccggtgcattgctggctggcgtggtggtgttgggctggaatacctggcacaagtaccagaccaaccagtcgcaaggtgcctcgcagttgtatcaggcgctgattgaaaccagcctgacaccgaccggccagccggacgccaccaaggtcgcggaactggccggcaagctcaagagcgagtttggcggcaccgcttacgcccagtacggcagcctgttcgtggccaaggtcgcggtcgacagcggcaagctcgatgacgccgcagccgagctgaaaagcgtgctggacaaaccggccgacgttaccttgggcgagatttcgcgtcagcgtctggcgcgcgtactggcagcccagaacaaggccgaggatgccctcaagctgctcgacggcgacgccgacaaagccttcctggccagccgtgaagagttgaagggtgacctgctggtgcagctgggtcgcgccgacgacgcacacagcgcttacgaaaaagccaaggctgcgctgtccgatgacgcggcggtcggtggcctgcaattgaagctggatgacctggctaaaggggacgcgtaa

SEQ ID NO: 9176 - protein, 213 aa, Pseudomonas putida KT2440
MSSTDDDDLAGVKDWWNRNGKPLLTGALLAGVVVLGWNTWHKYQTNQSQGASQLYQALIETSLTPTGQPDATKVAELAGKLKSEFGGTAYAQYGSLFVAKVAVDSGKLDDAAAELKSVLDKPADVTLGEISRQRLARVLAAQNKAEDALKLLDGDADKAFLASREELKGDLLVQLGRADDAHSAYEKAKAALSDDAAVGGLQLKLDDLAKGDA

SEQ ID NO: 9177 - DNA, 615 bp, Vibrio parahaemolyticus RIMD 2210633
  CDS (1)..(615): transl_table=11
gtggaactttacgatactgaagaacaacaagttgaagctattaaagactggtggaaggaaaacggtaaagccgtcatcatcggtgctgttgttggcttaggtggtctatttggctggcgttactaccaggatactgtgattcaggcgagtgaaacagcttcgcaaagctacacaaccgcaatgaatacgctgcaagaaaaaggcgtagatgcgcaatcagatgtgcaagcttttatcgaatcgaacgaagttaaagaatattcagtattggctgctctgcaactagcaaaagcacaagtcgaagcgaaagactttgctgctgctcttgagcaacttaaatgggctcaaagcaatacgaaagatgctgctttatctccactaattagctaccgcatcgctcgtatcgagacagaaatgggtaactttgatgctgcaaacactgagctaggcaaagtgacagatacagcatgggctggtcgcattgctgaattgcgtggtgatattgcacttcgtcaaggtgacaaagatgcagcttacgcggcgtacacagaagcgcagcaagcagcagatgcaagcccaacactgcaaatgaaattggacgacttggcgaaataa

SEQ ID NO: 9178 - protein, 204 aa, Vibrio parahaemolyticus RIMD 2210633
MELYDTEEQQVEAIKDWWKENGKAVIIGAVVGLGGLFGWRYYQDTVIQASETASQSYTTAMNTLQEKGVDAQSDVQAFIESNEVKEYSVLAALQLAKAQVEAKDFAAALEQLKWAQSNTKDAALSPLISYRIARIETEMGNFDAANTELGKVTDTAWAGRIAELRGDIALRQGDKDAAYAAYTEAQQAADASPTLQMKLDDLAK

SEQ ID NO: 9179 - DNA, 621 bp, Coxiella burnetii RSA 493
  CDS (1)..(621): transl_table=11
atgacagaacttctttccgatcaagaacaaatcgaaatgataaaaaaatggtggcgcgattatggtcgcgctattgctcttgctatcgttattggtttattgattggatttggatggcggtattggcatcgtcatcaattggagaaaacagaacgcgcttctgcgctttatatgcaattgcaaatattggcttcgcaaaatgcgtgggataaaacgaaaccgttaaccgaccgactgattaaagattatggtaaaactccttatgcggcaatggcctctttcttaaatgcaaaaagagcggttgagcaaaatcatttaccgttggcattggatcagttgcagtgggttatgaaaaatgccatcgtttccgatttaaaacaattggcgcgcttgcgggcaagtcgaattttattagccgagaatcgcccgaaagcggctttgaatttattgcaaacggttgatgatcaggcttatcagccgctggtggacgaaattaaaggcgatatttacgcagccatggggaatcgtgagtctgctaaacaattttacgaaaccgcacaacagagtatgaaagcgatgggaattaacgacccctatttaacaatgaaaatttcgcaataa

SEQ ID NO: 9180 - protein, 206 aa, Coxiella burnetii RSA 493
MTELLSDQEQIEMIKKWWRDYGRAIALAIVIGLLIGFGWRYWHRHQLEKTERASALYMQLQILASQNAWDKTKPLTDRLIKDYGKTPYAAMASFLNAKRAVEQNHLPLALDQLQWVMKNAIVSDLKQLARLRASRILLAENRPKAALNLLQTVDDQAYQPLVDEIKGDIYAAMGNRESAKQFYETAQQSMKAMGINDPYLTMKISQ

SEQ ID NO: 9181 - DNA, 645 bp, Nitrosomonas europaea ATCC 19718
  CDS (1)..(645): transl_table=11
atgtcagcgtacaactttgaagaacaggaaaagatagaagggttgaagtcctggtgggctgccaacggtactactatgctgtttgccattgccgtttttgcggcaacggtggccggtaaccggctgtggaatcattacaaggctgaacaggcgcagcaggcagctgatttatatgccgttctccagcagcaggttgaaaaagggagtgagctcgtcaaaataaccgatgcggcacacttgctgaccgaaggttttcccggcagcggctatgcttcgcgcgcggcgctgatagctgcccgtgctgcaggtcaggcaggcaatgatcaggttgccagagacatgctgcaatgggcgctcgaccatgctgaagagcctgaaataaaggacatggcccgcttgcggctggcaagtgtgctggtggatgagagcaagtacgaccaggcactgaaattactggatgcacagcatgctgcatcttttaccgggctttacgcagatttacggggagatgcactggccgccgcagggaaaacggatgaagcaagggcagcctaccagaaggcactggacagcctgaatgcacagggtgcttaccggaatgtcgtacagatgaaactggatgtattgagggaacaacggcagtga

SEQ ID NO: 9182 - protein, 214 aa, Nitrosomonas europaea ATCC 19718
MSAYNFEEQEKIEGLKSWWAANGTTMLFAIAVFAATVAGNRLWNHYKAEQAQQAADLYAVLQQQVEKGSELVKITDAAHLLTEGFPGSGYASRAALIAARAAGQAGNDQVARDMLQWALDHAEEPEIKDMARLRLASVLVDESKYDQALKLLDAQHAASFTGLYADLRGDALAAAGKTDEARAAYQKALDSLNAQGAYRNVVQMKLDVLREQRQ

SEQ ID NO: 9183 - DNA, 624 bp, Haemophilus ducreyi 35000HP
  CDS (1)..(624): transl_table=11
atgagtaatgaatatttaaataaaacagaagaacagcagtttgaagaagcaaaaaactggtttaaagaaaatggcacgccaattttagtggcgattgttatcgcttgttgtgtgacttttggttggaatttttggaagaatcatcaattacaaattgcacaacaaacgtcagaaaattatcaagcggtcatggaaagttatttacaagcgcctgaaaaaaatcaaccgctattagttaaatttattgaagatcataaagcatcaagttatgctactttcgcacaattagaacaagccagacaagcggtcgataaagcagattttgcgacagccaaaattattttaactgatgcattaaccagcacaaccgatgtgactttacaagcggtgatccgttttagattagcaatggttgattttcaattaaaagaatatgatacggcgcttgcaactttagcacagcttaaagagcctgcttgggagcaacgtaagcacttattaaggggtgatatttttgcaataaaaggcgatagcgagcaagctaaacaagcttataaacaagcgctagccttagccgatgagcaagataaattattgattgaagtacgtttaaataatttataa

SEQ ID NO: 9184 - protein, 207 aa, Haemophilus ducreyi 35000HP
MSNEYLNKTEEQQFEEAKNWFKENGTPILVAIVIACCVTFGWNFWKNHQLQIAQQTSENYQAVMESYLQAPEKNQPLLVKFIEDHKASSYATFAQLEQARQAVDKADFATAKIILTDALTSTTDVTLQAVIRFRLAMVDFQLKEYDTALATLAQLKEPAWEQRKHLLRGDIFAIKGDSEQAKQAYKQALALADEQDKLLIEVRLNNL

SEQ ID NO: 9185 - DNA, 639 bp, Bordetella bronchiseptica RB50
  CDS (1)..(639): transl_table=11
atggcatacgatctcgaagaacaggaaaaactcgacgcaatccgggcctggtgggcgcgttacggcacgctgatcctgacgctggccacgctggtggtgctggcatggggcggctggtcgggctggaaggcctaccagaactaccgcgccaaccaggccatgggctatttcgaggcgctcgaggacgccgcccgcctgggcggcgccgatgccgccacgcgcatcaaggccgcggccgccacgctgcgcaccgactatccggccaccggctacgccggccgcggcgcgttgatcgcggcccaggcgctgcagagccagcaggacgtcgacggcgcgcgcgagcagctcgaatggctggccgcgcaggccaagcagccggccctgcagccggtggcccgcttgcgcctggccggcatcctgctggaccagaagcaatacgacgctgcgcttgcgcagctgaacaacccgccggcttccttcgcggccttgttcgccgaccggcgcggcgacgtgctggccgcgcaaggcaagcgcgatgaagcgcgcgcggcgtggcagagcgcgatcgacgggctgggaaccagcaacccgttgacgcaggtcgtgcaactgaaactcgatgccttgagcggagcctga

SEQ ID NO: 9186 - protein, 212 aa, Bordetella bronchiseptica RB50
MAYDLEEQEKLDAIRAWWARYGTLILTLATLVVLAWGGWSGWKAYQNYRANQAMGYFEALEDAARLGGADAATRIKAAAATLRTDYPATGYAGRGALIAAQALQSQQDVDGAREQLEWLAAQAKQPALQPVARLRLAGILLDQKQYDAALAQLNNPPASFAALFADRRGDVLAAQGKRDEARAAWQSAIDGLGTSNPLTQVVQLKLDALSGA

SEQ ID NO: 9187 - DNA, 630 bp, Chromobacterium violaceum ATCC 12472
  CDS (1)..(630): transl_table=11
atggcgttcgacttgcaggaacaggaacagatcgattctctgaaggcattctggcagcagtggggcaagctgatcggcggcgccgtgctggccgtcagcctgggctacctgggctacaaggcctacggcatgtaccagcgcggccagtccgagaaggccgccgccgcctatgaggccgtcgacgacgcggtggccgccaaggacatcgccaagctgaaatccgctgcccagcagctgcagggcgaatacgccggcaccctctacgccagccgcgccgcgctggtgctggccaaggccgccttcgacaagaatgatccggcgctggccgcgagccagctggaatgggtgttgaagaacggcaaggacgaggagctgcaggcgatcgcccgcttgcgcctggcctcgttgctgctggaccagaagaagttcgacggcgcgatcggcgaactgaatcaggcccacccggccgcgttcgacgccgagtttctggagctgaagggcgatgtgttcgtcgccaagggcgacagcaacggcgcgcgcgacgcctacaaggccgcgctggccaagatgcagggcgaaagcccgaatcgccagctggtgcaaaccaagctcgacgcgctgggaggctga

SEQ ID NO: 9188 - protein, 209 aa, Chromobacterium violaceum ATCC 12472
MAFDLQEQEQIDSLKAFWQQWGKLIGGAVLAVSLGYLGYKAYGMYQRGQSEKAAAAYEAVDDAVAAKDIAKLKSAAQQLQGEYAGTLYASRAALVLAKAAFDKNDPALAASQLEWVLKNGKDEELQAIARLRLASLLLDQKKFDGAIGELNQAHPAAFDAEFLELKGDVFVAKGDSNGARDAYKAALAKMQGESPNRQLVQTKLDALGG

SEQ ID NO: 9189 - DNA, 621 bp, Photorhabdus luminescens subsp. laumondii TTO1
  CDS (1)..(621): transl_table=11
gtggaagtctataccaatgaaaacgaacaagtagacgtgattcgtcgcttttttgccaataatggtaaagccttggttttagggctggtgttgggggccggggcgctgattggctggcgttactggcaatctcatcagacaaatcagttgcaggaaagtgcagaagcttttgaacgagtagatcgaggattaattaccagtacaaaagagagtcatactgctgccgaaaaatttgccagtgaaaccaataacagttatggcgtgatggcgcatatgcatttggctcaacttgctgttgaaaagaatgaattaactaaagcagatcagtttttatctgcggctaccggccaggtaaaaaatgaggatttgcaggctctggtgaatattcgcctagccagggttcaattggcggaagataaagcggatgctgcgctgaaaacattggaacaggtcaaaggttccggttgggttggcgttgcagaggatattcgcggtgatgcactggtgaaaaaaggtgatattgctggtgcccgcgcagcgtataccaaaggtttgagctcaaattcaccacaggcgatcaaatcgatgttaaatcttaaattgaataacttatccagctaa

SEQ ID NO: 9190 - protein, 206 aa, Photorhabdus luminescens subsp. laumondii TTO1
MEVYTNENEQVDVIRRFFANNGKALVLGLVLGAGALIGWRYWQSHQTNQLQESAEAFERVDRGLITSTKESHTAAEKFASETNNSYGVMAHMHLAQLAVEKNELTKADQFLSAATGQVKNEDLQALVNIRLARVQLAEDKADAALKTLEQVKGSGWVGVAEDIRGDALVKKGDIAGARAAYTKGLSSNSPQAIKSMLNLKLNNLSS

SEQ ID NO: 9191 - DNA, 615 bp, Vibrio vulnificus YJ016
  CDS (1)..(615): transl_table=11
gtggaagtttacaatactgaagaagaacaagttgaagcgataaaagattggtggaaagagaacggcaaagccgtgatcatcggtgccgttgttggtctcggtggtctatttggctggcgttactaccaagatagcgttacgcaagcgcgtgaagctgcttcacaaaattatacttccgcaattaatgcattacaggcgaaaggcgctgaagcggctgcggatgttgaagctttcattgcctctaatgatgtcaaagagtattcggtactagcagcgttacaactggctaaggcacaagtaaccgctggtgatcttaatgctgcactgacccagctaaaatgggctcagagcaacagcaaagatgcggcgcttattccgttaacgacttaccgtattgcgcgagtagaagcagagttaggcaattttgatgcagcaaaagctgagttagcaaaagtgacagacgctagctggacgggtcgtgtagcagaattgcgtggtgatattgctttgcgtcagggtgacaaagaagccgcttatgctgcttactctgaagcgcaacaagccgctgatgcaggtcaaactctgcaaatgaaattggatgatctggcaaaataa

SEQ ID NO: 9192 - protein, 204 aa, Vibrio vulnificus YJ016
MEVYNTEEEQVEAIKDWWKENGKAVIIGAVVGLGGLFGWRYYQDSVTQAREAASQNYTSAINALQAKGAEAAADVEAFIASNDVKEYSVLAALQLAKAQVTAGDLNAALTQLKWAQSNSKDAALIPLTTYRIARVEAELGNFDAAKAELAKVTDASWTGRVAELRGDIALRQGDKEAAYAAYSEAQQAADAGQTLQMKLDDLAK

SEQ ID NO: 9193 - DNA, 621 bp, Erwinia carotovora subsp. atroseptica SCRI1043
  CDS (1)..(621): transl_table=11
gtggaagtctataccacagagaatgaacaggttgatgtactacgtcgtttcctcgcggagaacggaaaggcgttagttgtcggtgttgtgttgggcgttggcgcattggttggctggcgtttctggcaaagccatcaaaatgatagcgtgcaggcggcatctgcgtcttatcagcaggtgacggagcaattggccgaaggtaaagctgaagcgattgcttcaacagagaaatttacggccgagaataagaatacctatggtgcgctggcttctctggaactggctcgtcattacgttgatcagaaagattttgctaaagcagtacaacagctggtgcaagcgcagtcacaaactaaagacgctgacctgctagccgtcgtgaatctgcgtttggcgcgggttcagctacaggaaaataaagcggatgacgcgctgaaaacgttggatgccatcaaactggaaggttgggcgtcacaggctgctgaagttcgtggtgatatcctggctagcaaaggggataatcaggctgcgcgtgatgcctacaacaaagggttgtcttccaacccatcgcaggcacagcaagcgttactgcgtatgaaactgaataacctgtccagctaa

SEQ ID NO: 9194 - protein, 206 aa, Erwinia carotovora subsp. atroseptica SCRI1043
MEVYTTENEQVDVLRRFLAENGKALVVGVVLGVGALVGWRFWQSHQNDSVQAASASYQQVTEQLAEGKAEAIASTEKFTAENKNTYGALASLELARHYVDQKDFAKAVQQLVQAQSQTKDADLLAVVNLRLARVQLQENKADDALKTLDAIKLEGWASQAAEVRGDILASKGDNQAARDAYNKGLSSNPSQAQQALLRMKLNNLSS

SEQ ID NO: 9195 - DNA, 636 bp, Yersinia pseudotuberculosis IP 32953
  CDS (1)..(636): transl_table=11
gtggaagtctataccactgaaaatgaccaggttgatgcagtgcgccgtttctttagtgaaaatggtaaagcactggccgtgggtgtggtgctcgggattggtgcattagtgggttggcgttattggcagggtaatcagaatactgccatgacggaagcctcctctgcctatcagaaagtcagtactgctctgtcaactaacagtgcgggtaatgttagtgctgatagcattgctctcgctgaaaagtttgttcagagcaataaaaataactacggcgtactcgtcgggttagaactggctcatgattttgttgaacaaaatgcattcgataaagcggcacagcaactcagtcaagccttgggccagacgaaagatgaaaatctgttgtcgctgattaatctgcgccttgcgcgtgtgcaactgcaactgaaaaaacccgatgaagcattgaaaacgctggatgcagtacaaggtgatggctggacagcgatggctcaagatgttcgtggcgatgcattattaagcaaaggtgataccgcaggtgcgcgcgctgcttatagtaaagctatcgaatctaatgcttctcaggcgctgcaagcattgttgcgtatgaaactgaataacttgtccagctaa

SEQ ID NO: 9196 - protein, 211 aa, Yersinia pseudotuberculosis IP 32953
MEVYTTENDQVDAVRRFFSENGKALAVGVVLGIGALVGWRYWQGNQNTAMTEASSAYQKVSTALSTNSAGNVSADSIALAEKFVQSNKNNYGVLVGLELAHDFVEQNAFDKAAQQLSQALGQTKDENLLSLINLRLARVQLQLKKPDEALKTLDAVQGDGWTAMAQDVRGDALLSKGDTAGARAAYSKAIESNASQALQALLRMKLNNLSS

SEQ ID NO: 9197 - DNA, 615 bp, Mannheimia succiniciproducens MBEL55E
  CDS (1)..(615): transl_table=11
atggcttataccagtttagaagaacaagaaattaatgaaattaaaaatttctggaaagaaaacggcaaaactattattgtttcggtaattatcgcaatcgcaggcgtatttggctggcgttattggcaaagctatcaattaagccaacatcaccaattatcggatcagtatcagcaggttatttatgaattccgtcaagatcctgcggctcaaaaagataatctggctgaatttattgcacaaaacggcaaaagcggttatgcggctttagctttatttgagcaggcgaaaactgcggtcgaaaaacaggatttttcgcaggcggaaaccgcgttaaaacaagcgttaaacaatgcgcctgatgaaatttttgcttctattgcggcattacgcttggctaacgtgcaatttcaacaaaaagattttgacggcgcgctggtaagcttaaatcttgtgaaggataccagctgggatagccgtaaacaaattctaaacggcgatattttactggctaaaggtgataaagccggtgctaaagccgcttatcaacaagcacagaaaaatgcttccgcattggaacaacaatggctgcaagtgcggttaaataatttataa

SEQ ID NO: 9198 - protein, 204 aa, Mannheimia succiniciproducens MBEL55E
MAYTSLEEQEINEIKNFWKENGKTIIVSVIIAIAGVFGWRYWQSYQLSQHHQLSDQYQQVIYEFRQDPAAQKDNLAEFIAQNGKSGYAALALFEQAKTAVEKQDFSQAETALKQALNNAPDEIFASIAALRLANVQFQQKDFDGALVSLNLVKDTSWDSRKQILNGDILLAKGDKAGAKAAYQQAQKNASALEQQWLQVRLNNL

SEQ ID NO: 9199 - DNA, 675 bp, Legionella pneumophila subsp. pneumophila str. Philadelphia 1
  CDS (1)..(675): transl_table=11
atgtctgtttacatgacggaagaagaacaattagagattataaaaaaatggtggaaacgatatggcaatatgataactatttttttatcaataatgctcctgattatcgcagggtaccgatatatgaattggcacaatgacaagataaaacaacaagcatctattgcctacgaaaatatgatgattgcattttccaatcaaaacataaagtctgttcgttcctatgccaatgaattaattaagaattataaccatactgtttatgctgatatagctcatatgacacttgcaaaaatctacgtaaataaaaataagcttgagcaagcaagaaatgagttaaaggctgttgcatcggaaagccaaatgacaccgctaagacaaattgccaaaatccgcattgcacgtttactggcggcagataaagcttataccaatgcattaaatgaattaagtgctgttgaggacgaagcctacttgccagtaattaacgaactgaaaggggatatttatagcgccaaaggccaatatcaggacgcaatgaatgcctaccggcttgcaatagacgaagtaagaacaaatggaatgggtaatttatttttagaaatgaaaacaaatgagttagcaattaagactcaatctatgattactgatgataaaaaggtaaaagcagcttaa

SEQ ID NO: 9200 - protein, 224 aa, Legionella pneumophila subsp. pneumophila str. Philadelphia 1
MSVYMTEEEQLEIIKKWWKRYGNMITIFLSIMLLIIAGYRYMNWHNDKIKQQASIAYENMMIAFSNQNIKSVRSYANELIKNYNHTVYADIAHMTLAKIYVNKNKLEQARNELKAVASESQMTPLRQIAKIRIARLLAADKAYTNALNELSAVEDEAYLPVINELKGDIYSAKGQYQDAMNAYRLAIDEVRTNGMGNLFLEMKTNELAIKTQSMITDDKKVKAA

SEQ ID NO: 9201 - DNA, 636 bp, Methylococcus capsulatus str. Bath
  CDS (1)..(636): transl_table=11
atggaagtttatctgaccgaagaagagcgcctcgaagcgctcaagcgctggtggaaagccaacgccaattccatcgtctggggcgtggcgctgggcatcgccgtgatcgtcggctggggcgcgtggaaacgttcccaggaggaaaaggctctgcttggcggaaccctgtaccagcagctcctcgatgccgtggcgaacaagcagaccgaggccgccgtccaactgggcgaacggatcagccagcagttcccgggctccgcttatgacacttacggcaagctgttcctggtacggctcaaagtggaggcgggcgatctggccggcgccaagactcagctgcaacagttgatcgcgaccaccaaggacgagaaaatcctgcagatcgcgcgactgcgactggccgaaatccagctcggcctcggcgaaaccgaggaggcgctgagactggcggaaagcctgacgggcagcaccccggaatccgctgcactccgtgaggagttgaaaggcgacgtttacctcgccatgaatcgccccgaagaagcccgcgccgcctatctgaaggcgcgtcgggacggccagccttcacccctgctggaactcaagctgaccgatctcggtacccccgccacccgatga

SEQ ID NO: 9202 - protein, 211 aa, Methylococcus capsulatus str. Bath
MEVYLTEEERLEALKRWWKANANSIVWGVALGIAVIVGWGAWKRSQEEKALLGGTLYQQLLDAVANKQTEAAVQLGERISQQFPGSAYDTYGKLFLVRLKVEAGDLAGAKTQLQQLIATTKDEKILQIARLRLAEIQLGLGETEEALRLAESLTGSTPESAALREELKGDVYLAMNRPEEARAAYLKARRDGQPSPLLELKLTDLGTPATR

SEQ ID NO: 9203 - DNA, 615 bp, Haemophilus influenzae 86-028NP
  CDS (1)..(615): transl_table=11
atggcttattccattgaagaagaacaagagattaaccagttaaaagactggtggaaagagaatggcaaaacaattattgtcgcttttatcttaggtgtgggtggtatgtttggatggcgttattggcaatcgcaccaagcagaacaaatcgctcaagcttctgcacaatacgatactttaattaattctgtgcaacaagacgaacaggctaaaaaagcaaatatagaacaatttgtgcaagcgaatagcaaaactgcatacgctgtatttgctttgttagatgaagcgaaaaaagccactcaaaaacaagatttttcagcagcagaagcaaatttaaaccaagcattaacccaatctcaagatgaagtattaacatctattgttgcattacgtctcagtgcagtacaatttcaattgggtcaattagacaatgctttaaccaccttaaaccaagtgaaaggcgaaagttttaatgctcgcaaagcgattttaacgggcgatatccaagttgcaaaaggagataaagttgcggcgaaaaacagctttgagcaagcacaacaaagtggtagccaattagaacaacaaatggcaaaaatgaaattaaacaacctttaa

SEQ ID NO: 9204 - protein, 204 aa, Haemophilus influenzae 86-028NP
MAYSIEEEQEINQLKDWWKENGKTIIVAFILGVGGMFGWRYWQSHQAEQIAQASAQYDTLINSVQQDEQAKKANIEQFVQANSKTAYAVFALLDEAKKATQKQDFSAAEANLNQALTQSQDEVLTSIVALRLSAVQFQLGQLDNALTTLNQVKGESFNARKAILTGDIQVAKGDKVAAKNSFEQAQQSGSQLEQQMAKMKLNNL

SEQ ID NO: 9205 - DNA, 672 bp, Colwellia psychrerythraea 34H
  CDS (1)..(672): transl_table=11
gtggaaatttatcaaactgaagaacaacaagtagaagcaattaaaagttactggcaacaaaatggttatactattatcgcgggtgtcaccctaggttttgctggatttatcggttttaacctttatcaggataataagtttgatgaagaaatagccgtatcagatagctaccaaacacttatcgaacaaagtggtaaagatgctaaggcttttaccgcgaatgctgaaaaatttatcagtgaaaatggtgacaatagctatgttgcgttaactgcattggcccttgccaaagaatcggcgagccataaagactggccacaagttcaaaaacagttaacgactgcaattgagtctgcgccaactgatggtattaaagcaattgcaagtttacgtttggctcgtgttcaagttcaacttgagcaatattcagaagcccttgccacattaaatagtaatttacctgaatcatttactgctgctattgaagaagtcaaaggtgatgcgtatttgcaacaaggtaaaaatgatcttgctcgtaatgcttatcaagccgctattgctgctgacggtattgctacaagcccaagtttacagattaaattagatgatttagcacaagttactactttgcctgtggctgaagtggtcgctgctgaacctgcagctaagtaa

SEQ ID NO: 9206 - protein, 223 aa, Colwellia psychrerythraea 34H
MEIYQTEEQQVEAIKSYWQQNGYTIIAGVTLGFAGFIGFNLYQDNKFDEEIAVSDSYQTLIEQSGKDAKAFTANAEKFISENGDNSYVALTALALAKESASHKDWPQVQKQLTTAIESAPTDGIKAIASLRLARVQVQLEQYSEALATLNSNLPESFTAAIEEVKGDAYLQQGKNDLARNAYQAAIAADGIATSPSLQIKLDDLAQVTTLPVAEVVAAEPAAK

SEQ ID NO: 9207 - DNA, 639 bp, Dechloromonas aromatica RCB
  CDS (1)..(639): transl_table=11
atggcgcattacgacctcgaagaacaggaacagatcgacactctgaaaacctggtggaagatgtacggcaacctcgtgacgaacgtcattgtcgcgctgtcgctggcagtgatcggatggcaaggctggaactggtatcagggcagccaggccaccaaggcctcagcgatctatggggtgcttgaacaggcagcggctgttggcgatgcccagaaggtcaaggcagccgcaggcgaactggccgaaaaatttggtggtaccaactacgctgccctgggggcgatgcttgccgccaagcaatcctttgaggcgggggatctgaagactgccaagactcagttgagctgggtcgcggaaaatggcaaggatgaagtcaaggatctggctcgccttcgcctggtcgcagtacaacttgatgataaggcctatgatgaggccatgaaacaactcgatgccgcgcacgcgccagtcttcgatgcgcgcttcctggagctgaagggtgacgtattgtcggcgcaggaaaaaaaggccgaagcccggactgcctacaaggctgcactggaaaagatgacgggcaagcaggggggcggtcgtgaactgctgcagcagaaacttgacggcttgggcgaggcggcctga

SEQ ID NO: 9208 - protein, 212 aa, Dechloromonas aromatica RCB
MAHYDLEEQEQIDTLKTWWKMYGNLVTNVIVALSLAVIGWQGWNWYQGSQATKASAIYGVLEQAAAVGDAQKVKAAAGELAEKFGGTNYAALGAMLAAKQSFEAGDLKTAKTQLSWVAENGKDEVKDLARLRLVAVQLDDKAYDEAMKQLDAAHAPVFDARFLELKGDVLSAQEKKAEARTAYKAALEKMTGKQGGGRELLQQKLDGLGEAA

SEQ ID NO: 9209 - DNA, 630 bp, Burkholderia thailandensis E264
  CDS (1)..(630): transl_table=11
atgagttatcacgacgaacaagaatcgattgaaaacctgaaggcgtggtgggcccggtggggcaatctgacgacctggatcgcgatcgccgtcctcgccgccgcggcagcctggaacggctggaactactggcagcggcgtcaggcgacgcaggcggccgtgctctacgagcaggtgcagttggccgtccagtcgaacgacaaggtgaaggtctcgcgcatcgcgtccgacatggaagacaagttcggcagcaccgcctatgcgcagatgacggcgctcgaggcggcgaaggcgctctatggcgcgggcgacgcggcaggcgcgaaggcgcagttgcagtggactgtcgatcacgcgaaggacgacgagtacaagcagatcgcgaagcttcgccttgcgtcgctgctgctcgacgagaaggcgtacgatgcgggtcttgcgctgttgtcgggcacgccgcccgaagcgttcaagggcgccgtcgccgatcgccgcggcgatctgctcgccgcgcagggcaagaatgacgaggcgaaagcagcgtacacgctcgcgctcgacgcgctgccgaaggacgatgcatccgcgcgccaactcgtgcagttcaagctggacgcgctcggcggctga

SEQ ID NO: 9210 - protein, 209 aa, Burkholderia thailandensis E264
MSYHDEQESIENLKAWWARWGNLTTWIAIAVLAAAAAWNGWNYWQRRQATQAAVLYEQVQLAVQSNDKVKVSRIASDMEDKFGSTAYAQMTALEAAKALYGAGDAAGAKAQLQWTVDHAKDDEYKQIAKLRLASLLLDEKAYDAGLALLSGTPPEAFKGAVADRRGDLLAAQGKNDEAKAAYTLALDALPKDDASARQLVQFKLDALGG

SEQ ID NO: 9211 - DNA, 627 bp, Methylobacillus flagellatus KT
  CDS (1)..(627): transl_table=11
atggcatacgatttggaagaacaagaccagttggacgcattccggagctggtggaagcgcaacggtaatctcgttattggcgtggcagcactggcgctggttggctttggtggttacgaaggctggcaatattaccagtatcagcaatccgctgctgcgtcagtgcagtatcagaacatggccagtaccgatatcaaggatgccgacaagatacggacattgtctgccgagctgatggacaaatactcttccacaccatacgcagggcgtgctgcggtggcggtggctaaacttaattaccaggagcaggacctggaaagcgccaaagctcaattgacatgggcagccaagaatgccaaggaagacgctgtacgggcaattgcattgctgcagctggctgccatccaatatgaggaaaaagcttacgacgaagcattgaaaaccttgtcagaaaaacatgatgccggatatgccgggctgtttgccgacctgaagggcgatgtgctcgttgcgcaaggcaagaccgaagatgccaaggccgcttacaaggatgcacttgccaagctggatatgcagggtgattactacaaatataccgagtacaagctggaagcacttggtagctga

SEQ ID NO: 9212 - protein, 208 aa, Methylobacillus flagellatus KT
MAYDLEEQDQLDAFRSWWKRNGNLVIGVAALALVGFGGYEGWQYYQYQQSAAASVQYQNMASTDIKDADKIRTLSAELMDKYSSTPYAGRAAVAVAKLNYQEQDLESAKAQLTWAAKNAKEDAVRAIALLQLAAIQYEEKAYDEALKTLSEKHDAGYAGLFADLKGDVLVAQGKTEDAKAAYKDALAKLDMQGDYYKYTEYKLEALGS

SEQ ID NO: 9213 - DNA, 630 bp, Alkalilimnicola ehrlichei MLHE-1
  CDS (1)..(630): transl_table=11
atggcatcgcatcccagtgatgaggaacagttagaggccatcaagcgctggtggcaggagaacgggcgctcgatcatcatcgggctgatcctcggcgccggtgccgtgggcggctggtggacctggggcgcctggcaggagcgcaccgccgtggaggccgccaacgcctatgcggacttcatggccccgctcaaccagggcgaatacgaaacggctattcgccacggggagcgggtgctggacaatcaccgccgcagcctctatgccaccatgaccgccctgcagatgggcgccctgcacatggagcagggggagccggaccgcgccgcggagcgcttgcgctgggcggtggagcatgccgacagtgcggccctgcgtgatctggcgcggctgcgactggcccgggccctggccgcggacgggcggcagcaggaggccttggagcaactggacgatggcggcgcctacgcgggacagatggccgaactgcgggccgacctcctgctggagctgggtcgcgaggaggaggcccgttcggcctaccgcgccgcgcttaaccagaacgacatcacccccacccagcgggaacttattcagattaagctggacgatttgggcggtggcgcttaa

SEQ ID NO: 9214 - protein, 209 aa, Alkalilimnicola ehrlichei MLHE-1
MASHPSDEEQLEAIKRWWQENGRSIIIGLILGAGAVGGWWTWGAWQERTAVEAANAYADFMAPLNQGEYETAIRHGERVLDNHRRSLYATMTALQMGALHMEQGEPDRAAERLRWAVEHADSAALRDLARLRLARALAADGRQQEALEQLDDGGAYAGQMAELRADLLLELGREEEARSAYRAALNQNDITPTQRELIQIKLDDLGGGA

SEQ ID NO: 9215 - DNA, 621 bp, Shewanella sp. ANA-3
  CDS (1)..(621): transl_table=11
gtggaaatttatagcacagaagaacaacaagttgatgctatcaagcagttctggaaagactatggaacctcgattgttatcggggcggtcgttggtttaggcggcctgtacggttggaactattactccgacatgaaaatcgtgaaggccgaagaagcatcacaggctttccaaaccttaaccaccaaatcaagtgacgaagcggccatgctggctggcgttgctgagttttccaaaaatcacgaccaaaagggctatcaagccctgctggatctgatcgttgcgaaaaccgcagttgaagcgaaagattttgctaaggccgaagaagcgctgaagaaggtgattgccgctaagccaggtgctggattagacacagtggcaacactgcgtttagcacgcattcaagcagagcaaggccaaatcggcactgcgctggcgaccttagatcaagtgacggataaagcattcttagcacaacgtgaagaactcaaaggcgatttctttgtacgccaaggtgaagcggataaagcgaaaaccgcttaccaagcggcaatggacaatggcggtgttgtgaccagccctgcacttaaaatcaaacttgataacctaaatcaagcataa

SEQ ID NO: 9216 - protein, 206 aa, Shewanella sp. ANA-3
MEIYSTEEQQVDAIKQFWKDYGTSIVIGAVVGLGGLYGWNYYSDMKIVKAEEASQAFQTLTTKSSDEAAMLAGVAEFSKNHDQKGYQALLDLIVAKTAVEAKDFAKAEEALKKVIAAKPGAGLDTVATLRLARIQAEQGQIGTALATLDQVTDKAFLAQREELKGDFFVRQGEADKAKTAYQAAMDNGGVVTSPALKIKLDNLNQA

SEQ ID NO: 9217 - DNA, 645 bp, Azoarcus sp. BH72
  CDS (1)..(645): transl_table=11
atggcggtgtatgacctcgaagagcaggaacagatctccgagctgaaggcgtggtgggcgcggtatggcaagctggtgaccgccctggcggtggccgccgcggtggcatcggtggcgtggcaaggctggcgctggtaccagaaccgtcaggcggccgaggccggcggcctttacttcgccgtccagcaggcggtgacccagcaggacgcccaaaaggcgcgcgaactgaccggccggctgatcgaccagttcggtggaacggtgtacgcgcaactgggtgcgctggtgtccgccgggctgcagttctccaagggtgatctcgacaacgcgcgcgcgccgctggagtgggcggcggggcagggcaaggacgagagcctgcgcgatctcgcccgcctgcggcttgccgccgtgctgctgcagcagggcgcgcatgaccaggcgttggcgcaactgcagcgcgaacccggcaaggcatatcgtgcccggttcgccgacctgcgcggcgatgcgctcgcggcccagggcaaggcggcggatgcgcgtacggcctatcaggcggctatcaccgcgctggaagcagagggcgacgaggcggcaatgctgcgcgaggtcgtccgtgtcaaactcgaatcgctggaagcttga

SEQ ID NO: 9218 - protein, 214 aa, Azoarcus sp. BH72
MAVYDLEEQEQISELKAWWARYGKLVTALAVAAAVASVAWQGWRWYQNRQAAEAGGLYFAVQQAVTQQDAQKARELTGRLIDQFGGTVYAQLGALVSAGLQFSKGDLDNARAPLEWAAGQGKDESLRDLARLRLAAVLLQQGAHDQALAQLQREPGKAYRARFADLRGDALAAQGKAADARTAYQAAITALEAEGDEAAMLREVVRVKLESLEA

SEQ ID NO: 9219 - DNA, 615 bp, Haemophilus influenzae R2846
  CDS (1)..(615): transl_table=11
atggcttattccattgaagaagaacaagagattaaccagttaaaagactggtggaaagagaatggcaaaacaattattgtcgcttttatcttaggtgtaggtggtatgtttggatggcgttattggcaagctcaccaagcagaacaaattgctcaagcctctgcacaatacgatactttaattaattctgtgcaacaagacgaacaggctaaaaaagcaaatatagaacaatttgtgcaagcgaatagcaaaactgcatacgctgtatttgctttgttagatgaagcgaaaaaagccactgaaaaacaagatttttcagcagcagaagtaaatttaaaccaagcattaacccaatctcaagatgaagtattaacatctattgttgcattacgtctcagtgcagtacaatttcaattgggtcaattagacaatgctttaaccaccttaaaccaagtgaaaggcgaaagttttaatgctcgcaaagcgattttaactggcgatatccaagtcgctaaaggagataaagttgcggcgaaaaacagctttgagcaagcacaacaaagtggtagccaattagaacaacaaatggcaaaaatgaaattaaacgatctttaa

SEQ ID NO: 9220 - protein, 204 aa, Haemophilus influenzae R2846
MAYSIEEEQEINQLKDWWKENGKTIIVAFILGVGGMFGWRYWQAHQAEQIAQASAQYDTLINSVQQDEQAKKANIEQFVQANSKTAYAVFALLDEAKKATEKQDFSAAEVNLNQALTQSQDEVLTSIVALRLSAVQFQLGQLDNALTTLNQVKGESFNARKAILTGDIQVAKGDKVAAKNSFEQAQQSGSQLEQQMAKMKLNDL

SEQ ID NO: 9221 - DNA, 636 bp, Pseudoalteromonas tunicata D2
  CDS (1)..(636): transl_table=11
atggaaatttattcaacagaagaacaacaagcagaagcaataaagcgatttttccgtgaaaacggcactgcattagtgattggtgtggtattgggtctaggtggcttatatggttggaaagcctataaccaaaaccaagttgaatcggctgaagcggcttctgatgcgtatgaaaagctagttaaagctgatgcgcaaaataaaaccaatgcacttgctggcgcagatgaattcattaaaaataataaagattcaagctatgcggtactagcagcgtttgttgctgctaaagaagcggttgaaaaagcagactttaatttagcgaaagaaaaattaacgtggatcacacaaaataataaaaatcctgagttaaacgcgattgcaaattctcgtattgcccgtattgagcttgagcttaaaaattacgatgcggcattaaaagttttatcagtaaccatgcctgaagcgttcaaagcaagtgttgccgaattaaaaggtgatgtatatcgagctcaaggcgatttaggccaagctcgtagcgcatatcaagccgctgcagatgctggtggtttgacaaataacgcaacattacaaatgaaattagatgatttagctgtcgacacgccagcattataa

SEQ ID NO: 9222 - protein, 211 aa, Pseudoalteromonas tunicata D2
MEIYSTEEQQAEAIKRFFRENGTALVIGVVLGLGGLYGWKAYNQNQVESAEAASDAYEKLVKADAQNKTNALAGADEFIKNNKDSSYAVLAAFVAAKEAVEKADFNLAKEKLTWITQNNKNPELNAIANSRIARIELELKNYDAALKVLSVTMPEAFKASVAELKGDVYRAQGDLGQARSAYQAAADAGGLTNNATLQMKLDDLAVDTPAL

SEQ ID NO: 9223 - DNA, 612 bp, Photobacterium sp. SKA34
  CDS (1)..(612): transl_table=11
gtgaacgactacgccacagaagaacagcaggttgaagcgattaaatcgtggtggcaagaaaacggcaaagccgttgttctaggtgccgtgattggtttaggtggtctttggggctggcgttactaccagtctgaagtacatgttgcaaaacacattgcatctgataactatacacaggttgtttctgcgcttgatgaaaacagcaaagacgcagtcgctgaagcaaaaacgtttattgatgcgaataaagatagtcaatatgcggtactgacagcactacaactagcgaaagttcaggttgataataaagatctggatggtgcggttgagcaacttcaatgggtgattaatcacaccaaagatgaagccattttgccattagcaacaacacgtttagctcgtatttatgctgagcaacaaaaatttgatgaagcattggctgagcttaaaaaggtaacagtaccaagttggaagtcaaaagtcgctgaactgcgtggtgatatcctgctacaaaaaggtgatatcaatggtgcacgtgaagcatatgtagaagctcagcaagaaggttcatcacctgcgctgcaaatgaagcttgatgatttagcgcaataa

SEQ ID NO: 9224 - protein, 203 aa, Photobacterium sp. SKA34
MNDYATEEQQVEAIKSWWQENGKAVVLGAVIGLGGLWGWRYYQSEVHVAKHIASDNYTQVVSALDENSKDAVAEAKTFIDANKDSQYAVLTALQLAKVQVDNKDLDGAVEQLQWVINHTKDEAILPLATTRLARIYAEQQKFDEALAELKKVTVPSWKSKVAELRGDILLQKGDINGAREAYVEAQQEGSSPALQMKLDDLAQ

SEQ ID NO: 9225 - DNA, 657 bp, Oceanospirillum sp. MED92
  CDS (1)..(657): transl_table=11
gtggcagagttacgcaccgaagaagaacagattcaggcgcttaaatcctggtgggatgagaatggtaagtcgctattcctgggtgttgctgttgccctggccgcggtattaggctggaaaggttggcagagccagcaggcagcgcaggctgaaaatgcatcagttctttatcaaaacctgttagatgcagttgttggcgcgttggggccacagctggatgacgctaaactagctacggcaaatcatctgaacggtcaattaaaagatgaatatgaaggatctgcatacgctaattatgcggctatgatcatggctcgagtagccgttgatcagaaggatctggataaagctgtggctgagttggattatgtcctggcaaaccaacctaccgagtctatgtttattctggctactttgcgtaaagcacgtattgttgcttcgcaggggaacgttgaccaggctctaaaccttgtgaatggtgcgccggttggtggttataaagcgacaatcgaagagcttaaaggtgatctgtatttggcgcaaggtaataccgatgcggctcgtaaagcatatcagcaagcttcagaatcagctgcggcgggttcccgtcctttacttgatatgaagctgaataacctggctgctgaggaaagttaa

SEQ ID NO: 9226 - protein, 218 aa, Oceanospirillum sp. MED92
MAELRTEEEQIQALKSWWDENGKSLFLGVAVALAAVLGWKGWQSQQAAQAENASVLYQNLLDAVVGALGPQLDDAKLATANHLNGQLKDEYEGSAYANYAAMIMARVAVDQKDLDKAVAELDYVLANQPTESMFILATLRKARIVASQGNVDQALNLVNGAPVGGYKATIEELKGDLYLAQGNTDAARKAYQQASESAAAGSRPLLDMKLNNLAAEES

SEQ ID NO: 9227 - DNA, 627 bp, Rickettsiella grylli
  CDS (1)..(627): transl_table=11
atgaatgaattaattgaaatagaacaagccgaacacgtaaaaaaatggtttcgtgattatggtgggggcatcgtattagggattatttttgctattttcgtgagtttgggttggaattattggcatcaatcaagagaaaataatctatctatcgcctctatgcaatacgagcatttagtggttgcaataatctcaaacgaaaatataactaccttaaaaaaacgagctgaagagataatcaagaattatgcctatacaccttatgcttcattggctgctttacagttagctaaaatagcagtgaatcaaaataacttagttcttgccgccaatcgattaacgtgggtggtcgatcacggtcatgatcaaacgctacgatcgattgcaaaaatgcgtttagtacgcattttattggctcaaaatcgtcccatagaggctctaaaaagagtatctcaaaatgaagataaagcctacgctccgatttttttggaggaaaaaggggacatttttaaatatttaggttataaccgaaaagcattgttgaattatttagcggctaaacaggcctttggaaatattaaacaacctttgttagaaatgaaaattaataatttagctgacgtttga

SEQ ID NO: 9228 - protein, 208 aa, Rickettsiella grylli
MNELIEIEQAEHVKKWFRDYGGGIVLGIIFAIFVSLGWNYWHQSRENNLSIASMQYEHLVVAIISNENITTLKKRAEEIIKNYAYTPYASLAALQLAKIAVNQNNLVLAANRLTWVVDHGHDQTLRSIAKMRLVRILLAQNRPIEALKRVSQNEDKAYAPIFLEEKGDIFKYLGYNRKALLNYLAAKQAFGNIKQPLLEMKINNLADV

SEQ ID NO: 9229 - DNA, 621 bp, Alteromonadales bacterium TW-7
  CDS (1)..(621): transl_table=11
atggatatacattcaacagaagaagaacaagcagaagcaattaaacgctttttccgtgaaaacggtctttcactggcacttggtgtaattgttggcttaggtggcttatatggttggaaagcttataaccaaaaccaaattacaaccgctgagcaagcgtcagattcttacactaaattagttgaaggtgatgatgttttatcatcagctgatgcttttatcagtgaaaataaagacacaaactatgctgcacttgcagcgtttgttgccgctaaagatgcggtagaagcacaaaaattagatgtcgctagtgaaaagctaagctggattgtatcaaacgttgataatgcagaattaaaagcaattgcgattacacgtttagcgcgtattcaaattgcacaaactaattttgacgatgctttaagcacactaaatgcaccattacctgaagcatttaatgcaaacgttgcagagcttaaaggcgatatttatgctcagcaaggtaataaagaacaagcacgtactgcttaccaagctgcagtagatgcaggtgggttaacaggtaacccacttttacaagttaagttagatgacctagcagtaactagcccagcggcataa

SEQ ID NO: 9230 - protein, 206 aa, Alteromonadales bacterium TW-7
MDIHSTEEEQAEAIKRFFRENGLSLALGVIVGLGGLYGWKAYNQNQITTAEQASDSYTKLVEGDDVLSSADAFISENKDTNYAALAAFVAAKDAVEAQKLDVASEKLSWIVSNVDNAELKAIAITRLARIQIAQTNFDDALSTLNAPLPEAFNANVAELKGDIYAQQGNKEQARTAYQAAVDAGGLTGNPLLQVKLDDLAVTSPAA

SEQ ID NO: 9231 - DNA, 729 bp, marine gamma proteobacterium HTCC2143
  CDS (1)..(729): transl_table=11
atgtcagatagctatcgtaccgaagaagaacaagtcgaagcgctaaaagcttggtggcgggaaaatggaaaatcgactttagtcgccattgcactggctgttatgggcgtatttggttggcaaggttggcaaaagcagcaacaggctgatcaaagtacagcttcagctatataccaaaatttattaacagcggcgaatggcgacaatggtcaggctacgctggctcaaattgcgaccgcaaatcatttggcagacacactaaaagcagattacaccggaacaacatacgcccattttgctgcactttataaagcaaaatttgcagtggatgacaatgatctaaatgctgcagcagcagaacttcagtgggtgttagataatggtgcgatagacgaagtgcgtatacaggctcgcttacggttagcgaaagttttattggctgagggtcaaatggacgaagctatgaaactgaccgtaggcgaaaataagggttatagcgccgcatttagtgaagttaagggagatatccttgcggctcaaggtgacagcgttggtgccctttctgtctaccagcaagcccgagatattgcggctacgggagaaggtggacaaagtctgctaataaacctaaaaattcaacaactcgaaaatgcccagcaaagtgatgaaaatcagactgggaatgatgagtcggcagcgaatgactccgccaaaaaaggggatgtttaa

SEQ ID NO: 9232 - protein, 242 aa, marine gamma proteobacterium HTCC2143
MSDSYRTEEEQVEALKAWWRENGKSTLVAIALAVMGVFGWQGWQKQQQADQSTASAIYQNLLTAANGDNGQATLAQIATANHLADTLKADYTGTTYAHFAALYKAKFAVDDNDLNAAAAELQWVLDNGAIDEVRIQARLRLAKVLLAEGQMDEAMKLTVGENKGYSAAFSEVKGDILAAQGDSVGALSVYQQARDIAATGEGGQSLLINLKIQQLENAQQSDENQTGNDESAANDSAKKGDV

SEQ ID NO: 9233 - DNA, 642 bp, Pseudomonas putida GB-1
  CDS (1)..(642): transl_table=11
gtgtcgagtaccgatgatgatgacctggcaggggtcaaggactggtggaaccgcaacggcaagccgctgctgaccggcgcattgctggctggcgtggtggtgctgggctggaatacctggcacaagtaccagaacaaccagtcgcaaggtgcctcgcagctgtatcaggctttgcttgaaaccagcctgacgccgactggccagccagacgccaccaaggtcgcggagctgtccggcaagctcaagagcgagttcggcggcaccgcctacgcccagtacggcagcctgttcgtggccaaggtagcggtcgagaccggcaagctcgacgacgctgccgccgagctgaaaagcgtgctggacaagccggccgacgtgaccctgggcgagatttcgcgccagcgtctggctcgcgtactggccgcccagaacaaggccgaggacgccctgaagctgcttgacggcgacgccgacaaagccttcctggccagccgtgaagagttgaagggtgacctgctggtacagctgggtcgcgccgacgacgcgcacagcgcttacgaaaaagccaaggctgcgctgtccgatgacgcggcggtcggtggcctgcaattgaagctggatgacctggctaaaggggacgcgtaa

SEQ ID NO: 9234 - protein, 213 aa, Pseudomonas putida GB-1
MSSTDDDDLAGVKDWWNRNGKPLLTGALLAGVVVLGWNTWHKYQNNQSQGASQLYQALLETSLTPTGQPDATKVAELSGKLKSEFGGTAYAQYGSLFVAKVAVETGKLDDAAAELKSVLDKPADVTLGEISRQRLARVLAAQNKAEDALKLLDGDADKAFLASREELKGDLLVQLGRADDAHSAYEKAKAALSDDAAVGGLQLKLDDLAKGDA

SEQ ID NO: 9235 - DNA, 648 bp, Herbaspirillum seropedicae
  CDS (1)..(648): transl_table=11
atggcatacgatctcgaagaacaagaacagctcgactccatcaaggcctggtgggcagaaatacggcaacctggtcacctgggtgctgatcatcgcgctggctggctatgctggctggaccaggttggaatacctacccagggccgccagtcggcgcaagcctcggtgttgtatgaagagcaccagaagtcgctggcggccaaggacaacgccaaggtgcagcgcgccgccgcggatatccaggacaagttcagcggcaccgcctacgcccagatgagcgccctggtggcggccaagtcggccttcgacgccaatgacgccgacactgccaagaagcagctgcaatgggtgatcgaccacggccgtggcaaggaatacaaggccatcgcggcggttcgtctggccggtgtcctgctggacgccaaggcctatgacgaggcgctcaaggtgctgggcggcgactacccggcgcagttcgccggcgccatcgctgaccgcaagggcgacgtgctgctggcccagggcaagcgcgatgaagcgcgcagcgcctacaagctggcgctggaaaagagcgatgccaaggacccgggccgtcagctcatccagatcaagctcgacgccatcggcggcgaagcgcccaaggcctga

SEQ ID NO: 9236 - protein, 215 aa, Herbaspirillum seropedicae
MAYDLEEQEQLDSIKAWWAEIRQPGHLGADHRAGWLCWLDQVGIPTQGRQSAQASVLYEEHQKSLAAKDNAKVQRAAADIQDKFSGTAYAQMSALVAAKSAFDANDADTAKKQLQWVIDHGRGKEYKAIAAVRLAGVLLDAKAYDEALKVLGGDYPAQFAGAIADRKGDVLLAQGKRDEARSAYKLALEKSDAKDPGRQLIQIKLDAIGGEAPKA

SEQ ID NO: 9237 - DNA, 660 bp, Haemophilus influenzae
  CDS (46)..(660): transl_table=11
taatcgactatcttcaaactcaattttaatttaaaaggggaaaacatggcttattccattgaagaagaacaagagattaaccagttaaaagactggtggaaagagaatggcaaaacaattattgtcgcttttatcttaggtgtgggtggtatgtttggatggcgttattggcaaactcaccaagcagaacaaatcgctcaagcttctgcacaatacgatactttaattaattctgtgcaacaagacgaacaggctaaaaaagcaaatatagaacaatttgtgcaagcgaatagcaaaactgcatacgctgtatttgctttgttagatgaagcgaaaaaagccactgaaaaacaagatttttcagcagcagaagcaaatttaaaccaagcattaacccaatctcaagatgaagtattaacatctattgttgcattacgtctaagtgcggtgcaattccaattaggccaattagataatgctttaagcacattaaaccaagtgaaaggcgaaagttttaatgctcgcaaagcgattttaacgggcgatatccaagttgcaaaaggagataaagttgcggcgaaaaacagctttgagcaagcacaacaaagtggtagccaattagaacaacaaatggcaaaaatgaaattaaacaatctttaa

SEQ ID NO: 9238 - protein, 204 aa, Haemophilus influenzae
MAYSIEEEQEINQLKDWWKENGKTIIVAFILGVGGMFGWRYWQTHQAEQIAQASAQYDTLINSVQQDEQAKKANIEQFVQANSKTAYAVFALLDEAKKATEKQDFSAAEANLNQALTQSQDEVLTSIVALRLSAVQFQLGQLDNALSTLNQVKGESFNARKAILTGDIQVAKGDKVAAKNSFEQAQQSGSQLEQQMAKMKLNNL

SEQ ID NO: 9239 - DNA, 26 bp, Artificial sequence
  primer
atggaaatttacgagaacgaaaacga

SEQ ID NO: 9240 - DNA, 28 bp, Artificial sequence
  primer
ttagatggacaaattattaattttcatc

SEQ ID NO: 9241 - protein, 217 aa, Artificial sequence
  consensus sequence
  Variant (2)..(8): Xaa in position 2 to 8 is any amino acid
  Variant (10)..(15): Xaa in position 10 to 15 is any amino acid
  Variant (17)..(30): Xaa in position 17 to 30 is any amino acid
  Variant (31)..(31): Xaa in position 31 is any or no amino acid
  Variant (34)..(46): Xaa in position 34 to 46 is any amino acid
  Variant (47)..(48): Xaa in position 47 to 48 is any or no amino acid
  Variant (50)..(52): Xaa in position 50 to 52 is any amino acid
  Variant (54)..(77): Xaa in position 54 to 77 is any amino acid
  Variant (78)..(91): Xaa in position 78 to 91 is any or no amino acid
  Variant (93)..(100): Xaa in position 93 to 100 is any amino acid
  Variant (102)..(112): Xaa in position 102 to 112 is any amino acid
  Variant (114)..(116): Xaa in position 114 to 116 is any amino acid
  Variant (118)..(134): Xaa in position 118 to 134 is any amino acid
  Variant (135)..(135): Xaa in position 135 is any or no amino acid
  Variant (139)..(149): Xaa in position 139 to 149 is any amino acid
  Variant (152)..(153): Xaa in position 152 to 153 is any amino acid
  Variant (155)..(168): Xaa in position 155 to 168 is any amino acid
  Variant (169)..(172): Xaa in position 169 to 172 is any or no amino acid
  Variant (175)..(179): Xaa in position 175 to 179 is any amino acid
  Variant (181)..(184): Xaa in position 181 to 184 is any amino acid
  Variant (186)..(187): Xaa in position 186 to 187 is any amino acid
  Variant (190)..(190): Xaa in position 190 is any amino acid
  Variant (191)..(191): Xaa in position 191 is any or no amino acid
  Variant (193)..(203): Xaa in position 193 to 203 is any amino acid
  Variant (204)..(212): Xaa in position 204 to 212 is any or no amino acid
  Variant (215)..(216): Xaa in position 215 to 216 is any amino acid
EXXXXXXXKXXXXXXGXXXXXXXXXXXXXXXGWXXXXXXXXXXXXXXXAXXXYXXXXXXXXXXXXXXXXXXXXXXXXXXXXXXXXXXXXXXYXXXXXXXXAXXXXXXXXXXXAXXXLXXXXXXXXXXXXXXXXXXRLAXXXXXXXXXXXALXXLXXXXXXXXXXXXXXXXXXGDXXXXXGXXXXAXXAYXXAXXXXXXXXXXXXXXXXXXXXKLXXL

SEQ ID NO: 9242 - protein, 84 aa, Artificial sequence
  protein pattern
  Variant (2)..(12): Xaa in position 2 to 12 is any amino acid
  Variant (13)..(13): Xaa in position 13 is any or no amino acid
  Variant (15)..(17): Xaa in position 15 to 17 is any amino acid
  Variant (19)..(20): Xaa in position 19 to 20 is any amino acid
  Variant (21)..(21): Xaa in position 21 is Ala, Gly, Ile or Val
  Variant (22)..(36): Xaa in position 22 to 36 is any amino acid
  Variant (38)..(38): Xaa in position 38 is any amino acid
  Variant (39)..(39): Xaa in position 39 is Ala, Ser or Val
  Variant (40)..(40): Xaa in position 40 is any amino acid
  Variant (41)..(41): Xaa in position 41 is Ile, Leu or Val
  Variant (42)..(43): Xaa in position 42 to 43 is any amino acid
  Variant (44)..(44): Xaa in position 44 is Ala, Asp, Glu, Gln or Ser
  Variant (45)..(50): Xaa in position 45 to 50 is any amino acid
  Variant (52)..(71): Xaa in position 52 to 71 is any amino acid
  Variant (72)..(72): Xaa in position 72 is Asp or Gly
  Variant (73)..(78): Xaa in position 73 to 78 is any amino acid
  Variant (79)..(79): Xaa in position 79 is Asp or Gly
  Variant (80)..(83): Xaa in position 80 to 83 is any amino acid
  Variant (84)..(84): Xaa in position 84 is Ala or Leu
AXXXXXXXXXXXXAXXXLXXXXXXXXXXXXXXXXXXRXXXXXXXXXXXXXAXXXXXXXXXXXXXXXXXXXXXXXXXXXXXXXXX

SEQ ID NO: 9243 - protein, 83 aa, Artificial sequence
  protein pattern
  Variant (2)..(4): Xaa in position 2 to 4 is any amino acid
  Variant (5)..(5): Xaa in position 5 is any or no amino acid
  Variant (7)..(9): Xaa in position 7 to 9 is any amino acid
  Variant (10)..(10): Xaa in position 10 is any or no amino acid
  Variant (12)..(15): Xaa in position 12 to 15 is any amino acid
  Variant (16)..(16): Xaa in position 16 is Asp, Glu, Gly, Asn, Gln, Ser or Thr
  Variant (17)..(22): Xaa in position 17 to 22 is any amino acid
  Variant (24)..(26): Xaa in position 24 to 26 is any amino acid
  Variant (28)..(47): Xaa in position 28 to 47 is any amino acid
  Variant (48)..(48): Xaa in position 48 is Ala, Ser or Val
  Variant (49)..(52): Xaa in position 49 to 52 is any amino acid
  Variant (53)..(53): Xaa in position 53 is Ala, Asp, Glu, Gln or Ser
  Variant (54)..(80): Xaa in position 54 to 80 is any amino acid
  Variant (81)..(81): Xaa in position 81 is Asp or Gly
  Variant (82)..(82): Xaa in position 82 is any amino acid
  Variant (83)..(83): Xaa in position 83 is Ala, Ile, Leu or Val
YXXXXAXXXXAXXXXXXXXXXXAXXXLXXXXXXXXXXXXXXXXXXXXXXXXXXXXXXXXXXXXXXXXXXXXXXXXXXXXXXXX

SEQ ID NO: 9244 - DNA, 246 bp, Escherichia coli
  CDS (1)..(246): transl_table=11
atgcgcattactatttacactcgtaacgattgcgttcagtgccacgccaccaaacgggcgatggaaaaccggggctttgattttgaaatgattaatgtcgatcgcgttcctgaagcggcagaagcgttgcgtgctcagggctttcgtcagttgccggtagtgattgctggcgatcttagctggtctggtttccgtccggacatgattaaccgtctgcatccagcgccacacgcggccagtgcataa

SEQ ID NO: 9245 - protein, 81 aa, Escherichia coli
MRITIYTRNDCVQCHATKRAMENRGFDFEMINVDRVPEAAEALRAQGFRQLPVVIAGDLSWSGFRPDMINRLHPAPHAASA

SEQ ID NO: 9246 - DNA, 258 bp, Corynebacterium glutamicum
  CDS (1)..(258): transl_table=11
atggtcaccgtgtacaccaccgggccagactgcattcgatgcaagatgaccaagggcgtcatgaccaagaagggcctcgaattcgtcgaggtggacattcggcagaacgccgcagctcgcgagtacgtcaccgaggagctgggttactccgaggccccggtgtgcgtcgtggaggacggtacgggcgaggaccattggtccggcttccgccccgataacatcagccggctggtcaccctgaccaggagtggagagtga

SEQ ID NO: 9247 - protein, 85 aa, Corynebacterium glutamicum
MVTVYTTGPDCIRCKMTKGVMTKKGLEFVEVDIRQNAAAREYVTEELGYSEAPVCVVEDGTGEDHWSGFRPDNISRLVTLTRSGE

SEQ ID NO: 9248 - DNA, 219 bp, Streptococcus pyogenes M1 GAS
  CDS (1)..(219): transl_table=11
atgattacagtatattccaaaaataattgcatgcagtgcaaaatgactaagaaatttttagaacaacacggagtcaacttccaggaaattaatatcgatgaacatcctgaaaaagtggattatgtgaaaagtcttggcttcacatctgctcctgttatcgaagcagataacctcgtattttctggcttccaacctgcaaagttaaaagaattgatttaa

SEQ ID NO: 9249 - protein, 72 aa, Streptococcus pyogenes M1 GAS
MITVYSKNNCMQCKMTKKFLEQHGVNFQEINIDEHPEKVDYVKSLGFTSAPVIEADNLVFSGFQPAKLKELI

SEQ ID NO: 9250 - DNA, 246 bp, Deinococcus radiodurans R1
  CDS (1)..(246): transl_table=11
atggtcaaaatgtacaccaccacctggtgccccgactgccacgcggccaagcgggcgctgacgcagaagggcatcgcttacgaggaaatcaacatcgagcaggacgaacaggccgccgagtacgtgatgagcgtgaacggcgggcgccgcagcgtgcccaccctggtcagcggcgacgtggcgcacagcctcagcgggttccggcctcagaagctcgacgcgtttctggcggaagcgggcctctaa

SEQ ID NO: 9251 - protein, 81 aa, Deinococcus radiodurans R1
MVKMYTTTWCPDCHAAKRALTQKGIAYEEINIEQDEQAAEYVMSVNGGRRSVPTLVSGDVAHSLSGFRPQKLDAFLAEAGL

SEQ ID NO: 9252 - DNA, 243 bp, Mycobacterium leprae TN
  CDS (1)..(243): transl_table=11
gtgatgaacatcaccgtgtacaccaagcccgcgtgtgtgcagtgtagtgccacttacaaggcgctggataaacaaggtatcccctaccagacggtcgacatcagcctcgattctgaggcgcgtgactacgtgatggcgttgggttacttgcaggcgccggttgtggtggccggaaacaaccactggtcgggtttccggcccgatcgcatcaaggcactcgccggggccgtgctgaccgcgtag

SEQ ID NO: 9253 - protein, 80 aa, Mycobacterium leprae TN
MMNITVYTKPACVQCSATYKALDKQGIPYQTVDISLDSEARDYVMALGYLQAPVVVAGNNHWSGFRPDRIKALAGAVLTA

SEQ ID NO: 9254 - DNA, 240 bp, Mycobacterium tuberculosis CDC1551
  CDS (1)..(240): transl_table=11
atgaccgtgaccgtttacactaagcccgcgtgcgtacagtgcagtgccacctccaaggcgctggacaagcagggcatcgcctaccagaaggttgatatcagcctggattccgaagcgcgggactacgtgatggcgctgggttacctacaagcacccgtcgtggtcgccggaaacgaccactggtcgggtttccgccccgatcgcatcaaggcgctcgccggggcagcgctgaccgcctag

SEQ ID NO: 9255 - protein, 79 aa, Mycobacterium tuberculosis CDC1551
MTVTVYTKPACVQCSATSKALDKQGIAYQKVDISLDSEARDYVMALGYLQAPVVVAGNDHWSGFRPDRIKALAGAALTA

SEQ ID NO: 9256 - DNA, 252 bp, Agrobacterium tumefaciens str. C58
  CDS (1)..(252): transl_table=11
gtgtccgaaatcggcttcgaaagggaaattatgaccgtcaccgtttacagcaagcccgcctgcgtccaatgcacagccacctatcgcgcgctcgaccgcatcggcgttccctatgagattatcgacatttccgaagatacggatgccctcgatcatgttcgcggcctcggctacatgcaggttcccgtcgtcgtcgctggcgagcgccattgggcaggtttccggcctgatatgatcggctcgatcagctga

SEQ ID NO: 9257 - protein, 83 aa, Agrobacterium tumefaciens str. C58
MSEIGFEREIMTVTVYSKPACVQCTATYRALDRIGVPYEIIDISEDTDALDHVRGLGYMQVPVVVAGERHWAGFRPDMIGSIS

SEQ ID NO: 9258 - DNA, 234 bp, Brucella melitensis 16M
  CDS (1)..(234): transl_table=11
atgaggaagacaatgaacgtcaccgtctatagcaagcctgcctgcgtgcaatgcactgccacaacgcgcgcactcgaccgccagggcatcgactataaagtcatcgatatttctgccgatgccaatgccttcgatctcgttcagggcatgggctatcgccaggtgccggtggtggttgccggtgaaaatcattgggcgggttttcggccggatatgatcagttcgctggcctga

SEQ ID NO: 9259 - protein, 77 aa, Brucella melitensis 16M
MRKTMNVTVYSKPACVQCTATTRALDRQGIDYKVIDISADANAFDLVQGMGYRQVPVVVAGENHWAGFRPDMISSLA

SEQ ID NO: 9260 - DNA, 234 bp, Corynebacterium glutamicum ATCC 13032
  CDS (1)..(234): transl_table=11
atggcaatcaccgtttacaccaagccagcttgcgtccagtgcaatgccaccaagaaggccctcgaccgcgctggtcttgagtatgacctcgttgatatcagccttgatgaagaggcacgtgagtacgtcctcgcacttggctacctgcaggcaccagttgtcgttgcagatggctcccactggtccggtttccgcccagagcgcatccgtgaaatggcaaccgcagctgcctaa

SEQ ID NO: 9261 - protein, 77 aa, Corynebacterium glutamicum ATCC 13032
MAITVYTKPACVQCNATKKALDRAGLEYDLVDISLDEEAREYVLALGYLQAPVVVADGSHWSGFRPERIREMATAAA

SEQ ID NO: 9262 - DNA, 219 bp, Streptococcus pyogenes MGAS8232
  CDS (1)..(219): transl_table=11
atgattacagtatattccaaaaataattgcatacagtgcaaaatgactaagaaatttttagaacaacacggagccaacttccaggaaattaatatcgatgaacatcctgaaaaagtggattatgtgagaagtcttggcttcacatctgctcctgttatcgaagcagataacctcgtattttctggcttccaacctgcaaagttaaaagaattgatttaa

SEQ ID NO: 9263 - protein, 72 aa, Streptococcus pyogenes MGAS8232
MITVYSKNNCIQCKMTKKFLEQHGANFQEINIDEHPEKVDYVRSLGFTSAPVIEADNLVFSGFQPAKLKELI

SEQ ID NO: 9264 - DNA, 315 bp, Bifidobacterium longum NCC2705
  CDS (1)..(315): transl_table=11
atggccttcgcttcactgttcatcagaaccacatcaaggggagtcgccatgaccgtcaccgtgttcaccaagccgcattgcccgcagtgcgatgccaccaagcgccagctcaccaagctgggtgtgccgtttgaaaccgtggacctgacgcagaacccctccacccttgagcagctgcaggccgccggtttccagcaggctccggtggtcatcacgccggacaactcctggaccggctaccgccccgacctgattcgcgaagtcgcccagcaggtggccgccgacaaccgcgccgccgccacggtgtccgcgtga

SEQ ID NO: 9265 - protein, 104 aa, Bifidobacterium longum NCC2705
MAFASLFIRTTSRGVAMTVTVFTKPHCPQCDATKRQLTKLGVPFETVDLTQNPSTLEQLQAAGFQQAPVVITPDNSWTGYRPDLIREVAQQVAADNRAAATVSA

SEQ ID NO: 9266 - DNA, 225 bp, Streptococcus mutans UA159
  CDS (1)..(225): transl_table=11
atggctaaaattactgttttttcaaaaaataactgcatgcaatgcaaaatgactaagaagttcctagaacaacataacgctgatttcgaagaaatcaatattgatgaacagccggaaaaaatcgaatatgtcaaaagtctaggatttactgccgctcctgttattgaaacaagcgatcttgtcttctcagggtttcagcctgctaaattgaaaaccattatttaa

SEQ ID NO: 9267 - protein, 74 aa, Streptococcus mutans UA159
MAKITVFSKNNCMQCKMTKKFLEQHNADFEEINIDEQPEKIEYVKSLGFTAAPVIETSDLVFSGFQPAKLKTII

SEQ ID NO: 9268 - DNA, 225 bp, Streptococcus agalactiae NEM316
  CDS (1)..(225): transl_table=11
atggcaactattactgttttttcgaaaaacaactgtatgcaatgtaaaatgactaagaaatttcttgaccagcacggtgctgattttgaagaaattaatattgatgaaaaaccagaaaaaattgaatatgtgaaaaatctcggcttttctgcggctccagtgattgaagctggtaatgttgttttttcaggtttccaaccaagcaaactaaaagaacttgtttaa

SEQ ID NO: 9269 - protein, 74 aa, Streptococcus agalactiae NEM316
MATITVFSKNNCMQCKMTKKFLDQHGADFEEINIDEKPEKIEYVKNLGFSAAPVIEAGNVVFSGFQPSKLKELV

SEQ ID NO: 9270 - DNA, 234 bp, Corynebacterium efficiens YS-314
  CDS (1)..(234): transl_table=11
atggccatcactgtttacaccaagccagcctgcgtccagtgcaccgcaaccaagaaggcccttgatcgcgccggcctggactacgagctcgtggacatcagcctggacgatgaggcccgcgactacgtcctcgccctcggttacctccaggcgccggttgttgtgaccgaggccgaccactggtccggcttccgcccggagcgcatccgtgagatggccgcggctgtcgcttaa

SEQ ID NO: 9271 - protein, 77 aa, Corynebacterium efficiens YS-314
MAITVYTKPACVQCTATKKALDRAGLDYELVDISLDDEARDYVLALGYLQAPVVVTEADHWSGFRPERIREMAAAVA

SEQ ID NO: 9272 - DNA, 231 bp, Lactobacillus plantarum WCFS1
  CDS (1)..(231): transl_table=11
atgaaaaaagttactgtatttactaaaaacaactgcatgcaatgcaagatgactaagaagttcctcacggcgcacaatattgcctttgaagagaagaacatcaatacgaatcctgaatacgtcgattacctgaagaatcaaggtttccatgctgttccggtcgttgaaatcaatggcgaagacagcattgccggcttccgtcctgatgctttaaaacaattagctgtttag

SEQ ID NO: 9273 - protein, 76 aa, Lactobacillus plantarum WCFS1
MKKVTVFTKNNCMQCKMTKKFLTAHNIAFEEKNINTNPEYVDYLKNQGFHAVPVVEINGEDSIAGFRPDALKQLAV

SEQ ID NO: 9274 - DNA, 225 bp, Enterococcus faecalis V583
  CDS (1)..(225): transl_table=11
atgaacgtaaaaatcttttcaaaaaataactgtatccaatgtaaaatggcgaaacgtttcctaagtgaaaataacatcgcttttgaagaaatcaatatcgacgcacaaccagatgctatcgactggttaaaagaacaagggttccaaagcgtaccggtaatcacatctgaagcaacaaccgttgttggcttccgtccagaccaattaaaacaattggctagctaa

SEQ ID NO: 9275 - protein, 74 aa, Enterococcus faecalis V583
MNVKIFSKNNCIQCKMAKRFLSENNIAFEEINIDAQPDAIDWLKEQGFQSVPVITSEATTVVGFRPDQLKQLAS

SEQ ID NO: 9276 - DNA, 231 bp, Photorhabdus luminescens subsp. laumondii TTO1
  CDS (1)..(231): transl_table=11
atgagcattaccatttatagcaaaccggactgcgtacaatgcagcgcaacctatcaggtgctaagccgaagaaatattccttatcagattatcgatttaaccgaaaacccgcaggctttagcgactatccgtgctatgggctatcagcaaattcctgtggttgttgcaggtacacagcattggtcaggatttcgtccagataaaatcaacgcattaatcgagaatgtatag

SEQ ID NO: 9277 - protein, 76 aa, Photorhabdus luminescens subsp. laumondii TTO1
MSITIYSKPDCVQCSATYQVLSRRNIPYQIIDLTENPQALATIRAMGYQQIPVVVAGTQHWSGFRPDKINALIENV

SEQ ID NO: 9278 - DNA, 234 bp, Corynebacterium diphtheriae NCTC 13129
  CDS (1)..(234): transl_table=11
atgtctatcaccgtgtataccaagccagcttgcgtccagtgcaacgcaaccaaaaaggctctcgaccgagcaggattggattacacccttgtagatatcagcgtcgacgatcaggctcgcgactacgtcatggggctcggatacctgcaggcacctgtcgttgaagcaaacggcgaacactggtcgggcttccgtcctgagcgcatcagctccttggcagcacaggtagcgtag

SEQ ID NO: 9279 - protein, 77 aa, Corynebacterium diphtheriae NCTC 13129
MSITVYTKPACVQCNATKKALDRAGLDYTLVDISVDDQARDYVMGLGYLQAPVVEANGEHWSGFRPERISSLAAQVA

SEQ ID NO: 9280 - DNA, 237 bp, Gordonia westfalica
  CDS (1)..(237): transl_table=11
atgacgatcaccgtgtacaccaagcccgcgtgcgtccagtgccacgccacctacaaagcgttggacaagcagggcctgacctatcaggtggtcgacatcagcgccgacgacgaggcccgcgactacgtgatgagcctgggttaccagcaggctccggtcgtggtgattgacgacggtcagcagtcatggagcgggttccgccccgaccgagtcaaggcgctcgccaccgccgcttga

SEQ ID NO: 9281 - protein, 78 aa, Gordonia westfalica
MTITVYTKPACVQCHATYKALDKQGLTYQVVDISADDEARDYVMSLGYQQAPVVVIDDGQQSWSGFRPDRVKALATAA

SEQ ID NO: 9282 - DNA, 225 bp, Bartonella quintana str. Toulouse
  CDS (1)..(225): transl_table=11
atgccagtcactatttatagcaaaccatcttgtgtccaatgtgacgctacacgccgtgcttttgatgctaaaggcattaattatcgtgttgttgacatttcccgtgatgagcaagcatacagttttgttcaatctctaggataccgtcaggttcctgtagtcgtttgtggtaaaagtcattggtctggttttagaccagatatgattagtggtctttgtgtttaa

SEQ ID NO: 9283 - protein, 74 aa, Bartonella quintana str. Toulouse
MPVTIYSKPSCVQCDATRRAFDAKGINYRVVDISRDEQAYSFVQSLGYRQVPVVVCGKSHWSGFRPDMISGLCV

SEQ ID NO: 9284 - DNA, 225 bp, Bartonella henselae str. Houston-1
  CDS (1)..(225): transl_table=11
atgccggtcactatttatagcaaaccatcttgcgtccaatgtgatgctacacgccgcgctttcgatgctaaaggcattaattatcgtgtggttgacatttctcgggatgaacaagcatatagttttgttcagtctttagggtatcgtcaggttcctgtagttgtttgtggtgaaaatcattggtctggttttagaccagatatgattagtggtctttgtgtttaa

SEQ ID NO: 9285 - protein, 74 aa, Bartonella henselae str. Houston-1
MPVTIYSKPSCVQCDATRRAFDAKGINYRVVDISRDEQAYSFVQSLGYRQVPVVVCGENHWSGFRPDMISGLCV

SEQ ID NO: 9286 - DNA, 240 bp, Erwinia carotovora subsp. atroseptica SCRI1043
  CDS (1)..(240): transl_table=11
atgcgtattactattttcactaagccagattgtgttcaatgcaacgccacatgtcgagcgctggataagcaaggaattaactatcaactggtggacttaactgaagatgaacaggcgttacagcaggtaagagcgttgggctatcagcaagtgcccgtcgtgatgacggctaatgaccattggagcggcttccgcccagataagatcagtactctgaacgccgccctgcaattgcagtaa

SEQ ID NO: 9287 - protein, 79 aa, Erwinia carotovora subsp. atroseptica SCRI1043
MRITIFTKPDCVQCNATCRALDKQGINYQLVDLTEDEQALQQVRALGYQQVPVVMTANDHWSGFRPDKISTLNAALQLQ

SEQ ID NO: 9288 - DNA, 237 bp, Yersinia pseudotuberculosis IP 32953
  CDS (1)..(237): transl_table=11
atgagcattattatttacagcaaacctgactgtgtccagtgtaatgccacctaccgggcattcgacagacaaggcatctcatatcaaatcattgatttaacagaagatgaacaggcactaaaccatgtcaaatcgttgggttatcagcaagttcccgtgattgtggcaggagatgagcattggtcaggcttccacccggataagattaatgcactggttcaggcggtcagtgtttga

SEQ ID NO: 9289 - protein, 78 aa, Yersinia pseudotuberculosis IP 32953
MSIIIYSKPDCVQCNATYRAFDRQGISYQIIDLTEDEQALNHVKSLGYQQVPVIVAGDEHWSGFHPDKINALVQAVSV

SEQ ID NO: 9290 - DNA, 228 bp, Colwellia psychrerythraea 34H
  CDS (1)..(228): transl_table=11
atgaaaagagttgtcttatataccatggaaaagtgtcctcattgccaaacggcaaaacgttaccttgaacagcaaggtattgcttttaggttatgtaatattaaaacggcaaaaggacagaaagagttttcagccaccggctttaggggggtacctgtgctgaaggtaggtgaccagctacttaacggtttttcagttcaagcgtttactgaactgtataaaaactaa

SEQ ID NO: 9291 - protein, 75 aa, Colwellia psychrerythraea 34H
MKRVVLYTMEKCPHCQTAKRYLEQQGIAFRLCNIKTAKGQKEFSATGFRGVPVLKVGDQLLNGFSVQAFTELYKN

SEQ ID NO: 9292 - DNA, 222 bp, Silicibacter sp. TM1040
  CDS (1)..(222): transl_table=11
atgagcatcactgtctattcaaaacctgcctgcgtgcagtgcaccgccaccacccgcgctcttgaggcgaaagggatctcttttgacctcgttgatctgacagaagatgccgctgctctggaaatggtgcagggtctgggctatcgtcaggcacccgtggtggtcgctggcgaagagcactgggctggttttcgccctgacttgatcggccagttggcgtaa

SEQ ID NO: 9293 - protein, 73 aa, Silicibacter sp. TM1040
MSITVYSKPACVQCTATTRALEAKGISFDLVDLTEDAAALEMVQGLGYRQAPVVVAGEEHWAGFRPDLIGQLA

SEQ ID NO: 9294 - DNA, 252 bp, Mycobacterium sp. MCS
  CDS (1)..(252): transl_table=11
atgtcgcagcccttgatcaccgtgtacaccaagcccgcatgcgtgcaatgcaacgccacctacaaggcgctggacaagcagggcatcgactacgaggtcgtggacatctcgctcgacagcgaggcgcgcgactacgtgatggcgctgggttacctgcaggctcccgtggtggtggccggcaacgaccactggtcgggcttccgtccggaccggatcaaggccctctccggcgcggtggccgccaccgcctga

SEQ ID NO: 9295 - protein, 83 aa, Mycobacterium sp. MCS
MSQPLITVYTKPACVQCNATYKALDKQGIDYEVVDISLDSEARDYVMALGYLQAPVVVAGNDHWSGFRPDRIKALSGAVAATA

SEQ ID NO: 9296 - DNA, 228 bp, Rhodococcus sp. RHA1
  CDS (1)..(228): transl_table=11
atgaccatcacgatctacagcaagccggcctgcgtgcaatgcaccgccacctaccgcgccctggacaacgaggggctcgactacacgatcgtcgacatcacccgagaccctgacgcccatgactacgtgctgggtctcggctacctgcaggcccctgtcatcgtggtgggtgacgaccattgggcgggtttccggcccgatcgcatcagggccctcgcggcagcctga

SEQ ID NO: 9297 - protein, 75 aa, Rhodococcus sp. RHA1
MTITIYSKPACVQCTATYRALDNEGLDYTIVDITRDPDAHDYVLGLGYLQAPVIVVGDDHWAGFRPDRIRALAAA

SEQ ID NO: 9298 - DNA, 261 bp, Rhodococcus sp. RHA1
  CDS (1)..(261): transl_table=11
atgacggtcaccgtatacaccaaaccggactgcgttcagtgcaattccacctaccgcgccctcgacaaaaaggggatcgactattcgatcgtcgacctcaccgagaacctctccgcccgcgaccgggtgatgggactcggctacctccaagcgcccgtcgtcgtggccggcgaccaacactggtccggctttcgccccgaccgcatcgcggcactcgccaactgggaattattgcagccgatacaacaaatcgtcccgtga

SEQ ID NO: 9299 - protein, 86 aa, Rhodococcus sp. RHA1
MTVTVYTKPDCVQCNSTYRALDKKGIDYSIVDLTENLSARDRVMGLGYLQAPVVVAGDQHWSGFRPDRIAALANWELLQPIQQIVP

SEQ ID NO: 9300 - DNA, 234 bp, Rhodococcus sp. RHA1
  CDS (1)..(234): transl_table=11
atgagcatcaccgtctacaccaagcccgcttgcgttcagtgcaatgccacctaccgggccctcgacaaggcgggtatcgaatactccgttgtcgacatcaccgaagaccccgaagcccgggactacgtcatggcactgggatacctgcaggcgcccgtgatcgtggctggtgacgaacactggtcgggcttccgccccgaccgcatcaagaccctctcggcaaacgctgcttga

SEQ ID NO: 9301 - protein, 77 aa, Rhodococcus sp. RHA1
MSITVYTKPACVQCNATYRALDKAGIEYSVVDITEDPEARDYVMALGYLQAPVIVAGDEHWSGFRPDRIKTLSANAA

SEQ ID NO: 9302 - DNA, 222 bp, Rhizobium leguminosarum bv. viciae 3841
  CDS (1)..(222): transl_table=11
atgaccattaccgtctacagcaagcctgcctgcgtccagtgcaccgccacctaccgtgccctcgaccgcctggctgtcgattatgacatcgtcgatatctcgcaggatgccgaagcgctcgatcgcgtccgcagcctcggctacatgcaggcgcctgtcgtcatcgccggcgagcagcattgggcgggcttccgtcccgacatgatcagcgcgctctcctga

SEQ ID NO: 9303 - protein, 73 aa, Rhizobium leguminosarum bv. viciae 3841
MTITVYSKPACVQCTATYRALDRLAVDYDIVDISQDAEALDRVRSLGYMQAPVVIAGEQHWAGFRPDMISALS

SEQ ID NO: 9304 - DNA, 231 bp, Pediococcus pentosaceus ATCC 25745
  CDS (1)..(231): transl_table=11
atgagaaaaataattgtgtacactaaaaataactgcattcaatgcaaaatgactaaacgcttcttatccgaaaacggggttacttttgaagaacgtaatatcaatgcaaatccagaatatatcgacgctttaaaagctaaaggcttccaagccgtaccagtcgttcaattttctgaagaaaaagctgtggctggttttagacctgatttactaaaaaaattagcaatttag

SEQ ID NO: 9305 - protein, 76 aa, Pediococcus pentosaceus ATCC 25745
MRKIIVYTKNNCIQCKMTKRFLSENGVTFEERNINANPEYIDALKAKGFQAVPVVQFSEEKAVAGFRPDLLKKLAI

SEQ ID NO: 9306 - DNA, 231 bp, Oenococcus oeni PSU-1
  CDS (1)..(231): transl_table=11
ttgttaataaaagtctatacagatcaaagtattcaatcagtggcgacaaaaaaatgtttgagtaaccatcacgtagattttaaggaaatcaaagcgatcggcaataaaaaagtctttgattatttaagaaaagtaaaagccaagatgcttccttatgtcgaaacagaaaatgattcttggtcgggataccgtcctgatagattaagaaaaatgatagaaaacaaatcttga

SEQ ID NO: 9307 - protein, 76 aa, Oenococcus oeni PSU-1
MLIKVYTDQSIQSVATKKCLSNHHVDFKEIKAIGNKKVFDYLRKVKAKMLPYVETENDSWSGYRPDRLRKMIENKS

SEQ ID NO: 9308 - DNA, 246 bp, Oenococcus oeni PSU-1
  CDS (1)..(246): transl_table=11
atggctgatattacggtttatacaaaaaataattgcgtgcaatgcaaaatgaccaaaaaatttcttacgtcaatgaacattgattttaaagagattaatattgacgaacatccagaactgatcgctcaattgaaagctgaaggtcatcgccagacgcctgttgttaagatttctggttttgatagtttttccggatttcgtcccgatgctttaaaaaaagtggttgctgccaaagctgctgcctaa

SEQ ID NO: 9309 - protein, 81 aa, Oenococcus oeni PSU-1
MADITVYTKNNCVQCKMTKKFLTSMNIDFKEINIDEHPELIAQLKAEGHRQTPVVKISGFDSFSGFRPDALKKVVAAKAAA

SEQ ID NO: 9310 - DNA, 222 bp, Oenococcus oeni PSU-1
  CDS (1)..(222): transl_table=11
atgataaaaatatatacaagagatgattgccctcaatgttatatgacaaaaaaatggctagataatcatcaacttgaatacacggaaatcaatattagtcgagacaaaaaatatattgactatctaaaagcaaaaggtgctcaacaaactccttatgttgtaaccgatcgagaaaattggtctggttttaggccaaacaaattaattatgttaattagatag

SEQ ID NO: 9311 - protein, 73 aa, Oenococcus oeni PSU-1
MIKIYTRDDCPQCYMTKKWLDNHQLEYTEINISRDKKYIDYLKAKGAQQTPYVVTDRENWSGFRPNKLIMLIR

SEQ ID NO: 9312 - DNA, 231 bp, Leuconostoc mesenteroides subsp. mesenteroides ATCC 8293
  CDS (1)..(231): transl_table=11
atggaaaaagttacagtatatacaaaatacaattgtgtgcaatgcaagatgaccaaaaagtttttagaagcgcaaggtataccttttaaagaaattaacattgaagaggaaacacaatttgttgaggaattgaaggctaatggtcatcgccaaacaccggttgtggcggtggaaggcctaccagcattttccggattccgtcctgatgtgctaaagaaaatttctgcttga

SEQ ID NO: 9313 - protein, 76 aa, Leuconostoc mesenteroides subsp. mesenteroides ATCC 8293
MEKVTVYTKYNCVQCKMTKKFLEAQGIPFKEINIEEETQFVEELKANGHRQTPVVAVEGLPAFSGFRPDVLKKISA

SEQ ID NO: 9314 - DNA, 240 bp, Mycobacterium avium 104
  CDS (1)..(240): transl_table=11
atgaccatcaccgtgtacaccaagccggcatgcgtgcagtgcagcgccacctacaaggcgctggacaagcacggcatcgcctacgaaaaggtcgacatcacgctcgaccccgaggcgcgtgactacgtgatggcgctgggatacctgcaggctcccgtcgtggtggccggaagcgaccactggtcgggtttccggcccgatcggatcaaggcgctggccggggcggaactgagcgcctag

SEQ ID NO: 9315 - protein, 79 aa, Mycobacterium avium 104
MTITVYTKPACVQCSATYKALDKHGIAYEKVDITLDPEARDYVMALGYLQAPVVVAGSDHWSGFRPDRIKALAGAELSA

SEQ ID NO: 9316 - DNA, 240 bp, Mycobacterium smegmatis str. MC2 155
  CDS (1)..(240): transl_table=11
atgaccgtcaccgtgtacaccaagcccgcatgcgtgcagtgcaacgccacctacaaggcgctggacaagctgggcatcgcctacgagacggtcgacatcaccgtcgacagcgaggcccgtgactacgtcatggcgctcggctacctgcaggcaccggtcgtggtggccggcaacgagcactggtcgggcttccgccccgaccgcatcaaggcactcagcgccgcgacgatcagcgcgtaa

SEQ ID NO: 9317 - protein, 79 aa, Mycobacterium smegmatis str. MC2 155
MTVTVYTKPACVQCNATYKALDKLGIAYETVDITVDSEARDYVMALGYLQAPVVVAGNEHWSGFRPDRIKALSAATISA

SEQ ID NO: 9318 - DNA, 246 bp, Mycobacterium sp. KMS
  CDS (1)..(246): transl_table=11
atgaccgccatcaccgtctacacaaagcccgcctgtgtgcaatgcaacgcgaccttccgggcattggacaaagcaggtgtggattacgcgaaagtcgacatcaccgtcgacagcgacgcccgcgactacgtgatgggactgggctacctgcaggcccccgtcgtggtggccggcggacagcactggtccggtttccgacccgaccgcatagctgaggtcagcaaatcccacccgctgagcgcctga

SEQ ID NO: 9319 - protein, 81 aa, Mycobacterium sp. KMS
MTAITVYTKPACVQCNATFRALDKAGVDYAKVDITVDSDARDYVMGLGYLQAPVVVAGGQHWSGFRPDRIAEVSKSHPLSA

SEQ ID NO: 9320 - DNA, 267 bp, Bifidobacterium longum DJO10A
  CDS (1)..(267): transl_table=11
atgaccgtcaccgtgttcaccaagccgcattgcccgcagtgcgatgccaccaagcgccagctcaccaagctgggtgtgccgtttgaaaccgtggacctgacgcagaacccctccacccttgagcagctgcaggccgccggtttccagcaggctccggtggtcatcacgccggacaactcctggaccggctaccgccccgacctgattcgcgaagtcgcccagcaggtggccgccgacaaccgcgccgccgccacggtgtccgcgtga

SEQ ID NO: 9321 - protein, 88 aa, Bifidobacterium longum DJO10A
MTVTVFTKPHCPQCDATKRQLTKLGVPFETVDLTQNPSTLEQLQAAGFQQAPVVITPDNSWTGYRPDLIREVAQQVAADNRAAATVSA

SEQ ID NO: 9322 - DNA, 228 bp, Corynebacterium ammoniagenes
  CDS (1)..(228): transl_table=11
atgtctatcactctttacaccaagccagcttgcgtccagtgcaccgctactaaaaaagcccttgaccgtgctggtctggcttacaacactgttgatatctccctcgatgatgaagcacgtgattacgttatggcgctgggctacgttcaggctccagttgtagaggtagacggtgagcactggtccggcttccgcccagagcgcatcaagcagctacaggccgcttaa

SEQ ID NO: 9323 - protein, 75 aa, Corynebacterium ammoniagenes
MSITLYTKPACVQCTATKKALDRAGLAYNTVDISLDDEARDYVMALGYVQAPVVEVDGEHWSGFRPERIKQLQAA

SEQ ID NO: 9324 - DNA, 267 bp, Arthrobacter nicotinovorans
  CDS (1)..(267): transl_table=11
atgactacttcattgaccgattacacggtttacactaagcccgagtgtcccaattgtgagcgcacgaaggagtatttcgactccaagggcatcacgtacacggctgtggacgtcaccgaggtgccggcggctttggagtacatcaccgatgagcttgggtacacgcaggccccggtcgtggtgaacaattccgatgaccaggaccactggtcgggcctccgccgggacaagctcgtccaggcggccatgacccacaccgtggcatga

SEQ ID NO: 9325 - protein, 88 aa, Arthrobacter nicotinovorans
MTTSLTDYTVYTKPECPNCERTKEYFDSKGITYTAVDVTEVPAALEYITDELGYTQAPVVVNNSDDQDHWSGLRRDKLVQAAMTHTVA

SEQ ID NO: 9326 - DNA, 246 bp, Salmonella typhimurium
  CDS (1)..(246): transl_table=11
atgagcattactatttacactcgcaataactgtgttcagtgccacgccacaaagcgggcgatggaaagccgtggatttgaatttgagatggtgaacgtcgatctggtgccggatgcagcggatacgctccgggcgcaaggatttcgtcaattaccggtggtgatggcgggcgatttgagctggtctggcttccgcccggacatgattaaccgtctgcacccgacaccccacgcggcaaacgcatga

SEQ ID NO: 9327 - protein, 81 aa, Salmonella typhimurium
MSITIYTRNNCVQCHATKRAMESRGFEFEMVNVDLVPDAADTLRAQGFRQLPVVMAGDLSWSGFRPDMINRLHPTPHAANA

SEQ ID NO: 9328 - DNA, 23 bp, Artificial sequence
  primer
atgcgcattactatttacactcg

SEQ ID NO: 9329 - DNA, 22 bp, Artificial sequence
  primer
ttatgcactggccgcgtgtggc

SEQ ID NO: 9330 - protein, 81 aa, Artificial sequence
  consensus sequence
  Variant (2)..(2): Xaa in position 2 is any amino acid
  Variant (3)..(6): Xaa in position 3 to 6 is any or no amino acid
  Variant (8)..(8): Xaa in position 8 is any amino acid
  Variant (10)..(10): Xaa in position 10 is any amino acid
  Variant (11)..(16): Xaa in position 11 to 16 is any or no amino acid
  Variant (18)..(19): Xaa in position 18 to 19 is any amino acid
  Variant (21)..(21): Xaa in position 21 is any amino acid
  Variant (24)..(25): Xaa in position 24 to 25 is any amino acid
  Variant (27)..(29): Xaa in position 27 to 29 is any amino acid
  Variant (31)..(33): Xaa in position 31 to 33 is any amino acid
  Variant (35)..(54): Xaa in position 35 to 54 is any amino acid
  Variant (55)..(57): Xaa in position 55 to 57 is any or no amino acid
  Variant (59)..(62): Xaa in position 59 to 62 is any amino acid
  Variant (65)..(73): Xaa in position 65 to 73 is any amino acid
  Variant (74)..(77): Xaa in position 74 to 77 is any or no amino acid
MXXXXXTXYXXXXXXXKXXCXQCXXTXXXLXXXGXXXXXXXXXXXXXXXXXXXXXXXGXXXXPVXXXXXXXXXXXXXGFRP

SEQ ID NO: 9331 - protein, 40 aa, Artificial sequence
  protein pattern
  Variant (2)..(4): Xaa in position 2 to 4 is any amino acid
  Variant (5)..(7): Xaa in position 5 to 7 is any or no amino acid
  Variant (9)..(9): Xaa in position 9 is any amino acid
  Variant (12)..(13): Xaa in position 12 to 13 is any amino acid
  Variant (15)..(15): Xaa in position 15 is any amino acid
  Variant (16)..(16): Xaa in position 16 is Lys or Arg
  Variant (17)..(17): Xaa in position 17 is any amino acid
  Variant (18)..(18): Xaa in position 18 is Phe, Leu or Met
  Variant (19)..(19): Xaa in position 19 is Asp, Glu, Ser or Thr
  Variant (20)..(21): Xaa in position 20 to 21 is any amino acid
  Variant (22)..(22): Xaa in position 22 is Ala, Gly, Asn or Gln
  Variant (23)..(24): Xaa in position 23 to 24 is any amino acid
  Variant (25)..(25): Xaa in position 25 is Phe or Tyr
  Variant (26)..(28): Xaa in position 26 to 28 is any amino acid
  Variant (29)..(29): Xaa in position 29 is Asp or Asn
  Variant (30)..(30): Xaa in position 30 is Ile, Leu or Val
  Variant (31)..(31): Xaa in position 31 is Asp, Glu, Asn, Ser or Thr
  Variant (32)..(37): Xaa in position 32 to 37 is any amino acid
  Variant (38)..(38): Xaa in position 38 is Ala, Asp, Glu, Gln or Ser
  Variant (39)..(39): Xaa in position 39 is any amino acid
  Variant (40)..(40): Xaa in position 40 is Leu or Val
TXXXXXXCXQCXXTXXXXXXXXXXXXXXXXXXXXXXXXXX

SEQ ID NO: 9332 - protein, 23 aa, Artificial sequence
  protein pattern
  Variant (2)..(2): Xaa in position 2 is any amino acid
  Variant (3)..(3): Xaa in position 3 is any or no amino acid
  Variant (5)..(11): Xaa in position 5 to 11 is any amino acid
  Variant (12)..(13): Xaa in position 12 to 13 is any or no amino acid
  Variant (15)..(15): Xaa in position 15 is Phe or Tyr
  Variant (16)..(16): Xaa in position 16 is His or Arg
  Variant (18)..(18): Xaa in position 18 is Asp, Glu, Asn or Gln
  Variant (19)..(19): Xaa in position 19 is any amino acid
  Variant (20)..(20): Xaa in position 20 is Ile, Leu or Val
  Variant (21)..(22): Xaa in position 21 to 22 is any amino acid
  Variant (23)..(23): Xaa in position 23 is Phe, Ile, Leu, Met or Val
PXXVXXXXXXXXXGXXPXXXXXX

SEQ ID NO: 9333 - DNA, 636 bp, Escherichia coli
  CDS (1)..(636): transl_table=11
atgttttcttattactttcaaggtcttgcacttggggcggctatgatcctaccgctcggtccacaaaatgcttttgtgatgaatcagggcatacgtcgtcagtaccacattatgattgccttactttgtgctatcagcgatttggtcctgatttgcgccgggatttttggtggcagcgcgttattgatgcagtcgccgtggttgctggcgctggtcacctggggcggcgtagccttcttgctgtggtatggttttggcgcttttaaaacagcaatgagcagtaatattgagttagccagcgccgaagtcatgaagcaaggcagatggaaaattatcgccaccatgttggcagtgacctggctgaatccgcatgtttacctggatacttttgttgtactgggcagccttggcgggcaacttgatgtggaaccaaaacgctggtttgcactcgggacaattagcgcctctttcctgtggttctttggtctggctcttctcgcagcctggctggcaccgcgtctgcgcacggcaaaagcacagcgcattatcaatctggttgtgggatgtgttatgtggtttattgccttgcagctggcgagagacggtattgctcatgcacaagccttgttcagttaa

SEQ ID NO: 9334 - protein, 211 aa, Escherichia coli
MFSYYFQGLALGAAMILPLGPQNAFVMNQGIRRQYHIMIALLCAISDLVLICAGIFGGSALLMQSPWLLALVTWGGVAFLLWYGFGAFKTAMSSNIELASAEVMKQGRWKIIATMLAVTWLNPHVYLDTFVVLGSLGGQLDVEPKRWFALGTISASFLWFFGLALLAAWLAPRLRTAKAQRIINLVVGCVMWFIALQLARDGIAHAQALFS

SEQ ID NO: 9335 - DNA, 636 bp, Vibrio cholerae O1 biovar eltor str. N16961
  CDS (1)..(636): transl_table=11
atgaactggtggattctgctacaaggattcagcttgggagcgaccatgattattcccattggtgctcaaaatgcttatgtattaaatcaagggattaaacgtcatcaccacttaaccaccgcagccacttgtggggtgctggatatgatttttatcacgctggggatttttggcggtggtgctctcatctcgcaaaataccagcttgttaattggtgtcactttggctggaattctttttttgtgtggttatgggtttctttctttgcgtgctgcgctcaaaccgccccaagcatctgaatccacggcaaatccgatggctgcaggacgtaaagcggtcatttttggtgcctttgcggtcactgtgtttaacccgcatctctatttggataccgtggtgatcttagggtcaatcggaggccaattccaaggtgatgagcgtatctcatttgccattggtaccattctcgcctcattcgtgtggttttttactctttcactcggagcagcaaaattgagcaccacactctctaaacctagagtcagacaagtgattgatatggcagtcgcagcgatgatgttcattattgccttcgcgttgactaagaacttatatctcaatcactggttaaattaa

SEQ ID NO: 9336 - protein, 211 aa, Vibrio cholerae O1 biovar eltor str. N16961
MNWWILLQGFSLGATMIIPIGAQNAYVLNQGIKRHHHLTTAATCGVLDMIFITLGIFGGGALISQNTSLLIGVTLAGILFLCGYGFLSLRAALKPPQASESTANPMAAGRKAVIFGAFAVTVFNPHLYLDTVVILGSIGGQFQGDERISFAIGTILASFVWFFTLSLGAAKLSTTLSKPRVRQVIDMAVAAMMFIIAFALTKNLYLNHWLN

SEQ ID NO: 9337 - DNA, 681 bp, Pasteurella multocida subsp. multocida str. Pm70
  CDS (1)..(681): transl_table=11
ttgcgtttagtgtactactttatgtttaaattattaaggaaattctttatggaacaccttttacaaggcttttttgtgacggcggggttgattatcgccattggggcgcaaaatgcctttgtattaaaacagggattacttaaacagaatattctggctgtgattttaacctgttttttctgcgatattgtattaatttccttaggggtattgggattaggttccctaatcagccaaagcactatggcaactgtcgccttagcctttgtcggaggtggttttttattgatttatggtttaaaagcctttttatctgcttatcgaggcaacgcgtcattacaattagcaaaagcggataaacaaccacaaaccactttgcatgcgatcattgctaccctactgattacgctgttaaatccacatgtctatttagatactgtggtcattattggtggtattgctggcacacttgcctttgacgagaagctgttttttctggttggtgccttgttagtatcggctctctggttttttagcttgggctatggcgcacgcttattaagccgatttttccaacgaccagtaacatggcgaattttggatttggtgattggggtaattatgtgggcaattgcaattagcttgatacattatggcatcactttattccccacagtgtaa

SEQ ID NO: 9338 - protein, 226 aa, Pasteurella multocida subsp. multocida str. Pm70
MRLVYYFMFKLLRKFFMEHLLQGFFVTAGLIIAIGAQNAFVLKQGLLKQNILAVILTCFFCDIVLISLGVLGLGSLISQSTMATVALAFVGGGFLLIYGLKAFLSAYRGNASLQLAKADKQPQTTLHAIIATLLITLLNPHVYLDTVVIIGGIAGTLAFDEKLFFLVGALLVSALWFFSLGYGARLLSRFFQRPVTWRILDLVIGVIMWAIAISLIHYGITLFPTV

SEQ ID NO: 9339 - DNA, 642 bp, Rickettsia conorii str. Malish 7
  CDS (1)..(642): transl_table=11
atgaataatgatatattaagtgcttttttacatggcatcgttttagctctcggtttaatagtgccgctcggagtacagaatatttttatattcaatcaaggagcaacacagccaaagtttagcaaggctttacctagcataattgcagcctcaatatgtgatactatgcttatatgtatggcagttcttgggatatctttgttaattcttgaaatttcttggttaaaattatctatatttattgttggatttattttcttaatttatatgggatataatacttggaatcagccgcctattgatcttacaatgaattccggggctttttcagctcaaaaacaaattttatttgctatatcggtgtcaatattaaatccgcatgcaattatggatacgattatagtaataggtattagtgctttaaagtatagcggtattgcaaaaattatatttaccttaacttgcatacttatatcttggatatggtttttttctttagcagttgcaggttataatattagaaagctaaataaaagtagtacgattttaactataattaataaaatagctgctattattatttgggcagttgctttttatattggagtacaaatattgtatgaaatcggttttattaactag

SEQ ID NO: 9340 - protein, 213 aa, Rickettsia conorii str. Malish 7
MNNDILSAFLHGIVLALGLIVPLGVQNIFIFNQGATQPKFSKALPSIIAASICDTMLICMAVLGISLLILEISWLKLSIFIVGFIFLIYMGYNTWNQPPIDLTMNSGAFSAQKQILFAISVSILNPHAIMDTIIVIGISALKYSGIAKIIFTLTCILISWIWFFSLAVAGYNIRKLNKSSTILTIINKIAAIIIWAVAFYIGVQILYEIGFIN

SEQ ID NO: 9341 - DNA, 618 bp, Staphylococcus aureus subsp. aureus Mu50
  CDS (1)..(618): transl_table=11
atggtaaccgcaattattcatggatttatcttagcgattggtctaattttacctttaggtgcacaaaatgtatttatttttaaccaaggagctaatcaaccaaaatatagatatgtattgcctgcaataattacagccgggttgtcagacagcttacttattattattgcagtggtaggagtatctatcattattatgtctttacctgtacttcaagcaattatttatatagttggtttaattttcttgatgtatatggcttggaccatttggcatgataaaccctcaacagatggagaagctcaaattatatctccaatgaaacaagtaagttttgctttatcagtttcattactcaatccacatgctattttagatacaattggtgtaattggtagtagtgctgcattatatagtggcagcaataaaattgcgtttacaatcgcttgtattagcgtttcatggttatggttctttttactcgcaattttaggaaaaatggttggatcaattgataaaactggaaaattattaacaataatcaataaaatatcaagcataataattattattgttgctctaatgatattacaaaaacttattcaattattattctaa

SEQ ID NO: 9342 - protein, 205 aa, Staphylococcus aureus subsp. aureus Mu50
MVTAIIHGFILAIGLILPLGAQNVFIFNQGANQPKYRYVLPAIITAGLSDSLLIIIAVVGVSIIIMSLPVLQAIIYIVGLIFLMYMAWTIWHDKPSTDGEAQIISPMKQVSFALSVSLLNPHAILDTIGVIGSSAALYSGSNKIAFTIACISVSWLWFFLLAILGKMVGSIDKTGKLLTIINKISSIIIIIVALMILQKLIQLLF

SEQ ID NO: 9343 - DNA, 639 bp, Ralstonia solanacearum GMI1000
  CDS (1)..(639): transl_table=11
atgacggggcccggcccggagagcgcgccgctgatcggcgcggcgctgtcgggcttcggcctgggcgcgagtctgatcgtggcgatcggcgcgcagaacgcgtacgtgctgcggcaagggctacgccgcgaatacgtgctcggcgtggtgctgatctgcgcgctgtgcgacatggcgctgatcgcgctgggcgtggcgggcatgggcacgctgatctcggcgcacccggcatggctgacggcggtgcgctgggccggcgcggccttcctgctggcctacggcgcacgggcgttccgggcggcgtggcgcggcgccgagcggctgcaggcgcgcaacggcgacaaggcctcgcatgcgcaggtgctggcgtccgcgctggcgctgtcgctgctcaatccgcacgtctatctcgacaccgtggtgctgctgggcgccatcggcgggcgctacgcgatgccggccaacgtggcgttcgccggcggcgcgatgtgcgcgtcgatcctgtggttctcgctgctggggttcggcgcacggctgctggagccggtgttcgccaggccggtcgcctggcgggtgctcgatgcgctgatcggcgcggtgatgtgggcgatcgcgctgacgctgctgatgggcggttag

SEQ ID NO: 9344 - protein, 212 aa, Ralstonia solanacearum GMI1000
MTGPGPESAPLIGAALSGFGLGASLIVAIGAQNAYVLRQGLRREYVLGVVLICALCDMALIALGVAGMGTLISAHPAWLTAVRWAGAAFLLAYGARAFRAAWRGAERLQARNGDKASHAQVLASALALSLLNPHVYLDTVVLLGAIGGRYAMPANVAFAGGAMCASILWFSLLGFGARLLEPVFARPVAWRVLDALIGAVMWAIALTLLMGG

SEQ ID NO: 9345 - DNA, 609 bp, Ralstonia solanacearum GMI1000
  CDS (1)..(609): transl_table=11
atgaacgcagcaacccaaggattgattctcggtttctccctgatcctggccatcggatcgcagaatgccttcatcttgcggcagggcatcctgggccggcatgtgttcgtgctgtgctcggtgtgtgccctgtccgacgccctgctgatcgtggcgggcgtgtcggggttctttgtgctggtcaagcacacgccctatatcgtggacgtggcacggtatggcggcgcggcgttcatcctgtggtacggaatctcgagattgctgtccgcgctgcgcggcgacagccagatggacatctcgaaggccaaggaagccgattccctgcccaaggcgctgctcagttgcctggcattcacctttctcaatccgcatgtctatctcgatacggtcttcctgatcgggtcgatttcggcgcagttcggcgatgagtcctggaaattcggcgtgggcgcgagcgcggcgtcgctgattttcttcttctgcctggggtacggcgcggcgttgctgcgtccgctgttctcgagccccgtggcctggcggattctcgatttcgtgatcggcgtcaccatgctgatgctggcgggcaagctggcgttcctgcagacctga

SEQ ID NO: 9346 - protein, 202 aa, Ralstonia solanacearum GMI1000
MNAATQGLILGFSLILAIGSQNAFILRQGILGRHVFVLCSVCALSDALLIVAGVSGFFVLVKHTPYIVDVARYGGAAFILWYGISRLLSALRGDSQMDISKAKEADSLPKALLSCLAFTFLNPHVYLDTVFLIGSISAQFGDESWKFGVGASAASLIFFFCLGYGAALLRPLFSSPVAWRILDFVIGVTMLMLAGKLAFLQT

SEQ ID NO: 9347 - DNA, 609 bp, Agrobacterium tumefaciens str. C58
  CDS (1)..(609): transl_table=11
atggacatccagatcttcttcaccggcctcaccatgggcctcagcctcatcgtcgccatcggcgcgcagaatgccttcgtgctgaaacaggggctggcgcgttcgcatgtgtttgccgtctgcgctacctgcgcgatatcagatgcgctgctgattatggtcggtgtgttcggttttcagcggatcagcgcgatcatgccggcgctcgatcccatcatgcgttatgcgggggcggcttttcttatctggtatggcgccaaaagcctgtattcggcgctgcgttcatccgaggtgctgtctgtggccgagcggcgggaggcgagcctgtggcagacgcttgccatctgcctggcgctcaccttcctcaatccgcatgtctatctcgataccgtcgtgctgctcggcacgatttccacgcagtttcccggtttcgaaaagacctttgcggcaggcgcggcaaccggctcgctgctgttcttcttttcgctgggttacggcgcgcgctggctgcggccgatcttcgaaaaaccctctgcctggcgcattctcgaaggcgtcatcgccatcaccatgtgggccatcgcgttcaagctggtcatgggtgcgtag

SEQ ID NO: 9348 - protein, 202 aa, Agrobacterium tumefaciens str. C58
MDIQIFFTGLTMGLSLIVAIGAQNAFVLKQGLARSHVFAVCATCAISDALLIMVGVFGFQRISAIMPALDPIMRYAGAAFLIWYGAKSLYSALRSSEVLSVAERREASLWQTLAICLALTFLNPHVYLDTVVLLGTISTQFPGFEKTFAAGAATGSLLFFFSLGYGARWLRPIFEKPSAWRILEGVIAITMWAIAFKLVMGA

SEQ ID NO: 9349 - DNA, 615 bp, Brucella melitensis 16M
  CDS (1)..(615): transl_table=11
gtgttcccagcagccctgtccggctttcttcttggtgcttcactcatcatcgccatcggtgcgcaaaacgcttttatcctgcgtcaggggttgctgcgccagcacgtcttcattctgtgtctcatctgcgcgctgtctgacgcgctgcttatcagcgccggggtggcagggcttggcacactcatagcgcagtcgccgaaactcatcgctttcgtgacattggcgggagccgccttcctgttctggtatgcatcggtggcgttccgccgcgccttccacccggaggcaatgcaggtcaagtcgaacggagcggtgagtctgaaagcagcagcggcaacctgtctggccctgaccttcctcaacccgcatgtctatctcgacacggtgctgctgatcggcagcctttcagcacggcttgaaggtccagcgcgtgccgcctatggcgccggtgcggcaactgcatcgtgcatctggtttttcgcgcttggttacggtgcgcggctgttgcagccgatatttgccaaaccggctgcgtggcgtgtgctcgattgtatcatcggtgttgtcatggccctgatcggtctcagcctgtcagcccggttttttcacggctag

SEQ ID NO: 9350 - protein, 204 aa, Brucella melitensis 16M
MFPAALSGFLLGASLIIAIGAQNAFILRQGLLRQHVFILCLICALSDALLISAGVAGLGTLIAQSPKLIAFVTLAGAAFLFWYASVAFRRAFHPEAMQVKSNGAVSLKAAAATCLALTFLNPHVYLDTVLLIGSLSARLEGPARAAYGAGAATASCIWFFALGYGARLLQPIFAKPAAWRVLDCIIGVVMALIGLSLSARFFHG

SEQ ID NO: 9351 - DNA, 711 bp, Corynebacterium glutamicum ATCC 13032
  CDS (1)..(711): transl_table=11
atggtgatcatggaaatcttcattacaggtctgcttttgggggccagtcttttactgtccatcggaccgcagaatgtactggtgattaaacaaggaattaagcgcgaaggactcattgcggttcttctcgtgtgtttaatttctgacgtctttttgttcatcgccggcaccttgggcgttgatcttttgtccaatgccgcgccgatcgtgctcgatattatgcgctggggtggcatcgcttacctgttatggtttgccgtcatggcagcgaaagacgccatgacaaacaaggtggaagcgccacagatcattgaagaaacagaaccaaccgtgcccgatgacacgcctttgggcggttcggcggtggccactgacacgcgcaaccgggtgcgggtggaggtgagcgtcgataagcagcgggtttgggtaaagcccatgttgatggcaatcgtgctgacctggttgaacccgaatgcgtatttggacgcgtttgtgtttatcggcggcgtcggcgcgcaatacggcgacaccggacggtggattttcgccgctggcgcgttcgcggcaagcctgatctggttcccgctggtgggtttcggcgcagcagcattgtcacgcccgctgtccagccccaaggtgtggcgctggatcaacgtcgtcgtggcagttgtgatgaccgcattggccatcaaactgatgttgatgggttag

SEQ ID NO: 9352 - protein, 236 aa, Corynebacterium glutamicum ATCC 13032
MVIMEIFITGLLLGASLLLSIGPQNVLVIKQGIKREGLIAVLLVCLISDVFLFIAGTLGVDLLSNAAPIVLDIMRWGGIAYLLWFAVMAAKDAMTNKVEAPQIIEETEPTVPDDTPLGGSAVATDTRNRVRVEVSVDKQRVWVKPMLMAIVLTWLNPNAYLDAFVFIGGVGAQYGDTGRWIFAAGAFAASLIWFPLVGFGAAALSRPLSSPKVWRWINVVVAVVMTALAIKLMLMG

SEQ ID NO: 9353 - DNA, 615 bp, Streptomyces coelicolor A3(2)
  CDS (1)..(615): transl_table=11
atgaacaacgccctcacggcggccgccgccggtttcggcaccggcctctcgctcatcgtcgccatcggcgcccagaacgccttcgtcctgcggcagggggtccgccgtgacgcggtgctcgccgtggtcggcatctgcgcgctgtccgacgccgtgctcatcgccctgggcgtcggcggggtcggcgccgtggtggtggcgtggccgggcgcgctgaccgccgtcggctggatcggcggcgcgttcctgctctgctacggagccctggcggcccggcgggtgttccggccgtccggggcgctgcgggcggacggcgccgccgcgggctcgcgccgccgggccgtgctcacctgcctggcgctgacctggctcaacccgcacgtctacctcgacaccgtgttcctgctgggctccgtcgccgccgaccgggggccgctgcgctggaccttcggcctcggagccgccgccgccagcctggtctggttcgccgcgctcggcttcggcgcccgctacctcggccgcttcctgtcccggcccgtcgcctggcgggtcctcgacggactggtggccgccaccatgatcgtcctcggcgtctccctcgtcgccggggcctga

SEQ ID NO: 9354 - protein, 204 aa, Streptomyces coelicolor A3(2)
MNNALTAAAAGFGTGLSLIVAIGAQNAFVLRQGVRRDAVLAVVGICALSDAVLIALGVGGVGAVVVAWPGALTAVGWIGGAFLLCYGALAARRVFRPSGALRADGAAAGSRRRAVLTCLALTWLNPHVYLDTVFLLGSVAADRGPLRWTFGLGAAAASLVWFAALGFGARYLGRFLSRPVAWRVLDGLVAATMIVLGVSLVAGA

SEQ ID NO: 9355 - DNA, 627 bp, Xanthomonas axonopodis pv. citri str. 306
  CDS (1)..(627): transl_table=11
atgatcgttcaagcaacagtggccggtttccttgccggtgccggtctcatcgtcgcgatcggcgcgcagaatgcgttcgtgctgcggcaggggctcaagcgccagcacgtgggactggtggtgacgatctgtgcacttggagatatcgcgctgatcctgctcggcgtcgccggaatcggcgtgttggcgcagcaatggtcgggcctgctgcaggtgttgcgctatgcgggcgctgcgtttctggcggtgtatggggggatggcggcacgccgtgcctggcgcggagatggcgcaatgtcgccagcggaacagggcgaagatcgctggcaacgcgccatgctcacctgcctggcgtttacctttctcaacccgcacgtctatctcgatacgatgctcttgctcggcagtctggcgacgcattaccccggcgcgttgcgctgggcatttgcactgggtgcgtgtgtggccagcgtgagctggttctctggcctgggctatggggcccgcctgttgcagccagtgtttcggcatccgcgtgcgtggcggatactggatggactgatcgcggtcttcatgctgctgctgtgcgtgctgttgctgctccccgagcacgcggagctgcgctga

SEQ ID NO: 9356 - protein, 208 aa, Xanthomonas axonopodis pv. citri str. 306
MIVQATVAGFLAGAGLIVAIGAQNAFVLRQGLKRQHVGLVVTICALGDIALILLGVAGIGVLAQQWSGLLQVLRYAGAAFLAVYGGMAARRAWRGDGAMSPAEQGEDRWQRAMLTCLAFTFLNPHVYLDTMLLLGSLATHYPGALRWAFALGACVASVSWFSGLGYGARLLQPVFRHPRAWRILDGLIAVFMLLLCVLLLLPEHAELR

SEQ ID NO: 9357 - DNA, 621 bp, Shewanella oneidensis MR-1
  CDS (1)..(621): transl_table=11
atgcaaacggcgtttattcaaggtatgggcattggtggtagtttgattattgccgtaggggcgcaaaatgctttcgtgctaaagcaagggattaagcgtgcttaccctttgccgattgcgctgctttgttcgattatcgatgccttgatgattaccgcgggtgtggcagggcttgggcatattattgagacctttccgaccattaagcacgtggcgagttttggtggtgcggcttttttgatttggtacggtgccaatgcgcttaaggcctcttttgttaccaaggggatggagatggatcacgcgcaaaatgctgatactctgcgtaaagccatcttgaccaccctaggcataagtctactcaatccacacctttatttagatactgtggtgttgcttggtagtatcagtactcagtttgaagatgctcaccgtccttggtttggcgccggtgcagtattggcttcttttatttggttctttagcctaagttttggtgcacgtttgttggcgcctatttttagtcgtccagcggcatggcgttatttagaccgctttatttggctgacgatgtggagcattgctgcggccattatctggccataccttgccgcaatttaa

SEQ ID NO: 9358 - protein, 206 aa, Shewanella oneidensis MR-1
MQTAFIQGMGIGGSLIIAVGAQNAFVLKQGIKRAYPLPIALLCSIIDALMITAGVAGLGHIIETFPTIKHVASFGGAAFLIWYGANALKASFVTKGMEMDHAQNADTLRKAILTTLGISLLNPHLYLDTVVLLGSISTQFEDAHRPWFGAGAVLASFIWFFSLSFGARLLAPIFSRPAAWRYLDRFIWLTMWSIAAAIIWPYLAAI

SEQ ID NO: 9359 - DNA, 708 bp, Corynebacterium efficiens YS-314
  CDS (1)..(708): transl_table=11
ttgtgcgcgaacatgcgggacatggaaatctttgtcaccggtttgttgttgggagccagtctgctgttggccatcggcccacagaatgtcctggtgatcaaacagggcatcaaacgcgagggcatcacggccgtcatcatcgtctgtctgctgtccgacgtggtcctgttcaccctcggcaccctcggggtcggcctgatctccgacaccgccccgatcattctcgacatcctgcgctggtgcggcatcgcctacctgctgtggttcgcggtgatggcggcgcgcgacgccctgcgcgcccgcaccgaggtaacctttgtcgagcattccgaacccgttgcggcagcgtccgcctccggcgggggcgtgacgacgaaacaacgaccccggctccgcatcacatcaggcacccggcaggtctgggtcaggcccatgctcatggccattgtgctgacctggctcaatcccaatgcctacctggatgccttcgtcttcatcggtggtgtcggagcccagtacggggagaccggtcggtggatcttcgctgcgggtgccttcgccgccagcctggtctggttcccactggtcggttacggcgcggccgcactgtcgcgtcccctgtccagcccgcgggtctggcgctggatcaacataggtgtggccgtggtgctcaccggattggccgtgaagctgatcctgatgggttaa

SEQ ID NO: 9360 - protein, 235 aa, Corynebacterium efficiens YS-314
MCANMRDMEIFVTGLLLGASLLLAIGPQNVLVIKQGIKREGITAVIIVCLLSDVVLFTLGTLGVGLISDTAPIILDILRWCGIAYLLWFAVMAARDALRARTEVTFVEHSEPVAAASASGGGVTTKQRPRLRITSGTRQVWVRPMLMAIVLTWLNPNAYLDAFVFIGGVGAQYGETGRWIFAAGAFAASLVWFPLVGYGAAALSRPLSSPRVWRWINIGVAVVLTGLAVKLILMG

SEQ ID NO: 9361 - DNA, 615 bp, Pseudomonas putida KT2440
  CDS (1)..(615): transl_table=11
ttggagagccctgccatgtggcaaagctatctcaatggcatgctggtggccttcggtctgatcatggccattggcgcccagaacgccttcgtcctcgcccagagtctgcgccgtgagcatcacctgccggtggcagcgctgtgcatcgtctgtgacgccatcctcgtggccgccggagtattcggactggccaccgtgctggcacacaacccgaccttgctggcgattgcccgctggggcggcgcagtgttcctgatctggtacggcgccaaggcgctgcgcagcgcctgctccaagcagagcctgcagcaccagcaaggccaaggcgttcgctcacgtcgcgccgtactgctcagcgccctggcggtgaccctgctgaacccgcacgtgtacctcgacaccgtgttgctgatcggctcgctgggcgctcagcagtccgcccctggcgcctacgtggccggtgcggccagcgcttcgctgctgtggttctcgaccctggccattggcgcggcgtggctggcaccgtggctggcgcggccggcgacctggcgcatgctcgacctgatggtggcggtgatgatgttcgcggtggcggcgcaattgatcttcaactga

SEQ ID NO: 9362 - protein, 204 aa, Pseudomonas putida KT2440
MESPAMWQSYLNGMLVAFGLIMAIGAQNAFVLAQSLRREHHLPVAALCIVCDAILVAAGVFGLATVLAHNPTLLAIARWGGAVFLIWYGAKALRSACSKQSLQHQQGQGVRSRRAVLLSALAVTLLNPHVYLDTVLLIGSLGAQQSAPGAYVAGAASASLLWFSTLAIGAAWLAPWLARPATWRMLDLMVAVMMFAVAAQLIFN

SEQ ID NO: 9363 - DNA, 603 bp, Pseudomonas syringae pv. tomato str. DC3000
  CDS (1)..(603): transl_table=11
atgtggcaaagctacttcaacggcctgctgatcgcggcaggcctgatcatggctatcggtactcaaaatgctttcgtgctggctcaggggctgcgccgtgaacatcacgtgcccgtcgcgatgctgtgcgttgtctgcgacgccattctggtggcggctggtgttttcggcctggccaatgtgctggcacacaaccccaccttgctggcggtggcgcgctggggcggcgtgattttcctgacctggtacggcctgcaggcattgcggcgcgcctgctcgcggcaaagtctggagcacagcgcagcggcgggcacacggtcacgtcgtaccgtgctgctcagtgcgctggccgttaccctgctcaacccgcatgtctatctggacaccgtgctgctgatcggctcgctcggggcgcaacagagcgtgccgggtgcctatgtcgcaggtgccgccagcgcttcgctgttatggttctcggccctcgccatcggcgcggcatggctcgccccctggctggcacgccctgctacatggcgcatgcttgacgtaatgatcgctgtaatgatgttcagcgtagcgttccagttgatccgttcagcctga

SEQ ID NO: 9364 - protein, 200 aa, Pseudomonas syringae pv. tomato str. DC3000
MWQSYFNGLLIAAGLIMAIGTQNAFVLAQGLRREHHVPVAMLCVVCDAILVAAGVFGLANVLAHNPTLLAVARWGGVIFLTWYGLQALRRACSRQSLEHSAAAGTRSRRTVLLSALAVTLLNPHVYLDTVLLIGSLGAQQSVPGAYVAGAASASLLWFSALAIGAAWLAPWLARPATWRMLDVMIAVMMFSVAFQLIRSA

SEQ ID NO: 9365 - DNA, 630 bp, Vibrio parahaemolyticus RIMD 2210633
  CDS (1)..(630): transl_table=11
gtgagcttttgggttttattgcaaggatttggtttaggggcatcgatgatcattccgatcggagcacaaaatgcgtatgtcttgaatcaaggcataaagcgcaatcaccacctgacgacagccactatttgtagcgtcctagatatgatcttcatttctctaggtatctttggtggtggtgctattctgtctcaaaatgaaatcctactgacatcggtgacgcttggtggtattgccttcctgagcttctatggactactttcgcttaaaagcgcattcaagccagagaatgaatcggaatcaaaaggggaagtcgtatctcgcggacgtcgaacggtcattttaggcgcattagctgtcaccgtgctcaacccacatttgtacttagataccgtcgttatcttaggctcaatcggtggacaatttgaaggccatgatcgaatcgctttcgcgttaggcactattatggcgtcatttgtttggttctataccttgtcgatgggcgccgcaaaactcgggcctacgctatctaaaccgaaagtgaaaaaaggcatcgatatcgccgttgcattgatgatgttcaccattgcttatgtactcgcgagtgagctcatcactaaatactggtaa

SEQ ID NO: 9366 - protein, 209 aa, Vibrio parahaemolyticus RIMD 2210633
MSFWVLLQGFGLGASMIIPIGAQNAYVLNQGIKRNHHLTTATICSVLDMIFISLGIFGGGAILSQNEILLTSVTLGGIAFLSFYGLLSLKSAFKPENESESKGEVVSRGRRTVILGALAVTVLNPHLYLDTVVILGSIGGQFEGHDRIAFALGTIMASFVWFYTLSMGAAKLGPTLSKPKVKKGIDIAVALMMFTIAYVLASELITKYW

SEQ ID NO: 9367 - DNA, 612 bp, Streptomyces avermitilis MA-4680
  CDS (1)..(612): transl_table=11
atgaccaacgccctgaccaccgccgccgccggattcggcaccggcctctccctcatcgtcgccatcggcgcccagaacgccttcgtcctgcgccagggcatccgccgcgacgccgtgctcgcggtggtggggatctgcgccctgtccgacgcgttgctcatcgcgctcggcgtcggcggtgtgggcgcggtcgtggtggcctggccccgggcgctgacggcggtcgcgctggtcggcggcgcgttcctgctggtctacggcgccctggcggcgcgccgggtgttccgtccggcgggcctgcgggcggagggcgcgccggagggctcccgcagacgcgccgtactcacctgcctggccctcacctggctcaacccgcacgtctacctcgacaccgtcttcctcctcggctcgatcgcggccgaccgcggctcactgcgctggaccttcggtctcggcgcggccctcgcgagcctgtgctggttcgccgccctcggcttcggctcacggctgctcggccgcttcctggcgcgcccgtcggcatggcgggtgctggacgccctggtggccgcgacgatgctcacgatgggcgccaccctgatcgccggcgtctga

SEQ ID NO: 9368 - protein, 203 aa, Streptomyces avermitilis MA-4680
MTNALTTAAAGFGTGLSLIVAIGAQNAFVLRQGIRRDAVLAVVGICALSDALLIALGVGGVGAVVVAWPRALTAVALVGGAFLLVYGALAARRVFRPAGLRAEGAPEGSRRRAVLTCLALTWLNPHVYLDTVFLLGSIAADRGSLRWTFGLGAALASLCWFAALGFGSRLLGRFLARPSAWRVLDALVAATMLTMGATLIAGV

SEQ ID NO: 9369 - DNA, 618 bp, Bacillus cereus ATCC 14579
  CDS (1)..(618): transl_table=11
atgatgagtgaagcaattattcatggtatcattcttgcatttggacttatcattccattaggtgtacaaaatgtttttgtctttaaccaaggtgcgagccaaccaaacatttggagggcagcccctgtagtattaactgcctctatatgtgatacgttactcatattgattgcagtgcaaggtgtctcccttgtactccttactttttcttggctaactaactcgttatatataattggatttttctttctcctatacatgggctttgttatttggagaagtaacccttccaacgatgtaaaacaagaaaaaagtatgcccttaaaaaagcaaatccttttcgcagcatccgtttcgttattaaatccacatgctattttagacacaatcggtgtaattggaacaaattctattcaatacataggaagtgaaaaatgggctttcacacttgcaactattatcgtttcttggatttggtttataagcttagcgttagcggggaaatttctaaaaagactagactcaaccggaaagacaattttattattaaataaattttctggtctcatcatatggggtgtcgcgctttatatgttaaaacaagttatttattcttaa

SEQ ID NO: 9370 - protein, 205 aa, Bacillus cereus ATCC 14579
MMSEAIIHGIILAFGLIIPLGVQNVFVFNQGASQPNIWRAAPVVLTASICDTLLILIAVQGVSLVLLTFSWLTNSLYIIGFFFLLYMGFVIWRSNPSNDVKQEKSMPLKKQILFAASVSLLNPHAILDTIGVIGTNSIQYIGSEKWAFTLATIIVSWIWFISLALAGKFLKRLDSTGKTILLLNKFSGLIIWGVALYMLKQVIYS

SEQ ID NO: 9371 - DNA, 636 bp, Bordetella bronchiseptica RB50
  CDS (1)..(636): transl_table=11
atgttcactttgtccgtacccgcctatgtcaccgcctgggccagtggcgccgccaccggcctggggctgtttgccgtcgtcggcgcgcaaagcgccttcatcctgcgccaggggctgatgcgcgcgcacctgctgagcatcctggccgtgtgcgccctgatcgacgctgtcttcatcttcggcagcgtctgggggctgcagacgctcacaggctggttcccctggctgacccaggccatcctgtggttcggcgtggccttcctggcctggtatgcgctgcaatccgcgcgccgcgcgctgcgctcggacggcgggctggaagtcgcccgccaggccattccctcgcgcggcgccgcgctgctgggcgcgatcggcttctccttgctcaatcctcacttctggctggacatgatggtggtggggtcgctggcgcacggcttcgccgatgcccggctggcgttcgccgccggcgcgctgaccgccagcgtggtctggctggcggtcctgggagtggggtcgcgcctgttcgcgccgctgttttccagcccgcgcgcctggcgcgtgctcgacggcctgatcgccgccgtcatggccctgctggcggctcgcctggccttgggcgggctggccggctag

SEQ ID NO: 9372 - protein, 211 aa, Bordetella bronchiseptica RB50
MFTLSVPAYVTAWASGAATGLGLFAVVGAQSAFILRQGLMRAHLLSILAVCALIDAVFIFGSVWGLQTLTGWFPWLTQAILWFGVAFLAWYALQSARRALRSDGGLEVARQAIPSRGAALLGAIGFSLLNPHFWLDMMVVGSLAHGFADARLAFAAGALTASVVWLAVLGVGSRLFAPLFSSPRAWRVLDGLIAAVMALLAARLALGGLAG

SEQ ID NO: 9373 - DNA, 636 bp, Chromobacterium violaceum ATCC 12472
  CDS (1)..(636): transl_table=11
atgttcaatttcagtgttttcctttccgcgctgggcatctccttcagccagatcgtcggcatcggcccgcagaacgcttatgtgctgcggcagggcataggacgcagccacgtgctgcccatcgtcgccatctgcatcgtcgccgacgtgttgctgatcgccgccggcgtgttgggggtgggcaaagttgtggccggcattcccggcttcatcagcgtggtcacctgggccggcgcggctttcatcctgtggctggggttcaagtccttccgctcggcgctgaacgccggtggcatgacgctggagggcggcgtggagcgcgaccgcaagagcgccatccgcaccatcctggtggtgaccctgctcaatccctacgtttggctggacaccgtggtgctgatcggcagcgtgtcctcggtgtacggcgaacacggttcgctgtctttcctgatgggcagtctgagcgcttccgtgctgtggttcggcgccatcggcctgttcgccggcaagctggcgccgctgttcaccaagcctgcgagctggcgggtgctggactgcgtgatcggcttcgtgatgctgttcaccgcctccatgctggtctacaactacgggctatccgcgccgctgccgctgtaa

SEQ ID NO: 9374 - protein, 211 aa, Chromobacterium violaceum ATCC 12472
MFNFSVFLSALGISFSQIVGIGPQNAYVLRQGIGRSHVLPIVAICIVADVLLIAAGVLGVGKVVAGIPGFISVVTWAGAAFILWLGFKSFRSALNAGGMTLEGGVERDRKSAIRTILVVTLLNPYVWLDTVVLIGSVSSVYGEHGSLSFLMGSLSASVLWFGAIGLFAGKLAPLFTKPASWRVLDCVIGFVMLFTASMLVYNYGLSAPLPL

SEQ ID NO: 9375 - DNA, 621 bp, Vibrio vulnificus YJ016
  CDS (1)..(621): transl_table=11
gtgaatttttgggtgttactacaaggctttggtttaggtgccaccatgattattcccattggggcacaaaatgccttcgttctcaatcagggcattaaacgtaaccaccatttaacgactgcagctgtttgcagtgtcttagatatggtgtttatttctctgggtatttttggcggtggtgctattctctcgcaaaatgaactgctgcttaccgtggtgacattaggcggtattgcctttctcagtgtttacggtttgatgtcgctcaaaagcgcctttaaacccatcgagcaagttgagaagcatcatgaagtgattgctcgtggacgcagaacggtcattttgggtgccttggctgttacggtattaaatccacatctgtatttggatacggttgtgattttaggctcgattggcggccaatttgaaggtcacgatcgcattgcctttgcgattggaacaacactggcatcgttcacttggttctacgcactctccatgggtgccgcaaaactagggccaaaattatcaaagcccaaagtgaagagagggatagacatcgcggtggcggctatgatgtttaccatcgctgcgcttcttactaagtctcttttggcttaa

SEQ ID NO: 9376 - protein, 206 aa, Vibrio vulnificus YJ016
MNFWVLLQGFGLGATMIIPIGAQNAFVLNQGIKRNHHLTTAAVCSVLDMVFISLGIFGGGAILSQNELLLTVVTLGGIAFLSVYGLMSLKSAFKPIEQVEKHHEVIARGRRTVILGALAVTVLNPHLYLDTVVILGSIGGQFEGHDRIAFAIGTTLASFTWFYALSMGAAKLGPKLSKPKVKRGIDIAVAAMMFTIAALLTKSLLA

SEQ ID NO: 9377 - DNA, 639 bp, Geobacter sulfurreducens PCA
  CDS (1)..(639): transl_table=11
atgccgagccagcttgccattgcgccgtttctgagcggcttcggcctcggggccggactgatcatcgccatcgggagccagaatgcctttgtgctgcgccaggggctcaagcgggagcacgtcttcacggtgtgcacggtctgcttcctctgcgacgcggtgctgatcgggctgggggcggggggcttcggcacgctggtggggtcgtcgccgcggctcatggggctcaccctgtggggcggggcggcctttctctttgcctacgggctccgctcgttccacgcggccctgcggccggggaagctggaggcggccgacgacggcggcagcctggacgggcttgccaaggtggtcctgaccaccctggccctgagcctcctcaatccccatgtctacctggatacggtcctgctgctggggagcctggcggggcagttcgcgggacggtcccggctcctcttcgccctgggggccatgggagcttcgttggcctggttctacgggatcggttacggggccagggtgctgacgccgctcttccgcaagcccgcggcctggcgggcgctggaccttgtggtgggctgcaccatgtgggggattgcggcgaacctgatctggtctgatctgacaggaggatga

SEQ ID NO: 9378 - protein, 212 aa, Geobacter sulfurreducens PCA
MPSQLAIAPFLSGFGLGAGLIIAIGSQNAFVLRQGLKREHVFTVCTVCFLCDAVLIGLGAGGFGTLVGSSPRLMGLTLWGGAAFLFAYGLRSFHAALRPGKLEAADDGGSLDGLAKVVLTTLALSLLNPHVYLDTVLLLGSLAGQFAGRSRLLFALGAMGASLAWFYGIGYGARVLTPLFRKPAAWRALDLVVGCTMWGIAANLIWSDLTGG

SEQ ID NO: 9379 - DNA, 621 bp, Desulfovibrio vulgaris subsp. vulgaris str. Hildenborough
  CDS (1)..(621): transl_table=11
atgtacatatcaccctacctgcaagggctcggcatgggagcgagcctcatcatggccataggcgcacagaacgccttcgtcctctcccagagcatccggcgcaaccaccacatgtcggtcgccgccatctgcatcgtctgcgactgcctgctcatatccatcggcgtactgggcatgggggcggtgttcaccgccaacccgctgctgcgggccatcgccacatggggcggggcggcatttcttctctggttcggcttcaacgccttccgttcggccttgcgcggcggttcactcgacgcccacgaggaacgcagtctgccgttgagggccgcagtcgtcagcgcgctggccgtctcgctgctcaacccccatgcatacctcgacaccgtcgtccttctgggcggcatcagcaccacattcgagggtgacgggcgctatctcttcggtgcgggtgccgtcaccgcatccatcctgtggttctgcacgttgagcctcggcgggcgggccatggcgccggtctttcgcaacgcctcggcatggcgcgtactcgatggcctcgtctgcctcatggtgtggggtatcgcggcgggtctcgtacgacaggccgtgctgggcagttag

SEQ ID NO: 9380 - protein, 206 aa, Desulfovibrio vulgaris subsp. vulgaris str. Hildenborough
MYISPYLQGLGMGASLIMAIGAQNAFVLSQSIRRNHHMSVAAICIVCDCLLISIGVLGMGAVFTANPLLRAIATWGGAAFLLWFGFNAFRSALRGGSLDAHEERSLPLRAAVVSALAVSLLNPHAYLDTVVLLGGISTTFEGDGRYLFGAGAVTASILWFCTLSLGGRAMAPVFRNASAWRVLDGLVCLMVWGIAAGLVRQAVLGS

SEQ ID NO: 9381 - DNA, 618 bp, Staphylococcus aureus subsp. aureus MRSA252
  CDS (1)..(618): transl_table=11
ttgatacaaccagttttacacggtattttattagcattggggcttattttgcccctaggagcgcaaaacgtgtttgtatttaatcaaggtgctaatcaaaaaaaaatgataaacgcattgccggttgttataacggctggattatgtgacacttttttaataataattgctgtactgggtgtttcactaatattaatgtcattaccagttctacaattatttatttatatagttggtttgttttttctattgtacatggcttggtctttatggaaagaaaagcctaacactctagagaactatgaaccgatgagtacaaaaaagcaaataggttttgctatatctgtttcgttgttaaatccacatgcaattatggatacagttggtgtaattggatcaagcgcatctgtctattctggtttagaaaagatacttttttgtattgccacaattatggtttcttggctatggttttttctgttagcaatattaggtaaggttttaggttctatagatagaacaggtaaatatatattatttttaaataaaatctctagtataataataattgctgttagtattgttattgtaaaaaatatattaaagttaattttataa

SEQ ID NO: 9382 - protein, 205 aa, Staphylococcus aureus subsp. aureus MRSA252
MIQPVLHGILLALGLILPLGAQNVFVFNQGANQKKMINALPVVITAGLCDTFLIIIAVLGVSLILMSLPVLQLFIYIVGLFFLLYMAWSLWKEKPNTLENYEPMSTKKQIGFAISVSLLNPHAIMDTVGVIGSSASVYSGLEKILFCIATIMVSWLWFFLLAILGKVLGSIDRTGKYILFLNKISSIIIIAVSIVIVKNILKLIL

SEQ ID NO: 9383 - DNA, 663 bp, Acinetobacter sp. ADP1
  CDS (1)..(663): transl_table=11
ttgatattgccctctacgctcatcttgatccatgcgcatatctcctcagccatatatggacactttaatatgactgcttttctctatggattaggcattggattttctttaattctggcaattggtgcccaaaatgcatttgtattaaaacaagggctaaaacgccaacatgtattttgggtgtgtctggtttgtgcattgtccgattctgtattgatttatttaggagtaataggtttctctcaaatcattgtcagttttcctatgattgtgatcttagcaaaatattttggtgcactatttttgttgctttatggcgccaaacatttttatgcagcgttacagtcatcggcattgtatccgagcgaactggaaaacgactctctttatacaattattgggctatgtctggcatttacatggcttaatccacatgtctatcttgatacggtcattctagtcggttcactgtctgttcaattttcacaacaacgcgatctatttgcagcgggatgtatgctggcttcatggttattcttttttgcactgggttacggcgcgcgcatgttgctacctatttttaaaagcacacgttcatggaaaatactcgatatgattatcggcttgatgatgtggacaattgcactcacattgatcatttaa

SEQ ID NO: 9384 - protein, 220 aa, Acinetobacter sp. ADP1
MILPSTLILIHAHISSAIYGHFNMTAFLYGLGIGFSLILAIGAQNAFVLKQGLKRQHVFWVCLVCALSDSVLIYLGVIGFSQIIVSFPMIVILAKYFGALFLLLYGAKHFYAALQSSALYPSELENDSLYTIIGLCLAFTWLNPHVYLDTVILVGSLSVQFSQQRDLFAAGCMLASWLFFFALGYGARMLLPIFKSTRSWKILDMIIGLMMWTIALTLII

SEQ ID NO: 9385 - DNA, 612 bp, Desulfotalea psychrophila LSv54
  CDS (1)..(612): transl_table=11
atgttaagtagtttttttttgcaggggatgatggtgggagcaagtcttattgtcgccattggcgcccagaatgcctttgtcctctcctgtggtatccgtaaacagcatcaatatgctgtggcggcgacctgtgctttgtgtgatacagttttaatttttcttggggcaatgacgacggggaaggttgtggggatgaatccgggcttacagacgattgccgcctgggcgggagcaatatttttactctgctatggttgtcgtgccctctattcagccataaattcttcggctgttcttcgggcggagaaaaaacaatgcacaggtctacgctcaatcgtcctgctcacccttagtatcactctgcttaaccctcatgtctaccttgatacagtcctcttgcttggaagtattgcagggcaacatggcgaagatggtaagtatgtcttcgcccttggagcggcgaccttctcttggttgtggttttttgctttggtgcttggcggcaataaacttgccaggttttttaaaaatcccacagcctggcgggttttggacgctcttgtctgtttaaccatgtgggctattgcctggcatcttattgccggtcagtaa

SEQ ID NO: 9386 - protein, 203 aa, Desulfotalea psychrophila LSv54
MLSSFFLQGMMVGASLIVAIGAQNAFVLSCGIRKQHQYAVAATCALCDTVLIFLGAMTTGKVVGMNPGLQTIAAWAGAIFLLCYGCRALYSAINSSAVLRAEKKQCTGLRSIVLLTLSITLLNPHVYLDTVLLLGSIAGQHGEDGKYVFALGAATFSWLWFFALVLGGNKLARFFKNPTAWRVLDALVCLTMWAIAWHLIAGQ

SEQ ID NO: 9387 - DNA, 690 bp, Symbiobacterium thermophilum IAM 14863
  CDS (1)..(690): transl_table=11
ttgggcacggcgcttttgcacggactggtgctttccttcgggctgatccttccgctgggcgcccagaacacgtttgtgctcacacagggcgcgctgcaccgccgctggacgggggcgctgccctccgtgctgaccgcggccgtcagcgacacgctgctcatcacgctcgcggtctcgggcctctcgctggtgctgctcacggttccctggctccagatggccctgcagtggtgcggcgtcctcttcctcctctacatgggctggtccacgtggcgcgctgcggccgccgtcgaccgggactcgggcgggacccccggcacggcccggggggcggccccgggcggcgggccgtccggcccggccggtgacgcggcgccggacgaggcgtggcccgcccggcggcaggtggcctttgccgcgtcggtctcgctgctcaacccgcacgccatcctcgacacggtggcggtgatcgggaccggcgcgctggcgtacaccggcacagcccgcctggcgttttcgctggcctgcatcgcggtgtcctgggtctggttcttcggcctctcgctggccggccacctgatgggcgtgctggcggcgggggccaacctgcagcgctggctgatccgggcttccgcggtgatcatgtggggggtggccctgcagctcctgcggtcgctgctccttacctga

SEQ ID NO: 9388 - protein, 229 aa, Symbiobacterium thermophilum IAM 14863
MGTALLHGLVLSFGLILPLGAQNTFVLTQGALHRRWTGALPSVLTAAVSDTLLITLAVSGLSLVLLTVPWLQMALQWCGVLFLLYMGWSTWRAAAAVDRDSGGTPGTARGAAPGGGPSGPAGDAAPDEAWPARRQVAFAASVSLLNPHAILDTVAVIGTGALAYTGTARLAFSLACIAVSWVWFFGLSLAGHLMGVLAAGANLQRWLIRASAVIMWGVALQLLRSLLLT

SEQ ID NO: 9389 - DNA, 627 bp, Mannheimia succiniciproducens MBEL55E
  CDS (1)..(627): transl_table=11
atggaaacctttatccacggctttttagtttgcggcggattaattattgccattggcgcacaaaatgcctttgtattaaaacagggattactaaaaaatcatattttagccgtgattctcacctgttttatctgcgatatcgtattgatttctcttggtgttttaggcttaggcagtttaatcagcgaaagtcgggaggcaacggtggcgctgggcattgtcggcgccttatttttaacggtttacggcgcaagagcgtttcgctcggcttacttaggcaattccagcttagaaatacaaagccaacgtcaagataatacatcgtccgcctggaaggcggtactggctacccttgccatcaccttactgaatccgcatgtttatttggattgctttgcaattatcggcggtatcgcaggtacattgacaccggatcagaaaatcctgtttttatgcggcgcactttgcacgtcatttttatggtttttcagtttaggctacggcgccagactgctcattccattattcaaacgcccgattacctggcgcattttagattttgtaatcggaagtgtgatgtggttaatcgccttcggtttagccaaatacgcctatcaattggcttaa

SEQ ID NO: 9390 - protein, 208 aa, Mannheimia succiniciproducens MBEL55E
METFIHGFLVCGGLIIAIGAQNAFVLKQGLLKNHILAVILTCFICDIVLISLGVLGLGSLISESREATVALGIVGALFLTVYGARAFRSAYLGNSSLEIQSQRQDNTSSAWKAVLATLAITLLNPHVYLDCFAIIGGIAGTLTPDQKILFLCGALCTSFLWFFSLGYGARLLIPLFKRPITWRILDFVIGSVMWLIAFGLAKYAYQLA

SEQ ID NO: 9391 - DNA, 606 bp, Legionella pneumophila subsp. pneumophila str. Philadelphia 1
  CDS (1)..(606): transl_table=11
atgttgatttattttaatggattactcttgggattatcattgataatggccttaggtccgcaaaatgtttttcttatcaggcaaggtgcgcgaaaaaatcatgcggctctctctgccgtcatttgctttttctgcgatgtcattttggtgtgcggcagtgtcgctggattacatcaattgcttttggctcatccaaacttgcaaatctggatggtatggctaggctctgcctttttaatttattatgcaataaaaaacttaaaaagcgcgttgtccaaaaacaaacaaaccgttgtagaaacacatcagcctcatacaagaatgcaaatcattttatttgccctggggtttagtctgcttaatcctcacgccattatagataccctggtgattgtgggcagcggcagcagtcaatatcctgaccataaactggcttttttagcaggggtaatttctgccagcatgatttggttcagttcattaacgatgactactcgttatttttcaaacctattaacccaaaataaagtatggcaaaaaatagagttacttagtggtattttaatggcttatattgcgatgaaattaatcacaagcagcttatag

SEQ ID NO: 9392 - protein, 201 aa, Legionella pneumophila subsp. pneumophila str. Philadelphia 1
MLIYFNGLLLGLSLIMALGPQNVFLIRQGARKNHAALSAVICFFCDVILVCGSVAGLHQLLLAHPNLQIWMVWLGSAFLIYYAIKNLKSALSKNKQTVVETHQPHTRMQIILFALGFSLLNPHAIIDTLVIVGSGSSQYPDHKLAFLAGVISASMIWFSSLTMTTRYFSNLLTQNKVWQKIELLSGILMAYIAMKLITSSL

SEQ ID NO: 9393 - DNA, 612 bp, Silicibacter pomeroyi DSS-3
  CDS (1)..(612): transl_table=11
atgtcctctgccattgtcgccggctttgcccttggtttcggcctgatccttgccatcggggcgcagaatgcctttgtcctgcggcaggggcttcggcgtcagcatgtctttgccgtctgcctgacctgcgcgctgtcggatgcggtgctgatcgccgccggagtggcggggtttggcgggctggcccgggccgtgccctggttcgagccgctgatgcgttatggcggggcggccttcctgatctggtacggcgcgcgcagcctgtttgcggcgctgaccaagaccgaggcgttgacgaccggcgaggacgcccgcccgggcggaggagccgccctgcgcccggtgctgctgacagtgctggccttcacctggctcaacccgcatgtctacctcgataccgtggtgctgatcggctcgatctcggcgcaataccccgaccggctcggctttggcctcggcgctgttctgtccagtttcaccttcttcttctcgctgggttacggcgcgcgcctgatggcgccggtctttgcccggccccgcgcctggcaggtgctcgacacggtgatcgccctgaccatgtggaccatcgcggccaagctgctgctgatgtga

SEQ ID NO: 9394 - protein, 203 aa, Silicibacter pomeroyi DSS-3
MSSAIVAGFALGFGLILAIGAQNAFVLRQGLRRQHVFAVCLTCALSDAVLIAAGVAGFGGLARAVPWFEPLMRYGGAAFLIWYGARSLFAALTKTEALTTGEDARPGGGAALRPVLLTVLAFTWLNPHVYLDTVVLIGSISAQYPDRLGFGLGAVLSSFTFFFSLGYGARLMAPVFARPRAWQVLDTVIALTMWTIAAKLLLM

SEQ ID NO: 9395 - DNA, 603 bp, Pseudomonas syringae pv. syringae B728a
  CDS (1)..(603): transl_table=11
atgtggcaaagctacttcaacggattgctgatcgccgctggcctgatcatggccattggctcgcagaacgcattcgtactggctcaggggctgcgccgtgaacaccacgtgtcagtcgcgatgctctgcattatctgcgatgccattctggtcgccgccggggtgttcggtctggccaatgtgctggcgcaaaacccgaccctgctggcggtggcgcgctggggcggtgtgctattcctcagttggtatggcgtgcaggcactgcgccgggcctgctcgaagcagagcctcgaacacggtgccgcggctggcaaaagatcgcgccgcacggtactgctcagcgcattggccgtgacgttgctcaacccgcatgtgtacctggacaccgtactactgatcggctcgctcggggcacaacagagtgtgccgggcgcctatgtagcaggcgccgcgagcgcttcgttgctgtggttttcctgcctcgccatcggcgcggcctggctcgctccctggctggcccgccctgccacatggcgtctgctggatgtgatggtggcggtcatgatgttcagtgtggcgtggcaattgatccgttcggcctga

SEQ ID NO: 9396 - protein, 200 aa, Pseudomonas syringae pv. syringae B728a
MWQSYFNGLLIAAGLIMAIGSQNAFVLAQGLRREHHVSVAMLCIICDAILVAAGVFGLANVLAQNPTLLAVARWGGVLFLSWYGVQALRRACSKQSLEHGAAAGKRSRRTVLLSALAVTLLNPHVYLDTVLLIGSLGAQQSVPGAYVAGAASASLLWFSCLAIGAAWLAPWLARPATWRLLDVMVAVMMFSVAWQLIRSA

SEQ ID NO: 9397 - DNA, 621 bp, Colwellia psychrerythraea 34H
  CDS (1)..(621): transl_table=11
atgagcttattagttttagcaaaaggttttaccctaacattaagtatgatcatacctattggtacgcaaaactctatgttaatcaatcagggcattcatcaaaatcatcataaaatgaccgccgctctttttgttctttacgatgctttattaataagtatgggcgtacttggcggtagcattttactgtcacataacgccactttattcaatgtactcacttggggtggtatcttgtttttaagtgtttatggcctattgtcgatgaaatctgcatttgtgcgaagtaagaatactgctgatactattttgaaaaagaaatcagcaaaaattatttttctgacaaccttggccgttacttttttaaatccacatgcttacattgacaccgtaatggttattggcagtgttggcgggcaatactcagatgaggtaaaagtgtatttccttattggttgtatttttggttcgttaacttggtttagctgtttagcatttggcgcagccaaactttcaaaacaattaagcaaaccaaaagtaaaaatgacgatagatataattattgctttagtaatgtggttaattgcttggtcgctgtttactacatggatggccagataa

SEQ ID NO: 9398 - protein, 206 aa, Colwellia psychrerythraea 34H
MSLLVLAKGFTLTLSMIIPIGTQNSMLINQGIHQNHHKMTAALFVLYDALLISMGVLGGSILLSHNATLFNVLTWGGILFLSVYGLLSMKSAFVRSKNTADTILKKKSAKIIFLTTLAVTFLNPHAYIDTVMVIGSVGGQYSDEVKVYFLIGCIFGSLTWFSCLAFGAAKLSKQLSKPKVKMTIDIIIALVMWLIAWSLFTTWMAR

SEQ ID NO: 9399 - DNA, 651 bp, Ralstonia eutropha JMP134
  CDS (1)..(651): transl_table=11
atgaactccctgcctgacaccgcttccctcgccctgtccattgccctgcagggtcttgccctgagtcttgggctgatcgttgccatcggcgcgcagaacgctttcgtgttgcgccagggtttgcgtcgccagcatgtgggcagcgtggtgctgttctgcgccgcggccgatgccttgttgattgccgctggcgtcatgggcatggcgcaggccctgggcgaccggcccgggctggcgcgtgccctcgccgtggccggttctgtcttcctggcgatatatggctggcaggcattgcagcgcgcgcggcagtcgcatcaattgaaagctgcggacggtgtggacgggctcggccggggcgctgtactggcgcaggcggcggccttcacgctgcttaatccccatgtctacctcgatacggtgctgctggtcggcagcattggtgcccagcaacctgcggcgctgcgcggctggttcgtggccggcgcaagcgccgccagcctgttctggttcggacttctgggatttggcgcgcggtggctggcgccctggttcgcgcggcccaaagcctggcgagtgctcgacggcgtcatcgccatgaccatgttcgtactgtccgccttgctggtgcgtcacgtattcaacgcagtgtga

SEQ ID NO: 9400 - protein, 216 aa, Ralstonia eutropha JMP134
MNSLPDTASLALSIALQGLALSLGLIVAIGAQNAFVLRQGLRRQHVGSVVLFCAAADALLIAAGVMGMAQALGDRPGLARALAVAGSVFLAIYGWQALQRARQSHQLKAADGVDGLGRGAVLAQAAAFTLLNPHVYLDTVLLVGSIGAQQPAALRGWFVAGASAASLFWFGLLGFGARWLAPWFARPKAWRVLDGVIAMTMFVLSALLVRHVFNAV

SEQ ID NO: 9401 - DNA, 603 bp, Pseudomonas fluorescens PfO-1
  CDS (1)..(603): transl_table=11
atgtggcaaagctataccaacggtttgttggtggcgttcgggctgatcatggcgatcggtacccagaatgcctttgtcctggcgcagagcctgcggcgtgaacatcacctgccggtcgctgcattgtgcgtcgcctgcgatgcgctgctggtggcggcaggtgtgttcggtctggccacggtgctggcgcagaacccgaccttgctggcggttgcccgctggggcggcgcggtgttcctgatctggtacggcagccaggcgctgcgccgggcctgttcgaaacagagcctgcaacagggtgaaaaccagaccgtacgttcgctgcgggcggtgatgctcagcgctctggcggtgaccctgctcaacccgcacgtctatctcgacaccgttttgctgatcggctccctcggtgcgcagcagtcggtgcccggcgcttatgtggtcggcgcggcgagtgcttcgctgctgtggttcttcactctggcgttcggcgcggcatggctcgcgccgtggctggcacggccgagtacctggcggattctggatctgttggtggcggtgatgatgttcacggtagcgggtcagctcattctggcttcgtga

SEQ ID NO: 9402 - protein, 200 aa, Pseudomonas fluorescens PfO-1
MWQSYTNGLLVAFGLIMAIGTQNAFVLAQSLRREHHLPVAALCVACDALLVAAGVFGLATVLAQNPTLLAVARWGGAVFLIWYGSQALRRACSKQSLQQGENQTVRSLRAVMLSALAVTLLNPHVYLDTVLLIGSLGAQQSVPGAYVVGAASASLLWFFTLAFGAAWLAPWLARPSTWRILDLLVAVMMFTVAGQLILAS

SEQ ID NO: 9403 - DNA, 645 bp, Burkholderia sp. 383
  CDS (1)..(645): transl_table=11
gtgctcgacacctctgccttcatcgaaggcctgctgcttggcgccggactgttcacgtccgtcggccccaaggacgcattcgtcatcaagcgctcgatctcgagcccccatctgctttccattgccctcgtctgcgcaggcagcgacgcgttgctgatcgcgctcggcgcgcacgggttgtcgtcgctgctatcgcgacatcccggcgtggtgtcggccgcgctgtgggccggcatcgcgtatctcgccggctatggcctgctcgcgctgcgttcggcgatccgacggcgacagcctgagcacgtcgacggtccgcgcacgggcagcgaacccacgcgtgcgcgcacggtgctcgcgactgccgccgtctcgttgctcaatccgtatgcgtggatcgacaccgtgctgctgctcggcaccgtgatcgtgagccacacgcccgccgcacgtgcgccgtttgcgtttggcgcgatgacggcttcgctcgcgtggttcctgatgctcgcctatggcgcgcgtgcgtgccgcgcatggttcgcccgtacgctcgcatggcgcgtgctcgatttcttcgtcgcggcgatgatgctcggcttcgcggtgcgtttcgcgatcgacgcgcttcaggcgtcagcggctcgataa

SEQ ID NO: 9404 - protein, 214 aa, Burkholderia sp. 383
MLDTSAFIEGLLLGAGLFTSVGPKDAFVIKRSISSPHLLSIALVCAGSDALLIALGAHGLSSLLSRHPGVVSAALWAGIAYLAGYGLLALRSAIRRRQPEHVDGPRTGSEPTRARTVLATAAVSLLNPYAWIDTVLLLGTVIVSHTPAARAPFAFGAMTASLAWFLMLAYGARACRAWFARTLAWRVLDFFVAAMMLGFAVRFAIDALQASAAR

SEQ ID NO: 9405 - DNA, 621 bp, Burkholderia sp. 383
  CDS (1)..(621): transl_table=11
atgaactggctcgctttttcccacggcgccgcactctgcggttcacttatcgtcaccatcggcgcgcagaacgcattcgtgctgcggcagggcatcatgcgctcgcacgtcggcaagatcgtgctgctgtgcgcgctgtccgacatgatcctgatcggcgcgggcgtcggcggcgcatcggtgctcgtcgaacgctatccgacctttgtccacgcggtgctgtacgtcggcctcgcgtatctcgcgtggttcggcatcaacgcgctgcgccgcgcgttcaagccgggccacgaaacgctcgacgtgcgcggcgacgcggttgcgccgccgccgcagagcggcctggctatcgtgctgatgacgctcgcgttcacgtggctcaacccgcacgtgtatctcgacacgttcctgctgatcggcacggccggcgcacgcgagccggaaggcgcgcggctcgcgttcgcgatcggcgcgatgtcggtcagcctcgtgtggttcctcgggctcggctacggtgcgcgactgctcgcgccgtggttccgcaaagcggtggcgtggcgcgtgctcgatggtgcgatcggcagcatggtgctgtttctcgcggccgtgcagttgcgctga

SEQ ID NO: 9406 - protein, 206 aa, Burkholderia sp. 383
MNWLAFSHGAALCGSLIVTIGAQNAFVLRQGIMRSHVGKIVLLCALSDMILIGAGVGGASVLVERYPTFVHAVLYVGLAYLAWFGINALRRAFKPGHETLDVRGDAVAPPPQSGLAIVLMTLAFTWLNPHVYLDTFLLIGTAGAREPEGARLAFAIGAMSVSLVWFLGLGYGARLLAPWFRKAVAWRVLDGAIGSMVLFLAAVQLR

SEQ ID NO: 9407 - DNA, 612 bp, Rhodospirillum rubrum ATCC 11170
  CDS (1)..(612): transl_table=11
atgagcgtttcggttttcttcgcgggcctgaccatgggtctgagcctgatcgtggccatcggggcgcagaacgccttcgttttgcgccaaggcctgcgcaacgagcatgtcctggccatctcgctgacctgcgccctgtcggacgccctcctcatcaccctgggcgtggccggctttggcaagatgatggctttggcgccctggcttgatccgctgctgcgctatggcggggcggccttcctgatctggtatggcgcgatcagcctgcgctcggccctgcgctcctccgccgcgctcgccgtcggcccggcggcggagaaggccggcctgaaggcgacgctgctgacctgcctcgccctgacttggctgaacccccatgtttatctggatacggtgatgttgctgggatcgatctcgacccagttccccgatcgccagggctcgttcgccgccggcgccatggcggcgtcgttccttttctttttcgcgctcggctatggctcgtcctggctcaagccgcttttcgccaagccctcggcctggcggagcctggaagcgatcatcgccctggtcatgtggacgatcgctctcaagctccttgtcggctcatga

SEQ ID NO: 9408 - protein, 203 aa, Rhodospirillum rubrum ATCC 11170
MSVSVFFAGLTMGLSLIVAIGAQNAFVLRQGLRNEHVLAISLTCALSDALLITLGVAGFGKMMALAPWLDPLLRYGGAAFLIWYGAISLRSALRSSAALAVGPAAEKAGLKATLLTCLALTWLNPHVYLDTVMLLGSISTQFPDRQGSFAAGAMAASFLFFFALGYGSSWLKPLFAKPSAWRSLEAIIALVMWTIALKLLVGS

SEQ ID NO: 9409 - DNA, 621 bp, Burkholderia thailandensis E264
  CDS (1)..(621): transl_table=11
atgaactggatcgctttttctcacggcgcgatgctgtgcgcgtcgctcatcgtcaccatcggcgcgcaaaacgcgttcatcctccggcaagggatcatgcgctcgcacgtcggcaagatcgtgctgctctgcacgctgtcggacatgctgctgatcggcgcgggcgtgggcggcgcatcggtgctcgtcgaacgctatccgaccttcgttcacgcggtgctgtacgtcggcctcgcgtatctcgcgtggttcggcctgagcgcgctgcgccgcgcgttcaagcccggacacgaaacgctcgatgcaacaggcgcggccgtcgcgccgcccgcgcagcgcgcatggccgatcgtgctgatgacgctcgcattcacatggctcaacccgcacgtctatctggacacgttcctgctgatcggcacggccggcgcgcgcgagccggccggcgcgcgcagcgcgttcgcgctcggcgcgatggcggtcagcgcggtgtggttcgtcgcgctcggttacggcgcgcgattgctcgcgccgtggttcaagcgcgcgctcgcttggcgcgtgctcgacggcgcgatcggcggcatggtgctgtttctcgcggcggtgcagttgcggtga

SEQ ID NO: 9410 - protein, 206 aa, Burkholderia thailandensis E264
MNWIAFSHGAMLCASLIVTIGAQNAFILRQGIMRSHVGKIVLLCTLSDMLLIGAGVGGASVLVERYPTFVHAVLYVGLAYLAWFGLSALRRAFKPGHETLDATGAAVAPPAQRAWPIVLMTLAFTWLNPHVYLDTFLLIGTAGAREPAGARSAFALGAMAVSAVWFVALGYGARLLAPWFKRALAWRVLDGAIGGMVLFLAAVQLR

SEQ ID NO: 9411 - DNA, 618 bp, Burkholderia xenovorans LB400
  CDS (1)..(618): transl_table=11
atgaactggctgtctttttcgcacggcgccgccctgtgcgcatccctgatcgtcaccatcggcgcgcaaaacgctttcgtgctgcggcaaggcatcatgcgctcgcacgtcggcaagatcgtcgcactgtgcgcgctgtctgacttcattctgatcggtgcgggcgtcggcggcgcctcggtactggtcgagcgctatcccgtgttcgtgcacgccatgctgtatgtcgggctcgcgtatctggcctggttcgggatcaacgcgctgcgccgcgcggtgcggccgcaacacgcggtgctggaaagcgagggcggcggcgcggcgcccgtgcagcgcgccgtaccgatcattctgatgacgctcgccttcacgtggctcaatccgcatgtgtatctcgacacgttcctgctgatcggcacggccggcgcgcgcgaacccgaaggcgcgcgggttgccttcgcactgggcgcgatggcggtcagcggcatctggttcatcggcctgggttatggcgcgcgcgccctcgcgccgctcttcaggcgggcgacggcatggcgcgtgctggatggcgcaatcggcagcatggtgttgctgctcgcggtaacgcagttgcggtga

SEQ ID NO: 9412 - protein, 205 aa, Burkholderia xenovorans LB400
MNWLSFSHGAALCASLIVTIGAQNAFVLRQGIMRSHVGKIVALCALSDFILIGAGVGGASVLVERYPVFVHAMLYVGLAYLAWFGINALRRAVRPQHAVLESEGGGAAPVQRAVPIILMTLAFTWLNPHVYLDTFLLIGTAGAREPEGARVAFALGAMAVSGIWFIGLGYGARALAPLFRRATAWRVLDGAIGSMVLLLAVTQLR

SEQ ID NO: 9413 - DNA, 651 bp, Ralstonia metallidurans CH34
  CDS (1)..(651): transl_table=11
atgatcaccgccctccccgccccatctcccgctttttccgtttcgctgcaaggcatggccttgagcttcggactgatcgtcgccatcggcgcgcagaatgccttcgtcctgcgccaagggttgcgacgcgagcacgtgggcagcgtggtgctgttctgcgcagtggcagacgccttgttgatcacggcgggcgtcatgggcatggcccaggcccttggcgaaagccccggccttgcccgcgcgttagcggcagtcggcgccatcttcctggcgatatatgggtggcgggctctgcggcgcgcccgggaatcgcaccagctaagcacccgcaccagcggcgaaggcctcggccgaagcgccgcgctggctcaggcggcagccttcacgctgctcaacccgcacgtctatctggatacggtgctgctggttggcagcatcggcgcccagcaaccggcggcactacgcggctggttcgtggcgggcgcaagctccgccagcgtgctctggttcggactgctgggattcggcgcccgctggctggcgccgtggttcgcccgccccaaagcctggcaggcgctggatgccctgattgggataacgatgctggcgttgtcgttgatgctggtgtggcgagtggttggcaatttctga

SEQ ID NO: 9414 - protein, 216 aa, Ralstonia metallidurans CH34
MITALPAPSPAFSVSLQGMALSFGLIVAIGAQNAFVLRQGLRREHVGSVVLFCAVADALLITAGVMGMAQALGESPGLARALAAVGAIFLAIYGWRALRRARESHQLSTRTSGEGLGRSAALAQAAAFTLLNPHVYLDTVLLVGSIGAQQPAALRGWFVAGASSASVLWFGLLGFGARWLAPWFARPKAWQALDALIGITMLALSLMLVWRVVGNF

SEQ ID NO: 9415 - DNA, 630 bp, Silicibacter sp. TM1040
  CDS (1)..(630): transl_table=11
atgcagcccctcccgatgaccccagacatgctgccaattctgatggcaggctttggccttggcttcagcctcatccttgcgattggcgcgcagaacgcttttgtgctgcggcaggggatacgcggccagcatgtcttgccaatcgtgctgacctgcgctctgtcggatgcgctgctgatcacggcgggggttgcgggctttgggacgctgacctctgcgttgccgtggttcgagcccgtgatgcgcatcggcggcgcgctgttcctgaccggctacgggctgcggtcgctgcgctcggcgtggacgggcggggctgcgctttcgaccgaggggcagggggttcagaccgcgctctggccagcggttctgacctgcctcgccttcacctggctcaatccgcatgtctatctcgacacggttgtgctgctgggcgcgatctcggcgcaatatacgccggcctgggtctttggccttggtgcggtgacggcctcttttgtgttctttttcacgctcgggtatggagcgcggctgctggcaccgatctttgcccgcccccgcgcgtggcaggtgctggacgcgctgatcggcgtggtcatgctggcgcttgcggtcaagctcgcgctgatgtga

SEQ ID NO: 9416 - protein, 209 aa, Silicibacter sp. TM1040
MQPLPMTPDMLPILMAGFGLGFSLILAIGAQNAFVLRQGIRGQHVLPIVLTCALSDALLITAGVAGFGTLTSALPWFEPVMRIGGALFLTGYGLRSLRSAWTGGAALSTEGQGVQTALWPAVLTCLAFTWLNPHVYLDTVVLLGAISAQYTPAWVFGLGAVTASFVFFFTLGYGARLLAPIFARPRAWQVLDALIGVVMLALAVKLALM

SEQ ID NO: 9417 - DNA, 600 bp, Mycobacterium sp. MCS
  CDS (1)..(600): transl_table=11
gtgacctaccccgtcgtcctcggctttctgtcggcgctcacgctgatcgccgccatcggcgcgcagaacgcgttcgtcctgcgccagggcatccgtggtgaacacgtcgccgccgtcgtcgcgttgtgcacggtgtccgacgtcctgttgatcggcgccggcatcgccggcttcggcgcgctcgtcaccgcccaccccgcagcgctggacatcgcacggttcggtggcgccgcgttcctgatcggctatggactgttggccgcccggcgcgccgcgcgaccggccgcactcacgccatcggagcagggcccggcccgcctcgtcggggtgctcgtcacatgcgcggcactgacgtggctcaacccccacgtctatctcgacacggtcgtgctgctcggcgccctggccaacgagcaccgcgaggaccgctggctcttcggtgtcggcgccgtcacggcgagcgccgtctggttcaccgctctgggcttcggcgcgcgccgcctcggcggcctgttctcggcaccgtcgacgtggcgggttctcgacgcgctgatcgcaatgatcatgatcgctctcggcgtcgccgtcgcgctcggatga

SEQ ID NO: 9418 - protein, 199 aa, Mycobacterium sp. MCS
MTYPVVLGFLSALTLIAAIGAQNAFVLRQGIRGEHVAAVVALCTVSDVLLIGAGIAGFGALVTAHPAALDIARFGGAAFLIGYGLLAARRAARPAALTPSEQGPARLVGVLVTCAALTWLNPHVYLDTVVLLGALANEHREDRWLFGVGAVTASAVWFTALGFGARRLGGLFSAPSTWRVLDALIAMIMIALGVAVALG

SEQ ID NO: 9419 - DNA, 621 bp, Rhodococcus sp. RHA1
  CDS (1)..(621): transl_table=11
atgcacctcacccctgccttgctcacggcggccgccggcttcggtaccggcctgtcgctgatcgtcgcgatcggcgcgcagaacgcgttcgtcctgcgacaggggatcgcacgcaggcacgtcctgccggtggtcgtgctgtgcgcggtgtcggacgccgtgctcattgccgtcgggatcagcgggatcggcgccgtactcgcgcacgctccggccgccatcaccgtgatccgctgggcgggcgcggcattcctcgtctcctacgcggtgctcgccgctcgccgcgccctccgccccggaacgctcgatgcgacgcaggaaataggatcggcgaccctcgcgacgtcgatcctcacctgcctcgcactcacgtggctcaacccgcacgtgtacctcgacacggtgctgatgctcggctcggtggccaacaaccagggcgattcgggccggtggctgttcggtctcggtgccgccacctcgagcgtcgtctggttcctcgcgctcggctacggcgcccagttcctgcaccgggtgttcgcccgccccggcgcgtggcgcgtgctcgacgccgggatctccgcattgatgctcaccctcggcatcaccctcgtcacgagttag

SEQ ID NO: 9420 - protein, 206 aa, Rhodococcus sp. RHA1
MHLTPALLTAAAGFGTGLSLIVAIGAQNAFVLRQGIARRHVLPVVVLCAVSDAVLIAVGISGIGAVLAHAPAAITVIRWAGAAFLVSYAVLAARRALRPGTLDATQEIGSATLATSILTCLALTWLNPHVYLDTVLMLGSVANNQGDSGRWLFGLGAATSSVVWFLALGYGAQFLHRVFARPGAWRVLDAGISALMLTLGITLVTS

SEQ ID NO: 9421 - DNA, 609 bp, Rhizobium leguminosarum bv. viciae 3841
  CDS (1)..(609): transl_table=11
atgaatttttcgatctatggaaccggcctgatgatgggcctcagcctgatcgtcgccatcggcgcgcagaacgccttcattctccgtcagggcttacgcaacgaacatgtctttgccgtctgcctcgcatgcgcggtatcggatgccgcgctgatcgtgcttggcgtaaccagcctgcagcaaatcgccaggttcatgccctggctcgatcccgtcatgcgctacggcggagccgtatttttgatctggtacggggcaagaagcctctattccgccttgcggtcgtccgccgctctcacggccgcggaagccaaaccatcgagctttcggcagacgctggccacctgcctcgcactcacctggctcaatccgcatgtttatctcgacaccgtggtgctgctcggcacgatatcgacacgatatccgggagagcaggcttcttttgcggcaggggcggtgacggggtccttcctgttcttcttttcgctcggttatggcgcgaagcggctgcggccgatcttctcgaaaccctcatcctggcgcatgctggaaacgctcgtcgctttcacgatgtggatcatagcgttcaagctgctgggcgggttgtga

SEQ ID NO: 9422 - protein, 202 aa, Rhizobium leguminosarum bv. viciae 3841
MNFSIYGTGLMMGLSLIVAIGAQNAFILRQGLRNEHVFAVCLACAVSDAALIVLGVTSLQQIARFMPWLDPVMRYGGAVFLIWYGARSLYSALRSSAALTAAEAKPSSFRQTLATCLALTWLNPHVYLDTVVLLGTISTRYPGEQASFAAGAVTGSFLFFFSLGYGAKRLRPIFSKPSSWRMLETLVAFTMWIIAFKLLGGL

SEQ ID NO: 9423 - DNA, 615 bp, Shewanella sp. ANA-3
  CDS (1)..(615): transl_table=11
atgcaaacggcgtttatacaaggtatgggcattggtggtagtttgattattgccgtaggggcgcaaaatgcctttgtgctaaagcaggggattaagcgagcgtatcctttgccgattgcgctgctttgttcaatcatcgatgccttaatgatcactgcgggtgtggcggggcttgggcacattatcgaagccttcccgaccatcaaacatgtagccagttttggtggcgccgcttttttgatttggtacggagctaatgcacttaaggcctcgtttgtcgctaaagggatggagatgggcaatgcgcaaaatgccgatactttgcgtaaggccatgctgaccacgcttgggatcagcctgctcaatccacacctttatttagataccgtcgtgctgctggggagtattagtactcagttcgaagatgcccatcgtccttggtttggtgcgggcgcggtactggcttcgtttatttggttcttcagcctaagttttggtgcgcgtttattggcgccgatatttagtcgcccagcggcgtggcgatacttagaccgctttatttggttgaccatgtggagcattgccgcggcagttatttggccttatctggcctaa

SEQ ID NO: 9424 - protein, 204 aa, Shewanella sp. ANA-3
MQTAFIQGMGIGGSLIIAVGAQNAFVLKQGIKRAYPLPIALLCSIIDALMITAGVAGLGHIIEAFPTIKHVASFGGAAFLIWYGANALKASFVAKGMEMGNAQNADTLRKAMLTTLGISLLNPHLYLDTVVLLGSISTQFEDAHRPWFGAGAVLASFIWFFSLSFGARLLAPIFSRPAAWRYLDRFIWLTMWSIAAAVIWPYLA

SEQ ID NO: 9425 - DNA, 600 bp, Mycobacterium smegmatis str. MC2 155
  CDS (1)..(600): transl_table=11
gtgaactccccgctggtcctcggtttcctcacctcgatggcactcatcgccgcgatcggcgcgcagaacgcgttcgtgctgcgccagggcatccgacgcgagcatgtcctgcccgtgatcgcggtctgcacggtgtcagacctgctgctgatcaccgcgggcattgccggcgtcggcgcggtgatcaccgcacaccccgatgccgtaacggtcacgaagttcggcggcgcagcgttcctcatcggctacggcgtgctcgcggcacgccgggctttgcgtccgtcgacgctcaatccgtccgagcgcaccccggcgcgcctcgccgaagtgctcgtcacgtgcctcgcgctgacctggctgaacccgcacgtctacctcgacaccgtggtgctgctgggcaccctggccaacgaacaacgcgagcaacggtggctcttcggcgccggcgcggtgctggcgagcgccatctggttcctgggtctcggtctgggcgccaagcgcctggccgggctgttcgccactccgatgacctggcgcatcctcgacggcgtgatcgccgtgacgatgatcgcgctcggcctcggcatgatgctgacgtga

SEQ ID NO: 9426 - protein, 199 aa, Mycobacterium smegmatis str. MC2 155
MNSPLVLGFLTSMALIAAIGAQNAFVLRQGIRREHVLPVIAVCTVSDLLLITAGIAGVGAVITAHPDAVTVTKFGGAAFLIGYGVLAARRALRPSTLNPSERTPARLAEVLVTCLALTWLNPHVYLDTVVLLGTLANEQREQRWLFGAGAVLASAIWFLGLGLGAKRLAGLFATPMTWRILDGVIAVTMIALGLGMMLT

SEQ ID NO: 9427 - DNA, 603 bp, Nocardioides sp. JS614
  CDS (1)..(603): transl_table=11
gtgctcgactccacgttcaccggcctggtcaccggcctgtcactgatcgtggcgatcggcgcgcagaacgcctacgtgctgcgccagggcctggcccgcgagcacatcggcgtcgtggtcgccatctgcgcgatctccgacgtcgtgctgatcaccggcggggtcgccgggatcggcaccatcgtggagcaggccgggtgggtcctggacctggtccgctggctcggtgtcgcgttcctgacgtggtacggcgtctcctcactgctgcgcgcgcgtcgcgcggacgcgctgcacgcggccggccggggcgcgaccggcgtccgcggcgtcgccgtacgcgcgctcgcgctgacctggctcaacccgcacgtgtacctcgacaccgtgctgctgctcggctcgatcgccaaccacgaggggccgaccggccgctggtggttcgccctcggcgccagcctcgcgagcgtcctgtggttctccggactggggtacggcgcccgccgggccggtcggctgctcgcgagcccgcgggcctggcaggtgctcgacgtgctcatcggtgtgacgatgctcgccatcgcggtgctgctcgcacgcggctag

SEQ ID NO: 9428 - protein, 200 aa, Nocardioides sp. JS614
MLDSTFTGLVTGLSLIVAIGAQNAYVLRQGLAREHIGVVVAICAISDVVLITGGVAGIGTIVEQAGWVLDLVRWLGVAFLTWYGVSSLLRARRADALHAAGRGATGVRGVAVRALALTWLNPHVYLDTVLLLGSIANHEGPTGRWWFALGASLASVLWFSGLGYGARRAGRLLASPRAWQVLDVLIGVTMLAIAVLLARG

SEQ ID NO: 9429 - DNA, 636 bp, Actinobacillus pleuropneumoniae serovar 1 str. 4074
  CDS (1)..(636): transl_table=11
atggacgtttttattcaaggttttattgtgtgcttcgggttgattgtgtcaatcggtgcgcaaaatgcttttttactgaaacaaggtatcttaaaacagaacgtattttgggtcgctttactctgttttttaggtgatgtatttttaatgacgttaggtgtactagggttaggttccatcgtagcgaatttgcctatgttaagtttagccatcgctttactgggagcctgtttcttatttacctacggcagtcgctcgtttatcagtattttcaagagcgtagaagcactgaaagcaagtaatgaaaatgcgacgagtttgaaaagagcattgatgattacctttgcgattacttttttaaatccgcacgtgtacatcgatacggtagtgattttgggcggaatcggcgggcatttggattttgacggcaaaatggcgtttcttgccggcgcattaagttgttcgttcttatggttttttggtgtcggttacggagccggttttctatcgccttattttgaaaagcgcagaacatggcaaattttagattttcttaccggtgtgattatgtatgcgattgcaatcagtttgacggcatatgcttttcagcgggctaaacaaatttttgcttggtaa

SEQ ID NO: 9430 - protein, 211 aa, Actinobacillus pleuropneumoniae serovar 1 str. 4074
MDVFIQGFIVCFGLIVSIGAQNAFLLKQGILKQNVFWVALLCFLGDVFLMTLGVLGLGSIVANLPMLSLAIALLGACFLFTYGSRSFISIFKSVEALKASNENATSLKRALMITFAITFLNPHVYIDTVVILGGIGGHLDFDGKMAFLAGALSCSFLWFFGVGYGAGFLSPYFEKRRTWQILDFLTGVIMYAIAISLTAYAFQRAKQIFAW

SEQ ID NO: 9431 - DNA, 624 bp, Fusobacterium nucleatum subsp. vincentii ATCC 49256
  CDS (1)..(624): transl_table=11
atggagaaatatttacaaggttttttaatgggacttgcttatgttgctccaataggagtacagaatttgtttgtaattaactctgcaattacccaaaaaagaagtaaggcattattgattgctttaattgtaatattttttgatataacattggcatttgcttgtttctttggaataggacttttaatagataagttagagtggttgaaattaattattctacttgtaggaagtttagttataatctatataggtcaaggacttttaagaagtaaaagtgaacttaaaaaaaatgatgatatggatataccattattaaaagcaataacatctgcctgtgttgtaacatggtttaatccacaagctattattgatggaactatgatgttgggggcatttagagcaactcttccaagtgatgcaggaatttattttatacttggagtaacatcagcatctttttgttggtttatgggtttaagtatttttatatcattatttagttataaatttaataacaaggtgttaagagtaatcaatatagtatgtggtatagtaataatcttttatggtttaaagttattattaaatttttataagatatttattcattatatatattga

SEQ ID NO: 9432 - protein, 207 aa, Fusobacterium nucleatum subsp. vincentii ATCC 49256
MEKYLQGFLMGLAYVAPIGVQNLFVINSAITQKRSKALLIALIVIFFDITLAFACFFGIGLLIDKLEWLKLIILLVGSLVIIYIGQGLLRSKSELKKNDDMDIPLLKAITSACVVTWFNPQAIIDGTMMLGAFRATLPSDAGIYFILGVTSASFCWFMGLSIFISLFSYKFNNKVLRVINIVCGIVIIFYGLKLLLNFYKIFIHYIY

SEQ ID NO: 9433 - DNA, 666 bp, Kineococcus radiotolerans SRS30216
  CDS (1)..(666): transl_table=11
atgctaagggcggtgaaggatcctgagctggaaccaccacgcgccggtccctaccgtcgagacgtgctcacgctgctcaccgggaccctgttcggcctgtccctcatcgtcgccatcggggcgcagaacaccttcgtcatcgagcagggcgtgcgcggggagcacgtgggcgcggtcgtcgcggtctgcgccgtcagcgacctcgtcctcatcgcggccggggtcggcggggcgggggcggtgctcaccgcctcccccggcgtcctgcgggtcgtgcgctgggccggggcggccttcctcctcgcctacgccgcgttcgcgctgcgccgggcccggcgacccggcgccctgcgcgcggacacctcgaggccgcccgcgcgggtggggacggtggtggccaccgcggccgccctgacgtggctgaacccccacgtctacctcgacaccgtcgtcctcctcggttcggtcgccgcgacccacggcgcccagcggtggtggttcgcggcgggcgccgggctggccagcgtcgtctggttcaccgccctgggccacggggcgcggctgctgcgcccggtcttcgcccgccccgcggcctggcgcgtcctcgacctgggggtggcggtggtcatggtcgtcctggcggtcggcctgctgaccacggcctga

SEQ ID NO: 9434 - protein, 221 aa, Kineococcus radiotolerans SRS30216
MLRAVKDPELEPPRAGPYRRDVLTLLTGTLFGLSLIVAIGAQNTFVIEQGVRGEHVGAVVAVCAVSDLVLIAAGVGGAGAVLTASPGVLRVVRWAGAAFLLAYAAFALRRARRPGALRADTSRPPARVGTVVATAAALTWLNPHVYLDTVVLLGSVAATHGAQRWWFAAGAGLASVVWFTALGHGARLLRPVFARPAAWRVLDLGVAVVMVVLAVGLLTTA

SEQ ID NO: 9435 - DNA, 597 bp, Sulfitobacter sp. EE-36
  CDS (1)..(597): transl_table=11
atgaccgccttctttcccggctttgccttgggcctgaccttgattctggctatcgggacgcagaacgcctttgtcttgcgccaaggcttgcggttgcagcatgtcttttgggtctgcctgacctgcgccttgtcagatgcggtgctgatcgccgcaggggtggcggggttcggtgcgctggcaacggcggtgccgtggttcgaaacgctgatgcgctacggcggggcggcgttcctgatctggtacggtttccagaatgcgcgatcggcttggcagggcggccatgcgctcgccgctgacggggccgcgcaaaccagcctgcgccgcacgatcctgaccctgctcgcgctgacctggctgaacccgcatgtttatcttgataccgtcgtgctgctggggtccatcgccgcgcaatatgaaagccgccttgccttcggggcaggtgcggtcacggcgagctttgttttctttttcagcctgggctatggcgcgcgcctgttggggccgtttttcagcaagccgcgcagctggcaaattctggatggtgtgatcgcgctgaccatgtgggcgattgctttgaaacttctgctgatgtga

SEQ ID NO: 9436 - protein, 198 aa, Sulfitobacter sp. EE-36
MTAFFPGFALGLTLILAIGTQNAFVLRQGLRLQHVFWVCLTCALSDAVLIAAGVAGFGALATAVPWFETLMRYGGAAFLIWYGFQNARSAWQGGHALAADGAAQTSLRRTILTLLALTWLNPHVYLDTVVLLGSIAAQYESRLAFGAGAVTASFVFFFSLGYGARLLGPFFSKPRSWQILDGVIALTMWAIALKLLLM

SEQ ID NO: 9437 - DNA, 618 bp, Roseovarius nubinhibens ISM
  CDS (1)..(618): transl_table=11
atggatttttcggtttttctcacagggcttggcatggggctcggcctcatcctcgccatcggggcgcagaacgcctttgtcctcaagcagggcctgcggggggcgcatgtgctgccggtggtgctggcctgtgcgatctccgacgcggctctcatcctgttgggcgtgacgagctttgccagcatctcgcggctcttgccctggctcgatccggtgatgcgtttgggcggcgcggcgtttctcgtctggtacggggcgcgcagtgcgcattcggcgctgcgctcgaccgaggcgctggagaccggcgcgctgcgcgatgccccgcccgagccgctctggccggtactgctcacctgtctggcgctgacctggctcaacccgcatgtctatctcgatacggtggtgctcttgggctcgatctcaacccagttcgacggccagcagacgagctttgcggcgggggcgattgccgggtccttcctgttcttcttcagcctcggctatggcgcggcgctgttgcggccggtctttgccagcccggcatcctggcgcatcctcgaaggggcggtggcgctcaccatgtgggggattgcggccaagttgatctttggcagctaa

SEQ ID NO: 9438 - protein, 205 aa, Roseovarius nubinhibens ISM
MDFSVFLTGLGMGLGLILAIGAQNAFVLKQGLRGAHVLPVVLACAISDAALILLGVTSFASISRLLPWLDPVMRLGGAAFLVWYGARSAHSALRSTEALETGALRDAPPEPLWPVLLTCLALTWLNPHVYLDTVVLLGSISTQFDGQQTSFAAGAIAGSFLFFFSLGYGAALLRPVFASPASWRILEGAVALTMWGIAAKLIFGS

SEQ ID NO: 9439 - DNA, 609 bp, Oceanicola batsensis HTCC2597
  CDS (1)..(609): transl_table=11
gtgcagacggatttcgccacagcctttctggccgccttcgggctgggcctgtcgctgatcgtcgcgatcggcgcgcagaacgccttcgtgctgcgccagggcctccgccgcgagcatgtcctggcggtggtcctcacctgcgccatatcggacgcgctgctgatcgtcgccggcgtcgcgggcttcgccaccctgaccgaacggctgccctggatcggcccgctcatgcgctacggcggggcggccttcctcttcgtctacggaacgctcgccctgcgcagcgcctggcgcggcggcgaggcgctggaccaggccggaaacggcggcgccggacttggccgtaccctggccgtctgcctcgccctgacatggggcaatccgcatgtctacctcgacacgctcgccctgatgggcgcgatctcggcccagtacgacagcaggatcggattcgcggcgggcggcgtcaccgcctcggcggtcttcttcacgaccctcggcttcggcgcccgcttcctcgcccccgtcttccggcggcccgtggcgtggcgctggctcgacctcggcatcgggctgatcatgtacgcgatcgctgtctcgctgctggtatga

SEQ ID NO: 9440 - protein, 202 aa, Oceanicola batsensis HTCC2597
MQTDFATAFLAAFGLGLSLIVAIGAQNAFVLRQGLRREHVLAVVLTCAISDALLIVAGVAGFATLTERLPWIGPLMRYGGAAFLFVYGTLALRSAWRGGEALDQAGNGGAGLGRTLAVCLALTWGNPHVYLDTLALMGAISAQYDSRIGFAAGGVTASAVFFTTLGFGARFLAPVFRRPVAWRWLDLGIGLIMYAIAVSLLV

SEQ ID NO: 9441 - DNA, 630 bp, Photobacterium sp. SKA34
  CDS (1)..(630): transl_table=11
atgagtttttgggttttattacaggggtttggcttgggagcatcaatgatcatccctattggtgcccagaacgcttatgttcttaatcaaggcataaagcgtaatcaccatttaacgacagcaacgatttgtagtttgctagatatgctgttcatttccttaggtatttttggtggcggtgcgattcttgcgcaacatgacatgttactaacctctgtaacattaggcggcattgcttttttaaccttttatggtttgttgtcattgaaaagcgcgttcaaaaagccaaatactgatgaaaaaaatggtgaagtagttgctcggggtcgtcgtgctgttatcttaggagcattggcagtgacagtgttaaatccgcatttataccttgataccgtggtgatccttggttcattaggtgggcagtttgaagggaatgatcgtatttcttttgctgttggtaccatcatggcatcatttgtctggttctatagcctgtctttaggtgcggcaaagcttgggcctgttttatcacaaccaaaagtgaaaaaaggtattgatctattagtggcggcaatgatgtttactattgcgatcattcttgcaaaagagttgataggtaagtattggtaa

SEQ ID NO: 9442 - protein, 209 aa, Photobacterium sp. SKA34
MSFWVLLQGFGLGASMIIPIGAQNAYVLNQGIKRNHHLTTATICSLLDMLFISLGIFGGGAILAQHDMLLTSVTLGGIAFLTFYGLLSLKSAFKKPNTDEKNGEVVARGRRAVILGALAVTVLNPHLYLDTVVILGSLGGQFEGNDRISFAVGTIMASFVWFYSLSLGAAKLGPVLSQPKVKKGIDLLVAAMMFTIAIILAKELIGKYW

SEQ ID NO: 9443 - DNA, 642 bp, Oceanospirillum sp. MED92
  CDS (1)..(642): transl_table=11
atgctaacaatcattactactgcacaattaattgcgttgatcaaagggctggcaaccagtgccggccttattgtggcgatcggggcgcagaatgctttcgttttgacgcagggattacgtcgtcagtatcactggccggtagcgggtatttgtgcattttttgatgctgttttgattacggttggcgttgcaggcatggggcttctgatctcacaatctgcaatctggatggagatagctcgctggggtggggcgttgtttctgttctggtacggtttaaattcactacgctcggctctgaatccaaaagggatggaagcagatgagcagagcttagggagtctggctaaagcggtgatgaccaccgttctgataacactgcttaacccgcatgtgtatctggatacggttgttctgttggggagtatcggtggtcagtacccggaatctgaaagagtctggtttgctgtcggtgctatcgcattttcgtgtatctggtttgcttcgctggtggttggcgctaaatacttgcaaccggtattcagaaatccgaaggcttggcaggtattggatcttattgtgtgtttgatgatgtgggccatcgccgtcagtttgctctggcccatcatcgcagcattatga

SEQ ID NO: 9444 - protein, 213 aa, Oceanospirillum sp. MED92
MLTIITTAQLIALIKGLATSAGLIVAIGAQNAFVLTQGLRRQYHWPVAGICAFFDAVLITVGVAGMGLLISQSAIWMEIARWGGALFLFWYGLNSLRSALNPKGMEADEQSLGSLAKAVMTTVLITLLNPHVYLDTVVLLGSIGGQYPESERVWFAVGAIAFSCIWFASLVVGAKYLQPVFRNPKAWQVLDLIVCLMMWAIAVSLLWPIIAAL

SEQ ID NO: 9445 - DNA, 603 bp, marine gamma proteobacterium HTCC2207
  CDS (1)..(603): transl_table=11
ttgtcaacttaccttgcaggcttctccctaggactttccctaattctggccatcggctcgcaaaatgcctttgtgctcaaacaggggcttaaaaaacgtcatgtttttattgtctgcctagtctgtgctgtatccgatgggattctaatttccctcggcgttgccggttttggtactgtggttaaacagtttcccaccattgagatagtcgccagatacggcggggcagcgttcctagccatttacgctctgctcagttttaagtctgctttcaccgaaacccatgccctcgaagccgaagcggaaacagaaagctcgctgtttaaaaccatcgccatctgtctggcctttacctggttaaacccccatgtctatttggatactgtgattcttttggggtcggtttcaacccaataccatcccgagcaattccagtttgctctgggtgcggtgatcgcgtcctttgtattcttctttagcctcggttatggcgcgcgagtcttagcgccggtgtttgaaaaccctaaagcttggaagatctttgagttttttgtcggggttattatgcttgctctggccttatcacttgtcgccaatgtctag

SEQ ID NO: 9446 - protein, 200 aa, marine gamma proteobacterium HTCC2207
MSTYLAGFSLGLSLILAIGSQNAFVLKQGLKKRHVFIVCLVCAVSDGILISLGVAGFGTVVKQFPTIEIVARYGGAAFLAIYALLSFKSAFTETHALEAEAETESSLFKTIAICLAFTWLNPHVYLDTVILLGSVSTQYHPEQFQFALGAVIASFVFFFSLGYGARVLAPVFENPKAWKIFEFFVGVIMLALALSLVANV

SEQ ID NO: 9447 - DNA, 558 bp, Oceanobacter sp. RED65
  CDS (1)..(558): transl_table=11
ttgatcctagccattggttcgcaaaatgcttttgttttgcgtcaagggattaagggcgaacatgtattctgggtatgtttagtgtgtgctttgtcagatgcgttgcttatagcatcaggtgttgcaggctttggttcgattgtaaaagcgtatccagatgttttagtagtggcacgctatgtaggatcggcattccttattggatatgggggggtgagtctttactcagcatttgccaaagatcatatattaaaagcgagtgaattaggagcgcagacacctttcaaggcgattgctatttgtttagcgtttacgtggttgaaccctcatgtttatctcgacactgtagtgcttttagggagtatttcgacacaatatatcgaaccgctaatgtttggattgggggctatctcggcgtcatttgttttcttttttagtcttgggtttgcagcaaaaaagcttgcgcctttatttgagcgtcctctctcatggaagctactcgatggtttggtcggcgcaattatgttttatattgcacttagtctgctgcatgagtaa

SEQ ID NO: 9448 - protein, 185 aa, Oceanobacter sp. RED65
MILAIGSQNAFVLRQGIKGEHVFWVCLVCALSDALLIASGVAGFGSIVKAYPDVLVVARYVGSAFLIGYGGVSLYSAFAKDHILKASELGAQTPFKAIAICLAFTWLNPHVYLDTVVLLGSISTQYIEPLMFGLGAISASFVFFFSLGFAAKKLAPLFERPLSWKLLDGLVGAIMFYIALSLLHE

SEQ ID NO: 9449 - DNA, 585 bp, Vibrio sp. Ex25
  CDS (1)..(585): transl_table=11
atgatcattccgatcggcgcacaaaatgcgtatgtcttaaatcaaggcataaagcgcaatcatcacctgacgactgccactatttgtagcatcctagatatgatcttcatttctctaggtatctttggtggtggtgcgattttgtctcaaaatgaaatcttactaacatcggtgacgcttggtggtattgccttcctgagcttttatggattactgtcacttaagagtgcgtttaagtcagacagtgagtcagaatcaaaaggtgaagtcgtcgctcgtggtcgtcgaacggtcatattaggtgcgttagccgtcacagtacttaacccacacttgtacttagatacagtcgtcattctgggctctattggtgggcagtttgaaggccatgaccgaattgcttttgcactaggtacgatgatggcttcctttgtttggttctataccttgtcgataggagccgcaaaactaggccctaccctatcaaagccaagagtgaaaaaaggcatcgacatcgcggtcgcagtaatgatgttcacgatagcgtatattttagctagcgaacttattgaaaagtactggtaa

SEQ ID NO: 9450 - protein, 194 aa, Vibrio sp. Ex25
MIIPIGAQNAYVLNQGIKRNHHLTTATICSILDMIFISLGIFGGGAILSQNEILLTSVTLGGIAFLSFYGLLSLKSAFKSDSESESKGEVVARGRRTVILGALAVTVLNPHLYLDTVVILGSIGGQFEGHDRIAFALGTMMASFVWFYTLSIGAAKLGPTLSKPRVKKGIDIAVAVMMFTIAYILASELIEKYW

SEQ ID NO: 9451 - DNA, 594 bp, Escherichia coli B
  CDS (1)..(594): transl_table=11
atgatcctaccgctcggtccacaaaatgcttttgtgatgaatcagggcatacgtcgtcagtaccacattatgattgccttactttgtgctatcagcgatttggtcctgatttgcgccgggatttttggtggcagcgcgttattgatgcagtcgccgtggttgctggcgctggtcacctggggcggcgtagccttcttgctgtggtatggttttggcgcttttaaaacagcaatgagcagtaatattgagttagctagcgccgaagtcatgaagcaaggcagatggaaaattatcgccaccatgttggcagtgacctggctgaatccgcatgtttacctggatacttttgttgtactgggcagccttggcgggcaacttgatgtggaaccaaaacgctggtttgcactcgggacaattagcgcctctttcctgtggttctttggtctggctcttctcgcagcctggctggcaccgcgtctgcgcacggcaaaagcacagcgcattatcaatctggttgtgggatgtgttatgtggtttattgccttgcagctggcgagagacggtattgctcatgcacaagccttgttcagttag

SEQ ID NO: 9452 - protein, 197 aa, Escherichia coli B
MILPLGPQNAFVMNQGIRRQYHIMIALLCAISDLVLICAGIFGGSALLMQSPWLLALVTWGGVAFLLWYGFGAFKTAMSSNIELASAEVMKQGRWKIIATMLAVTWLNPHVYLDTFVVLGSLGGQLDVEPKRWFALGTISASFLWFFGLALLAAWLAPRLRTAKAQRIINLVVGCVMWFIALQLARDGIAHAQALFS

SEQ ID NO: 9453 - DNA, 600 bp, Pseudomonas putida GB-1
  CDS (1)..(600): transl_table=11
atgtggcaaagctacctcaacggcatgctggtggccttcggcctgatcatggccatcggcgcgcagaacgccttcgtacttgcccaaagcctgcgccgtgagcatcacctgccggtggcggcactgtgcatcgtctgtgatgccctcctggtggcagccggggtgttcggcctggccaccgtgctggcgcacaacccgaccttgctggcggtcgcacgctggggcggcgcggtgtttctgatctggtacggcgccaaggccctgcgcagcgcctgctccaagcagagcctgcagcaccagcaaggccagggcgcccgctcacgccgtgccgtgctgctcagcgccctggcggtgaccctgctaaacccgcacgtgtacctcgacacggtgttgctgatcggctcgctgggcgcccagcagaccgcccccggcgcctacgtggccggcgccgccagcgcctcgctgctgtggttttcgaccctggcgatcggcgcggcctggctggccccatggctggcaaggccggcgacctggcgcatgctcgacctgatggtggcggtgatgatgttcgcggtggcagcgcagttgatcttcaactga

SEQ ID NO: 9454 - protein, 199 aa, Pseudomonas putida GB-1
MWQSYLNGMLVAFGLIMAIGAQNAFVLAQSLRREHHLPVAALCIVCDALLVAAGVFGLATVLAHNPTLLAVARWGGAVFLIWYGAKALRSACSKQSLQHQQGQGARSRRAVLLSALAVTLLNPHVYLDTVLLIGSLGAQQTAPGAYVAGAASASLLWFSTLAIGAAWLAPWLARPATWRMLDLMVAVMMFAVAAQLIFN

SEQ ID NO: 9455 - DNA, 651 bp, Photorhabdus temperata
  CDS (1)..(651): transl_table=11
atggatctcaatgtcgcctcaaaagcattcttcataggtctgagtcttattattgcgataggtgcgcaaaacatttatatcatcaagacaggactacagaaaaaaaatgtacttctttctgctgtcacagccgctacctgtgacagcctattaatcatcatgggaacattctttatgtccacactgatgatgaccatccccaatttcgtgtttattgcacgatgggctgggatcctctttttgttatattacggtacgctttctttcatcaatgcaatatccagcgcacctaaaggatgggagaatgcagttgcagatgtcaataagaaatcatcagctattaataaggcaaaaaactccagcgtctttttgactacgctggccttttcgcttttcaatcctcatgtttatcttgatactttcctgatccttggaaatataggatcacgtttacccttagagtcaagattcagttttatactcggcgcttctgcggcctcttttttctggttcatcctgaccggtcttggcgctaaatttgcatcgcgcttttttcagaatataaaagtagccagaatttttgatttcatcgtcgccttggctatgtttctgattgcctacggtttatatgaaaattctgcaattttataa

SEQ ID NO: 9456 - protein, 216 aa, Photorhabdus temperata
MDLNVASKAFFIGLSLIIAIGAQNIYIIKTGLQKKNVLLSAVTAATCDSLLIIMGTFFMSTLMMTIPNFVFIARWAGILFLLYYGTLSFINAISSAPKGWENAVADVNKKSSAINKAKNSSVFLTTLAFSLFNPHVYLDTFLILGNIGSRLPLESRFSFILGASAASFFWFILTGLGAKFASRFFQNIKVARIFDFIVALAMFLIAYGLYENSAIL

SEQ ID NO: 9457 - DNA, 618 bp, Yersinia pestis
  CDS (1)..(618): transl_table=11
atgttagcggtctatttgcacggttttatccttagcgctgcgatgattttgccgcttgggccacaaaatgtttttgtgatgaatcaggggatcaagcgtcagcatcatttgatgagcgcatccctttgtgctctcagtgacattatcttgatttgcgcagggatttttggcggcagtgctttattgagccgttcgcctttactgctggcattggtgacctgggggggcgtggctttcctgatgtggtacggttggggggcattgatggcggcgtggcggggggatggtgttgcttcgtcagcaacgagtgtcacgcaggggcgctggcgcatattggtcaccttattggccgttacctggcttaatcctcacgtttatctggatacctttgttgttttgggcagtttgggggggcagctattacctgatatacgcccttggtttgctttaggggcggttacggcctctattgtttggttttttgccttagcattgctagcagcatggttatcaccgtggttaaatcgcccagtggcacaacgaatcattaacctatttgttggcggggtaatggggtttattgctttccaattggcacgacagggattcggcctatga

SEQ ID NO: 9458 - protein, 205 aa, Yersinia pestis
MLAVYLHGFILSAAMILPLGPQNVFVMNQGIKRQHHLMSASLCALSDIILICAGIFGGSALLSRSPLLLALVTWGGVAFLMWYGWGALMAAWRGDGVASSATSVTQGRWRILVTLLAVTWLNPHVYLDTFVVLGSLGGQLLPDIRPWFALGAVTASIVWFFALALLAAWLSPWLNRPVAQRIINLFVGGVMGFIAFQLARQGFGL

SEQ ID NO: 9459 - DNA, 687 bp, Corynebacterium diphtheriae
  CDS (1)..(687): transl_table=11
atgagtattgctatcgctggattcctcatgggtctgtccttgatcgtggccatcgggccacaaaatgccttgattattcgtcaaggcattaaacgcgaaggtctaatccccattctggttgtatgcatactctctgacgtgatcctcatttttggaggcactgccggtgtcggcgcattagtcgatcgagcccccatcgcactagtagtactgaaatggctcggtgtagcgtacttgctctatttcggattcacttgttttaaagaagcatttaaacgtcacggccaagcgctcgcagtcgagcaaagcgaaccggtggcctacgaaccagtggctgacgcatcatccggagtgatcactaaaacacgcacaaaagctcagcccaagtcagcgcagcgcacgtgggttaaaccagtgcttgcagcgttggctttcacgtggcttaatccagctgcttatatagacgttcttgtcatgttgggaggaatcgccaaccaacacggtcccgacgggcgctgggtcttcgccctcggcgcactgtgcgcgagtctcacgtggtttccgtttattggatatacctccacacgcttttctaccgtgctatcgcggccagccgtgtggcgatatatcaacatagcaatcggaatcatcatgatgatcatgtgcgcacgtctcatcatgcactag

SEQ ID NO: 9460 - protein, 228 aa, Corynebacterium diphtheriae
MSIAIAGFLMGLSLIVAIGPQNALIIRQGIKREGLIPILVVCILSDVILIFGGTAGVGALVDRAPIALVVLKWLGVAYLLYFGFTCFKEAFKRHGQALAVEQSEPVAYEPVADASSGVITKTRTKAQPKSAQRTWVKPVLAALAFTWLNPAAYIDVLVMLGGIANQHGPDGRWVFALGALCASLTWFPFIGYTSTRFSTVLSRPAVWRYINIAIGIIMMIMCARLIMH

SEQ ID NO: 9461 - DNA, 678 bp, Aeromonas hydrophila
  CDS (1)..(678): transl_table=11
atgtttgctaccaccctgcaaggcttcaccctcggccttgccatgatcattcccatcggtgcccagaatgccttcgtgctgagtcggggcatccaccgcaaccaccatctgctgacggcgaccctctgctgcctgtgcgatctcgtgctgatcggcatcggggtgtttggcggagccaacctgctggcggccagcccgatcggcctggccctgctgacctggggcggcgtgctgtttctcggctggtttggtatccgttccctgcgcagtgcctggcgcggacagggagccaagctggcggactcgccccagttgatgggggtcaagagcgtgctggccatgaccctcggggtgaccctgctcaacccccacgtctacctggataccctgatgctgctcggctccttcggtagtcagtttgccgaagagttgcggtctgcctttgcggcggtggccatgctggcctcgctggtctggttctacagcctggcgttcggggcggtggtcctctcaccttggctcgctcgctcgcggcagggttacagcaagctattgatactattgttggtttcaccatgctggggctggcgttgcaactggcgagcggggctctgctggcgtcataaggctatttttgtgccgcacctcataaaaattaatcccggcttcatgcgctga

SEQ ID NO: 9462 - protein, 225 aa, Aeromonas hydrophila
MFATTLQGFTLGLAMIIPIGAQNAFVLSRGIHRNHHLLTATLCCLCDLVLIGIGVFGGANLLAASPIGLALLTWGGVLFLGWFGIRSLRSAWRGQGAKLADSPQLMGVKSVLAMTLGVTLLNPHVYLDTLMLLGSFGSQFAEELRSAFAAVAMLASLVWFYSLAFGAVVLSPWLARSRQGYSKLLILLLVSPCWGWRCNWRAGLCWRHKAIFVPHLIKINPGFMR

SEQ ID NO: 9463 - DNA, 621 bp, Aeromonas salmonicida
  CDS (1)..(621): transl_table=11
atgttcgcgaccactctgcaaggcttcacccttggccttgccatgatcattcccatcggtgcccagaacgctttcgtgttgagccggggcatacatcgcaatcaccatctgctggctgcgaccctctgctgtctgtgtgatctcatcctgatcgggattggggtattcggcggggccaacctgctggcagccagtcccatcgggctggcgctgctgacctggggtggtgtgctgtttctttgctggttcggcattcgctccctgcgcagtgcctggcaagggcagggggctgcgctggcggattcaccccggctgatgggggtcaagagcgtgctggccatgacgctcggggtgaccctgctcaatcctcacgtctatctggataccctgatgctgctcggctcctttggcagccagtttgccgaaccgttgcgcccggcctttgcggccggggccatgctggcttccctggtctggttctacagtctcgcctttggtgcggccgcgctctcaccctggcttgcacggggccgggtgcagcaagctattgatactattgttggtttaatcatgttgggactggcattgcaactggcgagcggggccttgctggcctcataa

SEQ ID NO: 9464 - protein, 206 aa, Aeromonas salmonicida
MFATTLQGFTLGLAMIIPIGAQNAFVLSRGIHRNHHLLAATLCCLCDLILIGIGVFGGANLLAASPIGLALLTWGGVLFLCWFGIRSLRSAWQGQGAALADSPRLMGVKSVLAMTLGVTLLNPHVYLDTLMLLGSFGSQFAEPLRPAFAAGAMLASLVWFYSLAFGAAALSPWLARGRVQQAIDTIVGLIMLGLALQLASGALLAS

SEQ ID NO: 9465 - DNA, 28 bp, Artificial sequence
  primer
atgttttcttattactttcaaggtcttg

SEQ ID NO: 9466 - DNA, 25 bp, Artificial sequence
  primer
ttaactgaacaaggcttgtgcatga

SEQ ID NO: 9467 - protein, 226 aa, Artificial sequence
  consensus sequence
  Variant (2)..(8): Xaa in position 2 to 8 is any amino acid
  Variant (10)..(11): Xaa in position 10 to 11 is any amino acid
  Variant (14)..(14): Xaa in position 14 is any amino acid
  Variant (20)..(21): Xaa in position 20 to 21 is any amino acid
  Variant (24)..(35): Xaa in position 24 to 35 is any amino acid
  Variant (36)..(38): Xaa in position 36 to 38 is any or no amino acid
  Variant (40)..(42): Xaa in position 40 to 42 is any amino acid
  Variant (44)..(45): Xaa in position 44 to 45 is any amino acid
  Variant (48)..(49): Xaa in position 48 to 49 is any amino acid
  Variant (51)..(52): Xaa in position 51 to 52 is any amino acid
  Variant (54)..(71): Xaa in position 54 to 71 is any amino acid
  Variant (73)..(74): Xaa in position 73 to 74 is any amino acid
  Variant (77)..(79): Xaa in position 77 to 79 is any amino acid
  Variant (81)..(85): Xaa in position 81 to 85 is any amino acid
  Variant (86)..(86): Xaa in position 86 is any or no amino acid
  Variant (88)..(113): Xaa in position 88 to 113 is any amino acid
  Variant (114)..(148): Xaa in position 114 to 148 is any or no amino acid
  Variant (153)..(153): Xaa in position 153 is any amino acid
  Variant (158)..(161): Xaa in position 158 to 161 is any amino acid
  Variant (163)..(173): Xaa in position 163 to 173 is any amino acid
  Variant (174)..(175): Xaa in position 174 to 175 is any or no amino acid
  Variant (177)..(178): Xaa in position 177 to 178 is any amino acid
  Variant (180)..(183): Xaa in position 180 to 183 is any amino acid
  Variant (185)..(186): Xaa in position 185 to 186 is any amino acid
  Variant (189)..(190): Xaa in position 189 to 190 is any amino acid
  Variant (192)..(193): Xaa in position 192 to 193 is any amino acid
  Variant (196)..(197): Xaa in position 196 to 197 is any amino acid
  Variant (199)..(217): Xaa in position 199 to 217 is any amino acid
  Variant (218)..(218): Xaa in position 218 is any or no amino acid
  Variant (220)..(222): Xaa in position 220 to 222 is any amino acid
  Variant (224)..(225): Xaa in position 224 to 225 is any amino acid
GXXXXXXXIXXIGXQNAFVXXQGXXXXXXXXXXXXXXXCXXXDXXLIXXGXXGXXXXXXXXXXXXXXXXXXGXXFLXXXGXXXXXXAXXXXXXXXXXXXXXXXXXXXXXXXXXXXXXXXXXXXXXXXXXXXXXXXXXXXXXXXXXXXXLNPHXYLDTXXXXGXXXXXXXXXXXXXFXXGXXXXSXXWFXXLXXGAXXLXXXXXXXXXXXXXXXXXXXXMXXXAXXL

SEQ ID NO: 9468 - protein, 13 aa, Artificial sequence
  protein pattern
  Variant (2)..(4): Xaa in position 2 to 4 is any or no amino acid
  Variant (8)..(8): Xaa in position 8 is Ala, Leu or Val
  Variant (9)..(9): Xaa in position 9 is any amino acid
  Variant (12)..(12): Xaa in position 12 is Cys or Thr
  Variant (13)..(13): Xaa in position 13 is Phe, Ile, Leu, Met or Val
LXXXNPHXXLDXX

SEQ ID NO: 9469 - protein, 12 aa, Artificial sequence
  protein pattern
  Variant (2)..(2): Xaa in position 2 is Ala, Pro or Ser
  Variant (5)..(5): Xaa in position 5 is Ala or Val
  Variant (6)..(6): Xaa in position 6 is any amino acid
  Variant (7)..(7): Xaa in position 7 is Ile, Leu or Val
  Variant (8)..(8): Xaa in position 8 is Phe, Ile, Leu or Met
  Variant (9)..(9): Xaa in position 9 is any amino acid
  Variant (10)..(10): Xaa in position 10 is Gln or Arg
  Variant (11)..(11): Xaa in position 11 is Gly or Ser
  Variant (12)..(12): Xaa in position 12 is Ala, Ile, Leu or Val
GXQNXXXXXXXX

SEQ ID NO: 9470 - DNA, 849 bp, Escherichia coli
  CDS (1)..(849): transl_table=11
atgaggcgattgccggggattttactgcttactggagccgcgctcgttgtgatcgctgccctgctggttagcggcctgcgtattgctttaccgcatcttgacgcctggcgtccggaaatcctcaacaaaatagaatccgcgactggcatgccggtagaagccagtcagctctcagccagctggcagaattttggcccgacgcttgaagcacacgacatccgtgcagaactaaaagatggcggcgaattttcggttaaacgcgttactctggcgctggatgtctggcagagcctgttacatatgcgctggcagtttcgcgacctcactttctggcagctgcgctttcgcaccaacactcctatcaccagcggtggtagtgatgacagtctggaagccagtcacatcagcgatctgtttcttcgtcaatttgaccatttcgatcttcgcgacagtgaagtcagtttcctgacgccatccggtcagcgcgccgagctggcgatcccacaactcacctggctgaacgatccacgtcgacaccgtgcggaaggcctggtaagcctctccagccttaccggacagcacggcgtgatgcaggtgcgcatggatttgcgcgatgatgaggggttgttaagcaatggtcgcgtctggctccaggcggatgacatcgacctgaagccgtggctcggtaaatggatgcaggacaatattgcgctggaaacggcacagttctcccttgaaggctggatgacgatcgacaaaggcgatgtaaccggcggtgacgtctggctgaaaacagggcggtgccagctggttgggcgagaagcaaacgcatacgctgtcggtggataa

SEQ ID NO: 9471 - protein, 282 aa, Escherichia coli
MRRLPGILLLTGAALVVIAALLVSGLRIALPHLDAWRPEILNKIESATGMPVEASQLSASWQNFGPTLEAHDIRAELKDGGEFSVKRVTLALDVWQSLLHMRWQFRDLTFWQLRFRTNTPITSGGSDDSLEASHISDLFLRQFDHFDLRDSEVSFLTPSGQRAELAIPQLTWLNDPRRHRAEGLVSLSSLTGQHGVMQVRMDLRDDEGLLSNGRVWLQADDIDLKPWLGKWMQDNIALETAQFSLEGWMTIDKGDVTGGDVWLKTGRCQLVGREANAYAVGG

SEQ ID NO: 9472 - DNA, 3801 bp, Salmonella enterica subsp. enterica serovar Typhi str. CT18
  CDS (1)..(3801): transl_table=11
gtgaggcgattgccggggattttattgctcactggagccgcgctcatcgtcattgcagcgctgctggttagcgggctgcgcctggcgttgcctcatcttgacgcctggcgtccagctatcctgaataaaattgagtccgtgaccggcgtgccggtggccgccagccaactctccgcaagctggcaaaattttggccctacgctggaagcgcataatattcatgccgccctgaaagatggcggcgagctgtcgataaaacgcgttacgctggcgctggacgtctggcaaagcctgttgcacatgcgctggcagtttcgcgacctgaccttctggcaactcaatttccgcaccaacacgcctcttcaaagcagcgacggcgaaggcatcgaaaccagccgtttaagcgatcttttcctgcggcagttcgatcatttcgatctgcgcgatagccaaatcagttttctgacgctttcaggacaacgcgcggaactggcgatcccacaacttacctggctaaacggcaaagagcggcaccgagccgaaggcgaggtcagcctctccagcctgaccgggcagcacggcgtgatgcaggtgcggatggatttacgcgatgacgacggtctgctaaataacggcagagtctggttacaggccgacgatattgacgtcaagccgtggctgggcaaatggatgcaggataatgtggcgctccagacggcgcgtttcagtctggaaggctggatgacgctcagtaaaggcgaaatcgccggaggggacgtctggctgaaacagggcggcgcaagctggctgggcgataacacgacgcatacgttgtctgtcgataacctgacggcgcagattagccgcgagcagccgggctggcagttttatattccggacacacggattacgcttgatggcaaaccctggccgagcggagccttaaccgtggcctggctcccgcagcaggacgtcggcggcgagaatcacacacgtagcgatgagctacgcattcgcgccagtaatcttgaactggcggggctggaagcattacgtccgctggcggctaaactgtcgcctgtgctgggcgaaatatggcaggctacgcagccgagcggaaagatcgccacactggcgctggatattccgctacaggcgaccgaaaaaacgcgttttcaggcatcgtgggaaaatcttgcctggaaacagtggaagctgttgcccggcgcggaacatttttccggtacgctggcgggaagcgtagaagacgggcagatgaaggttgcgatgcagcaggctaagatgccctatgaaaccgtttttcgcgcgccgctggaaattgaaaacggcgtcgcgacgcttagctggttgaagaatgagaacggctttcagcttgatggccgcgacattgacgtcaaagcaaaggcggtacatgcgcgcggcgggttccgctatctgcaaccgacgggcgacgaaccgtggctgggtattctggccggaatcagtaccgatgatggatctcaggcgtggcgctattttccggaaaacctgatgggcaaagcgctagtcgattaccttagcggcgcgattcagggcggcgaggcggataacgccacgttggtttacggtggtaacccgcacctctttccctataagcataacgaaggtcagtttgaagtgctggtgccgctacgcaatgcgacgtttgcttttcaacccgactggccggcgctaaaaaatctcaacattgaactggatttcctgaacgacggcctgtggatgcgttcggatagcgtcgatttgggcggggtgaaggccagcaaactcgcggcggcgattccggattattccaaagagaaactgctcattgatgccgatattaacgggccgggaaaagccgttgggccttattttgacgagacgccgctaaaagactcgcttggctcgacgctggcggagctccaattagatggcgatgtgaatgctcgcttacatcttgatattccgctggacggagaacaggttaccgccgagggcgatgtctcgttgcgtaataacagtctgtttattaagccgctaaacagcacgctcaaaaatctgaacggtaaattcagctttgtgaatggcgcgctaaaaagcgggccactgacggcaaactggtttaatcagccgcttaacctggatttcagtacgacggaaggggcaaaagcctatcaggtcgccgtcaacctgaacggtaactggcagccaacgcgtatgggcgtcttaccgccgcaactgaatgacgccctgagcggcagcgtgacgtggaatggtaaagtcggcatcgatcttccatatcacgctgacaccacttatcacatcgagctgaacggcgatctgagaaatgtgagcagtcacttaccttctccgctaaataaacccgcaggcgaagccattccggtgaacattcaggctgacggcaacctgaaaagttttgcgctaacggggagcgcagggagtaaaaatcactttaacagccgctggttattaaatcagaagctgacgttggatcgggctatctggacgacggacagccggacgattccgccattacctgctcaacaaggcgttgagctcaatctgccggcgctggatggcgcgcaatggctggcgttattccagaaaggcgcggcggataacgtgagcagttcggccgagtttcctcaacgcgtcacgttgcgtactcccgcgctatcgctgggcggccagcagtggaacaatttgagcgtcgtttcagccccctcgctgaacggaacaaaaattgaagcgcagggccgtgaggtgaacgccacgctactcatgcgcaaccatgcgccgtggctggcgaacattaagtacctgtactacaaccctggcgtcgcaaaaacgcacgcctcgtcaccaacgccgacatcgccgttggcttcggcgaacacgattagcttccgcggctggccggacttacagcttcgctgcgaagagtgctggctatgggggcaaaaatatgggcgtattgatggcgatttcgccatcaaaggcaatacgctgactctggcgaatggcctgatcgataccggattcgcccgtttgaaagcgaacggcgagtgggtgaatgcgccgggtaatgaacgaacctcgctgaaaggtagtctgcatggtagtaacctcgacacggctgccgggttcttcggcatctcgacgccaatccagaacgcgtcttttaacgtagattacgatctgcactggcgaaacccgccctgtcaacctgaggaagccacgctcaacgggattttacgtacgcgtctgggcaaaggcgagtttactgatctcagtagcggtcatgccggacagctactgcggctgctcagttttgatgcgttgctgcgtaagctgcggtttgacttcagagatacctttagcgagggcttctatttcgactctattcatagtaccgcgtggattaaagatggcgtcctgcatactgacgatacgctggtggatgggctggaagcggatattgcaatgaaaggttctgttgatctggtgcgtcgtcgtcttgatatggaggccgttgtcgcggcggaaatttccgccaccgtgggcgtcgctgccgcgtttgccgttaacccgattgtcggcgcggcggtatttgccgccagtaaagtgttggggccgctatggagcaaggtctccattctgcgttatcgcattaccggtccggtcgatgcgccgcagatcaacgaagttctgcgccaaccgagaaaagaaagccagcaatga

SEQ ID NO: 9473 - protein, 1266 aa, Salmonella enterica subsp. enterica serovar Typhi str. CT18
MRRLPGILLLTGAALIVIAALLVSGLRLALPHLDAWRPAILNKIESVTGVPVAASQLSASWQNFGPTLEAHNIHAALKDGGELSIKRVTLALDVWQSLLHMRWQFRDLTFWQLNFRTNTPLQSSDGEGIETSRLSDLFLRQFDHFDLRDSQISFLTLSGQRAELAIPQLTWLNGKERHRAEGEVSLSSLTGQHGVMQVRMDLRDDDGLLNNGRVWLQADDIDVKPWLGKWMQDNVALQTARFSLEGWMTLSKGEIAGGDVWLKQGGASWLGDNTTHTLSVDNLTAQISREQPGWQFYIPDTRITLDGKPWPSGALTVAWLPQQDVGGENHTRSDELRIRASNLELAGLEALRPLAAKLSPVLGEIWQATQPSGKIATLALDIPLQATEKTRFQASWENLAWKQWKLLPGAEHFSGTLAGSVEDGQMKVAMQQAKMPYETVFRAPLEIENGVATLSWLKNENGFQLDGRDIDVKAKAVHARGGFRYLQPTGDEPWLGILAGISTDDGSQAWRYFPENLMGKALVDYLSGAIQGGEADNATLVYGGNPHLFPYKHNEGQFEVLVPLRNATFAFQPDWPALKNLNIELDFLNDGLWMRSDSVDLGGVKASKLAAAIPDYSKEKLLIDADINGPGKAVGPYFDETPLKDSLGSTLAELQLDGDVNARLHLDIPLDGEQVTAEGDVSLRNNSLFIKPLNSTLKNLNGKFSFVNGALKSGPLTANWFNQPLNLDFSTTEGAKAYQVAVNLNGNWQPTRMGVLPPQLNDALSGSVTWNGKVGIDLPYHADTTYHIELNGDLRNVSSHLPSPLNKPAGEAIPVNIQADGNLKSFALTGSAGSKNHFNSRWLLNQKLTLDRAIWTTDSRTIPPLPAQQGVELNLPALDGAQWLALFQKGAADNVSSSAEFPQRVTLRTPALSLGGQQWNNLSVVSAPSLNGTKIEAQGREVNATLLMRNHAPWLANIKYLYYNPGVAKTHASSPTPTSPLASANTISFRGWPDLQLRCEECWLWGQKYGRIDGDFAIKGNTLTLANGLIDTGFARLKANGEWVNAPGNERTSLKGSLHGSNLDTAAGFFGISTPIQNASFNVDYDLHWRNPPCQPEEATLNGILRTRLGKGEFTDLSSGHAGQLLRLLSFDALLRKLRFDFRDTFSEGFYFDSIHSTAWIKDGVLHTDDTLVDGLEADIAMKGSVDLVRRRLDMEAVVAAEISATVGVAAAFAVNPIVGAAVFAASKVLGPLWSKVSILRYRITGPVDAPQINEVLRQPRKESQQ

SEQ ID NO: 9474 - DNA, 3801 bp, Escherichia coli CFT073
  CDS (1)..(3801): transl_table=11
gtgaggcgattgccggggattttactgcttactggagccgcgctcgttgtgatcgctgccctgctggttagcggcctgcgtattgctttaccgcatcttgacgcctggcgtccggaaatcctcaacaaaatagaatccgcgactggcatgccggtagaagccagtcagctctcagccagctggcagaattttggtccgacgcttgaagcgcacgacatccgtgcagaactaaaagatggcggcgaattttcggttaaacgcgttactctggcgctggatgtctggcagagcctgttacatatgcgctggcagtttcgcgacctcactttctggcagctgcgttttcgcaccaacactcctatcaccagcggcggtggtaatgatagcctggaagccagtcacatcagcgatctgtttcttcgtcaatttgaccatttcgatctccgcgacagtgaagtcagtttcctgacgccatccggtcagcgcgccgagctggcgatcccacagctcacctggctgaacgatccacgtcgacaccgtgcggaaggcctggtaagcctctccagccttaccggacagcacggcgtgatgcaggtgcgtatggatttgcgcgatgatgaggggttgttaagcaatggtcgcgtctggctccaggcggatgacatcgacctgaagccgtggctcggtaaatggatgcaggacaatattgcgctggaaacggcacagttctcccttgaaggctggatgacgatcgacaaaggcgatgtaaccggcggtgacgtctggctgaaacagggcggtgccagctggttgggcgagaaggaaacacatacgctgtcggtggataatctgactgcgcatattacgcgtgaaaatccgggatggcagttctctattcccgatacacggatcacgatggacggcaaaccctggccgagcggagcattgacgctggcctggataccggaacaggacgttggcggcaaagacaataaacgcagtgacgaactccggattcgtgccagtaatctggagctggcaggcctggagggcgtacgcccgctggtcgcgaaactttcacctgcactgggtgatgtttggcgctccacacaaccgagcggcaagattaacactctggcgctggatatcccgcttcaggcggcagacaagacccgttttcaggcatcgtggagcgatctggcctggaagcaatggaaattattaccgggtgcggaacacttctccgggacgctttccggcagcgtagaaaatggtttgcttactgcgtcgatgaagcaggcaaagatgccttacgaaacggtattccgtgcgccactggaaatcgccgacggccaggcaacgataagctggctgaacaatgacaaaggtttccagctggatgggcgtaatattgacgttaaagccaaagccgtccatgcgcgcggcggttttcgttacctgcaacctgctaacgatgaaccctggctgggtattctggctggcatcagtaccgatgatggttcacaagcctggcgctatttcccggaaaacttgatgggtaaagacctggttgattacttaagtggcgcgattcagggcggtgaagcggataacgcgacgctggtttatggtggcaatccgcaactcttcccctataaacacaacgaaggtcagtttgaagtgctggtgccgctgcgcaacgcgaagtttgccttccagccggactggcctgcattaactaaccttgatattgaactggactttattaacgacggtttatggatgaaaaccgatggcgttaatctgggcggcgtgcgcgcgagtaatctcaccgcagtgctccctgactactcaaaagaaaaactgctgattgacgctgacattaaaggtccgggtaaagccgttggcccttactttgatgagacaccgctgaaagattccctgggtgcgaccctgcaagaactccagctcgacggcgatgtgaatgctcgcttacatcttgatatcccgctgaacggcgagttggtaaccgcgaaaggtgaagtgacgctgcgtaataacagtctgtttatcaaaccactcgacagcaccctgaaaaatttgagcggtaaattcagctttatcaatggcgatctgcaaagtgaaccactgacagcaagctggtttaatcagccgttgaacgtggatttttccaccaaagaaggggcaaaagcctaccaggtcgcggtgaatctcaacggtaactggcaaccagcgaaaaccggctttctgcctgcagcggtgaacgaagcattaagtggcagcgtggcgtgggatggtaaagtgggcattgagctgccttatcatgctggcgcgacgtataacgtagagctgaacggcgatctgaagaatgtgagcagtcacttaccttcaccgttagccaaacctgcgggtgaaccactaccggtaaacgttaaggttgatggcaatctcaacagctttgaattaaccggacaggctggtgcggataaccatttcaatagctgctggttgctcggtcaaaagctgacgctcgatcgtgctatttgggcggcagacagtaaaacgctcccgccgttgccggaacaaagtggcgttgaactcaatatgccgccgatgaatggtgccgagtggctggccctgttccagaaaggcgcggcggagagtgtcggtggtgcagcgagtttcccacaacacataacgttacgtacgcctatgttgtcgctgggaaatcagcaatggaataacctgagtattgtttcgcaaccgacggcaaatggcaccctggttgaggcgcaagggcgtgaaatcaacgccacgctggcgatgcgtaataacgcaccgtggctggcgaatatcaaatatctttattacaacccaagcgtggcgaaaactcgtggtgattcaacacagtcatcacctttcccgacaacggaacgcattaacttccgtggctggccagacgcacaaatacgatgcgcagagtgctggttctgggggcaaaaattcggtcgcattgacagtgatatcaccatttctggcgatacgttaacgctgactaatggactgattgatactggttttgcgcggctcactgccgatggtgaatgggttaacaatccggggaatgaacgaacctcgctgaaaggaaaactgcgcgggcagaaaattgatgccgccgcagaattttttggtgtcacgacgcccatacgccagtcgtcatttaatgtggattacgatttacactggcgcaaagcaccctggcagccagatgaggtgacgttgaatggcatcattcatactcaactgggtaaaggcgaaattaccgaaatcaataccggacatgccgggcaattgctgcgcttattgagcgtagatgccctgatgcgtaagctgcgttttgatttcagagacacttttggcgaagggttctattttgactccattcgcagcaccgcgtggattaaagacggcgttatgcacaccgacgacacgctggtggatggcctggaagcggacatcgctatgaaagggtcggtaaatctggtacgtcgcgacctgaatatggaagcggttgtcgcaccagagatttctgcgacggtgggcgtggctgcggcctttgcggttaaccccattgttggcgcggcagtgtttgccgccagtaaagtgctgggaccgctgtggagcaaagtctccattttgcgctatcacatttcgggtccgctggacgatccgcaaatcaacgaagtgttgcgacaaccgcgcaaagaaaaagcgcaatga

SEQ ID NO: 9475 - protein, 1266 aa, Escherichia coli CFT073
MRRLPGILLLTGAALVVIAALLVSGLRIALPHLDAWRPEILNKIESATGMPVEASQLSASWQNFGPTLEAHDIRAELKDGGEFSVKRVTLALDVWQSLLHMRWQFRDLTFWQLRFRTNTPITSGGGNDSLEASHISDLFLRQFDHFDLRDSEVSFLTPSGQRAELAIPQLTWLNDPRRHRAEGLVSLSSLTGQHGVMQVRMDLRDDEGLLSNGRVWLQADDIDLKPWLGKWMQDNIALETAQFSLEGWMTIDKGDVTGGDVWLKQGGASWLGEKETHTLSVDNLTAHITRENPGWQFSIPDTRITMDGKPWPSGALTLAWIPEQDVGGKDNKRSDELRIRASNLELAGLEGVRPLVAKLSPALGDVWRSTQPSGKINTLALDIPLQAADKTRFQASWSDLAWKQWKLLPGAEHFSGTLSGSVENGLLTASMKQAKMPYETVFRAPLEIADGQATISWLNNDKGFQLDGRNIDVKAKAVHARGGFRYLQPANDEPWLGILAGISTDDGSQAWRYFPENLMGKDLVDYLSGAIQGGEADNATLVYGGNPQLFPYKHNEGQFEVLVPLRNAKFAFQPDWPALTNLDIELDFINDGLWMKTDGVNLGGVRASNLTAVLPDYSKEKLLIDADIKGPGKAVGPYFDETPLKDSLGATLQELQLDGDVNARLHLDIPLNGELVTAKGEVTLRNNSLFIKPLDSTLKNLSGKFSFINGDLQSEPLTASWFNQPLNVDFSTKEGAKAYQVAVNLNGNWQPAKTGFLPAAVNEALSGSVAWDGKVGIELPYHAGATYNVELNGDLKNVSSHLPSPLAKPAGEPLPVNVKVDGNLNSFELTGQAGADNHFNSCWLLGQKLTLDRAIWAADSKTLPPLPEQSGVELNMPPMNGAEWLALFQKGAAESVGGAASFPQHITLRTPMLSLGNQQWNNLSIVSQPTANGTLVEAQGREINATLAMRNNAPWLANIKYLYYNPSVAKTRGDSTQSSPFPTTERINFRGWPDAQIRCAECWFWGQKFGRIDSDITISGDTLTLTNGLIDTGFARLTADGEWVNNPGNERTSLKGKLRGQKIDAAAEFFGVTTPIRQSSFNVDYDLHWRKAPWQPDEVTLNGIIHTQLGKGEITEINTGHAGQLLRLLSVDALMRKLRFDFRDTFGEGFYFDSIRSTAWIKDGVMHTDDTLVDGLEADIAMKGSVNLVRRDLNMEAVVAPEISATVGVAAAFAVNPIVGAAVFAASKVLGPLWSKVSILRYHISGPLDDPQINEVLRQPRKEKAQ

SEQ ID NO: 9476 - DNA, 3795 bp, Photorhabdus luminescens subsp. laumondii TTO1
  CDS (1)..(3795): transl_table=11
gtgaggcgactgccgggagtattattagcgacagccgcaatagtcattatcattgtggctttgcttgttagtggattacgttttatcctgccacatattaatgattaccgcccacaattattcgctaaaattgagtcaattattggtgtacctattgatgctggatatattgcgggagaatgggaatctttcgggcctgtttttgaattacgtgatatcagtgtaaaaaccgcaaatgcagatgtgaaagccaaaaagatcacggttgcattggatatctggttatctttactaagaatgcgttggaatttccgcgatcttactttttatcagttacaagtagattactatcaaccgctgtttaatgatcaaaacggtaatatgttttcccaatcggatctattttctgatctgtttctggagcagtttgatcattttaatctgcaagatagccgttttactttccttactccttctggtgaacgggctgatcttctattaccacaattaacctggctgaataaagataatcgtcaccgagctcaagggaaaattagcctctcttcgatcaataatcagcatggggatatacaagttaaatttgatttgcatgacactaatggcgtattggataacggtactatttatttacaggcagataatgttgatgttcatccgtggttaagccattggttgcaggataatactgggctgaaggatgctgagtttagtttgtctagttggattatgctgaaagatggtcggattgatggtggtcaactgcaactccgtcagggaaaagctaattggaaagttgctaacaaatcccacaacctttctgtcagtgatctggtgttacggatgcgtcgccaagatggtggttggttgtttgatgcacctgaattggcaaatttaatcactgatggtcagcaatggccgtcaggaaaagtatctgtgctctatttgccggaagccaagagagttgatggtcatgatcattggcgtgtccgggcaaaaaacattcaacttgaacggctaagtagcattttaccgactttttcttttttgacccctgatattgtgaaggattggcagcatcgtcagccacaaggattggtaaagtatcttgccctcgatattacacctaaaatggcagatgattcccgaatcagtatgcaatggcagaatgtcagttggcagcgttggcaggaattgccttctattgataatttttctggtgcttttaatggcagcttgcggcaaggcaaactgagttttacattgaagaatagtgtcgttgattatcgagatatgtttctggcaccgtttgagatatcccaaagtcatggcgaaatactctggcggcaaggtaggcgaggtttacaactttggagtcaaggattggatttgcaggcgaaatcattgtgggtcaatggtgattttcgttatcaacagcctaaagaacagcctccggcgctaagtattctggcgggagtacgggtttatgacgcaggtgatgcctggagatattttccagaacctttgatggggacaccactgactgactatctaacagcttcaattattaaagggcagatagaaaacgcgacttttgtttttcaaggcaatccaaaagatttcccatttgcaaagaataatggccagtttcaagtttttgctccattgcgtcatgcgacttttcagtaccaaccaaactggccggcactgctggatttcaatattgatcttaatttccagaataacggtctatggatgtttgctccgcaaacggcacttggtgaagtgaaagcgagtaatctttcagcagtaattcctaattatcgtagcaagaaattattaatcgacgctgatcttttgggagatggcaaagatattcatgaatattttacccgtagcccgttagcaaattctgttggtgaaacgctggatatattgcaggttggtggtcagattgcgggtaatttgcatttggatattccactcaatggtggcaatgtggatgcccgtggcgaggtgactttaaaaaataatcacttgttgattaagcctctagatagcgaaatgaaaaatgtgagtggccggtttcgctttgataatggtaatttacaaagcggaaaattatcggcccaatggcttgggcagcctgttacagttgatttttctactaaaagtttacccaaaaactaccgagtcgatgttggtctgaatgcgcgttgggctgtggcaaaattatctaaattttcaccagcgattgctaaagcgttttctggctctgttgattgggaagggaaggtcggtgtcagtttgccgtttcagggcaagcctcaatatgatatgaaaatcgacgttgatttatcacaagtggatagttatttatctgtcctgaaagcggatgaaccgcgtgctcttcatattctggctgatggtgatatggagcagttgcaagtaaaaggcactttggataaacagtatgcatttaatactcaatggcgtctggcagggaaaagcactcaactgtcacgtggaattttacaaggcagcgataaaattcctgaattgcctgaaaaatccctattggaattgaatcttccggcagttgagggggaagagtggttagggttgattgcgcctctgacttctggttcttcattggcaggtatgtcaatgttgccacagcatctgcatatatcacttccatcattggatgcggggggacaacgttggaatcagttatcgttggatgtggaaaaacagctttggggaacgcagatcacggctaatagtcgggaaatcaacggtaaacttaatatccgtaatagtggctcttggcaaatgaatttgagccatctgtactatagtcctctgcaacatagctctcagcaagctgaatcggatttacctaagcaatctcagacaggcacaactctgcgttattcgttgaaccaatggccttcattagacatcatctgttctgaatgttggattatgggattgaaacttgggaaggtgtctggctccctgattccagaaggtaattcgctggtattaagagatggaatagtagaaaacagtgtcagtaaattaactttggcaggtcgttggcaagaaggggctgtagggaataatactcgtattatggggcaattttctggtgaaaagtttgatgagatggcatcttaccttggtatagttgtaccgattgttaattcaccgtttaccttcggttttgattttaattggtgggatacaccgtggaaacccaattttcagacgctgaatggcaatcttaagagtgacttaggcaaaggtgctattgaaaaattgggtgggggaagtgctagccaattactaaaattagtcagttttgatgctttgttacgtaaattacagctcgatttcagcgatacctttagccaggattttgaatttgattcaattcgtggtgatgtttcagtaaaaaatgggatactcaagactgaaaatttacgagtcgatgggttgattgcggatgtaataacgaaaggtgagatcgatcttgttcgccaacagatcaatatagaagccatcgtcacgccggagatttctgctactgtgggagtagcgacggcttttgtcatcaatccgatggcaggtgctgcattattcgcagcgaccaaggttttggggccgttatggaataagatatccgttattcgttaccggattactggtaatcttgaacaaccgaaaattgatgaagttctgcgtcagcttaaggagaatagaggaacatga

SEQ ID NO: 9477 - protein, 1264 aa, Photorhabdus luminescens subsp. laumondii TTO1
MRRLPGVLLATAAIVIIIVALLVSGLRFILPHINDYRPQLFAKIESIIGVPIDAGYIAGEWESFGPVFELRDISVKTANADVKAKKITVALDIWLSLLRMRWNFRDLTFYQLQVDYYQPLFNDQNGNMFSQSDLFSDLFLEQFDHFNLQDSRFTFLTPSGERADLLLPQLTWLNKDNRHRAQGKISLSSINNQHGDIQVKFDLHDTNGVLDNGTIYLQADNVDVHPWLSHWLQDNTGLKDAEFSLSSWIMLKDGRIDGGQLQLRQGKANWKVANKSHNLSVSDLVLRMRRQDGGWLFDAPELANLITDGQQWPSGKVSVLYLPEAKRVDGHDHWRVRAKNIQLERLSSILPTFSFLTPDIVKDWQHRQPQGLVKYLALDITPKMADDSRISMQWQNVSWQRWQELPSIDNFSGAFNGSLRQGKLSFTLKNSVVDYRDMFLAPFEISQSHGEILWRQGRRGLQLWSQGLDLQAKSLWVNGDFRYQQPKEQPPALSILAGVRVYDAGDAWRYFPEPLMGTPLTDYLTASIIKGQIENATFVFQGNPKDFPFAKNNGQFQVFAPLRHATFQYQPNWPALLDFNIDLNFQNNGLWMFAPQTALGEVKASNLSAVIPNYRSKKLLIDADLLGDGKDIHEYFTRSPLANSVGETLDILQVGGQIAGNLHLDIPLNGGNVDARGEVTLKNNHLLIKPLDSEMKNVSGRFRFDNGNLQSGKLSAQWLGQPVTVDFSTKSLPKNYRVDVGLNARWAVAKLSKFSPAIAKAFSGSVDWEGKVGVSLPFQGKPQYDMKIDVDLSQVDSYLSVLKADEPRALHILADGDMEQLQVKGTLDKQYAFNTQWRLAGKSTQLSRGILQGSDKIPELPEKSLLELNLPAVEGEEWLGLIAPLTSGSSLAGMSMLPQHLHISLPSLDAGGQRWNQLSLDVEKQLWGTQITANSREINGKLNIRNSGSWQMNLSHLYYSPLQHSSQQAESDLPKQSQTGTTLRYSLNQWPSLDIICSECWIMGLKLGKVSGSLIPEGNSLVLRDGIVENSVSKLTLAGRWQEGAVGNNTRIMGQFSGEKFDEMASYLGIVVPIVNSPFTFGFDFNWWDTPWKPNFQTLNGNLKSDLGKGAIEKLGGGSASQLLKLVSFDALLRKLQLDFSDTFSQDFEFDSIRGDVSVKNGILKTENLRVDGLIADVITKGEIDLVRQQINIEAIVTPEISATVGVATAFVINPMAGAALFAATKVLGPLWNKISVIRYRITGNLEQPKIDEVLRQLKENRGT

SEQ ID NO: 9478 - DNA, 3831 bp, Erwinia carotovora subsp. atroseptica SCRI1043
  CDS (1)..(3831): transl_table=11
gtgaggcgactgcccggaatattagtcatcacgggtgccactcttgtcgtgatggttgcgctgttagtcagcggcttaagactggtgctgccacagctcgatcatttccggccacagctggtggcctgggcgcagtctgctgccggtgttccgttagaaatcggctcaatgacagggcgctgggagtcctttggccccacgctggaaattgaaaaatttcgcacgtctctgccggaatctgactggcaggttgatcgcattacgctggcgctggatgtgtggcagtcgctgctgcacgggcgctggcagtttcgcgatcttacatttcatcagttaaagcttgatcttaatagccaatttactgggcagcagcaggatagcaaactgatggagtcaggaaaggtcagcgatcttttcctgcgccagtttgaccactttgatctgcgtgatagccagattacctttcttaccccttccggttcccgagcggagctgagtattcctcaactgacctggctgaactccgacaaacgtcaccgtgcagaagggttgatcagcctgtcgagttttaacggccagcacggtgtggtgcagatgcgcatggatttgcgcgatgagcaggggttgcttggcaacggtacgttctacctgcaagctgacaatatcgatatgaagccgtggctcagccgctggatgaaaaacaacactgggctggaaagcgcagattttagtctggcggcgtggctcaatgtccgtgatggtggcatccacagtggtgatgtacgccttaatcaggggacggcaagctggggtgagggaagtgacgcgcatcgcctgaacgtggatgatatgacgttacatgtcagccgtcaggaaaatggctggcaggtggatgttcccacgttgaatctggcaacggatggcgtcgcttggccgaaaggtcggctttccgccctgtggttgccgaaaaatgaacacatgctggggcccgatcggcaggaagagctgcgcattcgagctagtaatctggcgctggagcgtgtgagcacgctgcttcctttgttgtccggcacaacgccagccttgaaagcgcgctgggatgagctgcaaccgatgggtacattgaattccgttgccgtcgatatccctctgcaacagccagagagaagccgttttcatgccaattggcaggatgtgagctggaagcagtggaaattgctgccgggagtcgatcacttctccggttctgcccgcggtagcgtcgagcgtggtcaggtcagcgtagcgttaaagcagagtacgctgccctatgtggatatgttccgcgcaccgctggaaatcaagcaggccagcggtacgatagactggcgtaatgatgcgcaaggcctgtcgctctggagccatgggctggatgtacaggcgaaatcactatgggctaacggtgatttccgttacgaacagccagtaaaacaggaaccgaaactggatattctggcggggatccggctgaccgatgcggcggatgcctggcgctactatcctgaactgtttatgggcactgatttggttgattatctgagcggtgcgctgaaaggtggccgcgtcgataatgcgacgctgatctttgctggtaatccgcagcatttcccgtatacccacagcgaaggccagtttgaagtctgggtgccggttaaggatgccacctttgagttccagccgggctggcctgcgctgacgccgctggatatcaatttggattttgccaataacggtctgtggatgtttgcgccgcaaatctggctgggtaaggtggaaggcaaaaatattagcgcggtcattcctgattatgaaaaagagatgctgcttattgatggcgaactggatggtccagggcctgaagtgggtaattattttcatcagacgccgctgaaatcctcgctgggtaccgcgctggatgagctgaaaattggcgggccggtgaaaggcacactgcatctggatattccgcttgtcggtgacgatgtccgcgccagtggcgatatcgcgctgaataataacagcctgtacatcaaaccgctggataccacgattaataatctcacgggtaagttccgctatgaaaatggtaatttacgcagtgaaacgctacaggcgaattggctgaatcagccgatggcggtcaattttacgacggaagagcaagcgaaggcttttctggtgaatgtgggcttgcagggagactggcagccagcgctattgcccggtttaccagcatcggcaagcaaagcgttgtccggcgcggctaactggaaaagtacggttgctgtcaacctgccgcactcgggtaaaacaacctacgatgttgatgtacaagctgatttaaataaagtaagtagtcacttacctaacccgctaaataagcctgctggcgagaacatgccgctggaagttaaagccagcggtgacctgaatggttttactatgcaggggcgagtgggcaaagataaccgtttcaatagccaatggctgctgaaaggcgacaccgtgacgctggcgcgggcaagctggcagaatgcggcagcaacggcaccggcattaccagaagattccgctttggtgctcgatctcccgccgctggatgcagaaagctggctggggcttctgccatcgctgcgagcctcgacgtcgtcggaagggaaaaaagcacatagttctcttcgttttcctgaagcggtaacgctgcgaacgcctgagctgcaactgttagggcagcagtggcacgatctggaaattacgcgaaaaaatacgcttggcggcagcgaagtacaggcgaaaggacgtgaaattgacggaaaggttgagatacccaatcgcggcatgtggcgcagcgacatcaattatctctactacaatcctcagtggaaaggcaacgaagcgaccaacccggtggcgctggcggagaaaaaatcgccgctgaacgacccaagtatcagctttgaggactggccgtcgctggcggttaactgtcgccagtgctggattatcgggcagaatatggggcgtattcagggaacgatgttgccagaaaaggaaaagttaacgctgacggacggtatcattgatacaggcaaggctcgtctgacggtaaacgggtcctggcaggaaaacgcagaaggcgtgcggactgcgctaaaaggccgcctgacgggagatagtctggaacagaatgctaactggtttggtgtagattcaccgctgaaggccggttctttcgatgtagattacgatctgtattggcgcgggacgccttgggcaccggatattgccagcctgagtggaatattgcacacgcgcattggcaaaggtgaaattgccgaagtcggtgccggtcaagcgggtcaattactgcgtttattgagcttcgatgcgctgatgcgtaagctgcggttcgattttagtgatacgtttggtcgtgggttctacttcgactcgattagcagtaccgcatggattaaagatggtgtgctgcatactgatgatatgctgatcgacgggttggaggcggacatcgcgatgaaaggcgatctcgacctcgctaagcgacaggtcaatatggaagcggttatcgccccggaaatttctgcgacggtgggcgtggcgaccgcatttgccgtcaatccggttgtgggggccgcggtgtttgctgccagtaaagtactggcaccgctatggaacaagatttcgctgattcgctaccagatttccggtagcctcgatcagccaaagattcaggaagtgctgcgtgagccgaacaagaagaaaggcgaataa

SEQ ID NO: 9479 - protein, 1276 aa, Erwinia carotovora subsp. atroseptica SCRI1043
MRRLPGILVITGATLVVMVALLVSGLRLVLPQLDHFRPQLVAWAQSAAGVPLEIGSMTGRWESFGPTLEIEKFRTSLPESDWQVDRITLALDVWQSLLHGRWQFRDLTFHQLKLDLNSQFTGQQQDSKLMESGKVSDLFLRQFDHFDLRDSQITFLTPSGSRAELSIPQLTWLNSDKRHRAEGLISLSSFNGQHGVVQMRMDLRDEQGLLGNGTFYLQADNIDMKPWLSRWMKNNTGLESADFSLAAWLNVRDGGIHSGDVRLNQGTASWGEGSDAHRLNVDDMTLHVSRQENGWQVDVPTLNLATDGVAWPKGRLSALWLPKNEHMLGPDRQEELRIRASNLALERVSTLLPLLSGTTPALKARWDELQPMGTLNSVAVDIPLQQPERSRFHANWQDVSWKQWKLLPGVDHFSGSARGSVERGQVSVALKQSTLPYVDMFRAPLEIKQASGTIDWRNDAQGLSLWSHGLDVQAKSLWANGDFRYEQPVKQEPKLDILAGIRLTDAADAWRYYPELFMGTDLVDYLSGALKGGRVDNATLIFAGNPQHFPYTHSEGQFEVWVPVKDATFEFQPGWPALTPLDINLDFANNGLWMFAPQIWLGKVEGKNISAVIPDYEKEMLLIDGELDGPGPEVGNYFHQTPLKSSLGTALDELKIGGPVKGTLHLDIPLVGDDVRASGDIALNNNSLYIKPLDTTINNLTGKFRYENGNLRSETLQANWLNQPMAVNFTTEEQAKAFLVNVGLQGDWQPALLPGLPASASKALSGAANWKSTVAVNLPHSGKTTYDVDVQADLNKVSSHLPNPLNKPAGENMPLEVKASGDLNGFTMQGRVGKDNRFNSQWLLKGDTVTLARASWQNAAATAPALPEDSALVLDLPPLDAESWLGLLPSLRASTSSEGKKAHSSLRFPEAVTLRTPELQLLGQQWHDLEITRKNTLGGSEVQAKGREIDGKVEIPNRGMWRSDINYLYYNPQWKGNEATNPVALAEKKSPLNDPSISFEDWPSLAVNCRQCWIIGQNMGRIQGTMLPEKEKLTLTDGIIDTGKARLTVNGSWQENAEGVRTALKGRLTGDSLEQNANWFGVDSPLKAGSFDVDYDLYWRGTPWAPDIASLSGILHTRIGKGEIAEVGAGQAGQLLRLLSFDALMRKLRFDFSDTFGRGFYFDSISSTAWIKDGVLHTDDMLIDGLEADIAMKGDLDLAKRQVNMEAVIAPEISATVGVATAFAVNPVVGAAVFAASKVLAPLWNKISLIRYQISGSLDQPKIQEVLREPNKKKGE

SEQ ID NO: 9480 - DNA, 3924 bp, Yersinia pseudotuberculosis IP 32953
  CDS (1)..(3924): transl_table=11
gtgaggcgactgcccaaaataatgtttgcgacaggcgccacaatcattgttgtggtggcgctgttggtcagtgcgctacgcatgatgctgcctctcattaatgagtatcggccgcaaattgtggctaagatccagtcggtcagcggtatcccactggacgtagggtttatgcagggaacctgggaaacatttggcccgacgttggaattacgcgatattcgcgcccaaatgccgaaggctgacttgcaggttcaacgggtgacgctggcactggatgtgtggcagtcactgctgcactggcgttggcaattccgtgatttgaccttctatcagttgcagttggatctgcacaccacactggatgcgacgcagaataacggcagtaaccttgaaaccggtaatgttcataatatcttcctgcgccagttagatcgttttgatctgcgtaatagccgcatctcttttctgacgccatctggcccccgtgccgagctggaaatcccacaactcacctggctcaattccagcacccgccatcgtgccgaagggcaaattagcctatcgaccattaatggtcagcacggtgtggtgcaggtccgtatggatttgcacgataatcagggcattctgaataatggcacggtatatatgcaggccgataatatcgaccttaaaccgtggattagccgttggttgcagaataataccggtctggataatgccgaattcagtttggcggcttggctgagcattaaaagtggtgaaatttaccggggtaatgtgctgctcagtcaggggcaggccaattggacggtgggcagtaattcacatcaattatctgtcgataattttgtgctggaaggccgccgtcagggcaatggttggcaaatcgacgcgccagtactgaacctaaaaaccgatggtcaagcctggccgaaagggcgcttatcggccctttggctaccggagaatacccaatttattggccctgagcagcgtcaagaattacgtattcgagccagcaatcttcagttggaacggattgggccgctgttacccaccctgtcaccttttaccccagaactgctggcccgctgggcagatttacaaccacaagggtatgtcgatgcactggcgttggatatccctatcagccaaccggagaccacccgttttcaagccaaatggcacgatgtcagttggcagtactggggccaactacccggagttaatcattttgatggtgagttgagtggctccgcacgtcttgggcgtcttaacatcaaccttaaaaacagtctcttgccgtatggtgacctgttccgcgccccgttggaggttagccaggcgagtggcgcgctaaactggcgtattgatgataaaggctgggcgctgtggagtgatcaactggatgtccaggctaaatcgttgtggggcaacggcagtttttattatatgcagcctaatcagaagccgtcgcagcttaatcaagcccagccgtggctgaaaatactggcgggcatccgcctgtatgatgccaccgatgcctggcgttacttcccggtctcgcttatgggtgagaaactggccgattatctgacggaggcgctacagggggggcaggtagataatgcgacactggtatataacggtaatcctcatgattttccttataaaaataaagagggtcagttccaggtctatgtcccactacgtaatgcggttttccagtttcaaccggactggccagccttagataatttggccattgaccttaacttcctcaatgaaggcttatggatgaatgcgccacacaccctgttgggcaaggttactggcagcaatatcagcgccatcattcctgattacttgaaagaaaagctgtatgtcgatgcggatgtcctgggtgaagggcgcgatgttcatgactactttaccgcgacaccacttaaggattcggtggccgaaacgctgaatgaattgcaggtgggtggaaaaattagtgggcgcttacacctggatatcccgctggaagaagagagcatcactcatgccagcggtgaagtgaccttgaataacaacagcctgctggttaagcccctgcaaagccaactggaaaatatcaacggtaaattccgcttctatgatggcaatttggagagcgagacgttatcggccaactggtatgggcaaccattgacggttaatttcaccacgaaggagcagccaaaggacttcttggtgaatgttgggctacagggcgattggctacctgctaaattgcccggtgtaccggattctcttgcgaagatgctcagtggcagtgccaattggcaaggtaaagttgcggtgaaattgccccaacacggtaaaccagattatcaagtcgatgtcagcgcagacttaaagaaagtgagcagtcacttaccttcgccgctagataaaaacagcggtcaggcattgccactgcatgttcaggtgaacggtgggctggaggcatttaccctctctggcagcgcgggtaacaacaatgcctttaacagccagtggttattgcaaggcgagaaagttgaactggcccgcgccatctggcaaaccgacagtaaaaaaattccatcgttgcctgatgataaagcgctggtatttaaattaccggccattgatggtgagcgttggctggcattattggcccccgagctggcgacggccgcttcgccgtttgctgcatcattttcttcgccttctgcgacatcattcactcaaccgaagatcaaaggcagtaaaaccaatgtcatcttaccgaatcggctgacattacaaacccccgaactgttggtgggtgggcaggcctggcaccaactgacgttacaggccgatcccctgccaagtgggatgaaaatcaccgcgaaggggcaagaggtggacggtagcctgttaatggcagactatgggccatggcatgctgatctcaattatctttattacaacccacaatggggcagccgtgaggcaaataacccgctggcgcaagcggtattgcaggagcctacggtattgcagaagccacagcctcccagtggtatatcattcagtgattggcctgcgctgcaattgcgctgtaaggcatgttggatactggggcagaatatcggccgggtgaacgcggacctaacaccgaaaggctcggctctgatactgacgaacggcttaattgaggcgggaaatgggcgggccactattaccggcgagtggcagcaagatcgcgctggtgataaaaccacactgaacatcggcttgaacgggccaagaatagatgaaaccctctcattctttggcctgaccaccctgataaaaaatgcctcttttgcgattaacgccgatctaaactggcgcggtgtcccttgggagccacagattaataccctcagtgggacgttaaaggggcggctaggcagagggcagctcactgatcttggtgggggccgtgcgggccagttactgcgtctggtcagctttgatgcactattacgtaagcttcaactcgactttagtgatacgtttagccgtgacttcgcatttgactctattcggagtacggccacccttaaaaatggggtgatgagtaccaatgacttagtgattgatgggctggcggcagatatcgccatgaatggcaaggttgatctggttaagcgccaaatcgccatggaagcggtcatcacaccggaactttccgccactgtaggtgttgccaccgcctttgcgatcaacccgatagtgggggcggcagtgtttgctgcctcgaagattttagggccgttatggagcaaggtttcgctgatccgctatcagattaccggtagtctggatcaaccgaccatccatgaagtgttacgtcagctaaaggagaatgaggcgccatga

SEQ ID NO: 9481 - protein, 1307 aa, Yersinia pseudotuberculosis IP 32953
MRRLPKIMFATGATIIVVVALLVSALRMMLPLINEYRPQIVAKIQSVSGIPLDVGFMQGTWETFGPTLELRDIRAQMPKADLQVQRVTLALDVWQSLLHWRWQFRDLTFYQLQLDLHTTLDATQNNGSNLETGNVHNIFLRQLDRFDLRNSRISFLTPSGPRAELEIPQLTWLNSSTRHRAEGQISLSTINGQHGVVQVRMDLHDNQGILNNGTVYMQADNIDLKPWISRWLQNNTGLDNAEFSLAAWLSIKSGEIYRGNVLLSQGQANWTVGSNSHQLSVDNFVLEGRRQGNGWQIDAPVLNLKTDGQAWPKGRLSALWLPENTQFIGPEQRQELRIRASNLQLERIGPLLPTLSPFTPELLARWADLQPQGYVDALALDIPISQPETTRFQAKWHDVSWQYWGQLPGVNHFDGELSGSARLGRLNINLKNSLLPYGDLFRAPLEVSQASGALNWRIDDKGWALWSDQLDVQAKSLWGNGSFYYMQPNQKPSQLNQAQPWLKILAGIRLYDATDAWRYFPVSLMGEKLADYLTEALQGGQVDNATLVYNGNPHDFPYKNKEGQFQVYVPLRNAVFQFQPDWPALDNLAIDLNFLNEGLWMNAPHTLLGKVTGSNISAIIPDYLKEKLYVDADVLGEGRDVHDYFTATPLKDSVAETLNELQVGGKISGRLHLDIPLEEESITHASGEVTLNNNSLLVKPLQSQLENINGKFRFYDGNLESETLSANWYGQPLTVNFTTKEQPKDFLVNVGLQGDWLPAKLPGVPDSLAKMLSGSANWQGKVAVKLPQHGKPDYQVDVSADLKKVSSHLPSPLDKNSGQALPLHVQVNGGLEAFTLSGSAGNNNAFNSQWLLQGEKVELARAIWQTDSKKIPSLPDDKALVFKLPAIDGERWLALLAPELATAASPFAASFSSPSATSFTQPKIKGSKTNVILPNRLTLQTPELLVGGQAWHQLTLQADPLPSGMKITAKGQEVDGSLLMADYGPWHADLNYLYYNPQWGSREANNPLAQAVLQEPTVLQKPQPPSGISFSDWPALQLRCKACWILGQNIGRVNADLTPKGSALILTNGLIEAGNGRATITGEWQQDRAGDKTTLNIGLNGPRIDETLSFFGLTTLIKNASFAINADLNWRGVPWEPQINTLSGTLKGRLGRGQLTDLGGGRAGQLLRLVSFDALLRKLQLDFSDTFSRDFAFDSIRSTATLKNGVMSTNDLVIDGLAADIAMNGKVDLVKRQIAMEAVITPELSATVGVATAFAINPIVGAAVFAASKILGPLWSKVSLIRYQITGSLDQPTIHEVLRQLKENEAP

SEQ ID NO: 9482 - DNA, 3930 bp, Alkalilimnicola ehrlichei MLHE-1
  CDS (1)..(3930): transl_table=11
gtgggtcgtacaggcctgaacggggccggagagtcgcccttgcatccagcgttcactgacaagcttcccggctatgccctgcgcgccctcgccctgggcctgctgttgctggccctggtgttgtggaccctgcgtctggcgttgccggccctggtgcccgactaccgggccaccctggaactgcgactggccgaggaactggatcagccggtggcggtggaagcgctccggctcgactggcagggctggcggccggtgctgtacgccgacggcgtcgaggtgggccccgacgatcaggccctggggtttcaggccctgcgcgtggagctggccccggtcgcgagcctggtgcactggcagccggtggtgcgggacctggcgctggtggggttgcgcctggaggccgggctggacgagcgcggccggccggtggtccgggggctggaggggctgaccctggccgaagagcccttcgatctggagcggcttgccgacttcgactggtctttactgcccgcgggcatgcgcctggaggacgccgaggtgctttggcacggcgccgatggccggctctggcgcctgcccggggtggcgcggctggagcgcgatgcccgcaggctgcgcgcggcggtgacgctggagccgccggaggccctgggcggggggcttcagggtcggctggagctggacctgagcggccgcgggacgctgcccggtggtcggtttcacctggagggccggcgcctggtcctggacgcccttccggggctgctgccgagcccggagaccgcctaccggctctatggcgacgccgacctgaccctgtggggggagtggaccggtggcgcgggctcggttaccggcgatttccagttgctggatctggaatggcggcgcgaggccgatgccgaggttcagctgctcgctcaccggctggccggacaggcccgttggtcggggacacccgccggctggcgtgtcgatgtcaacgacctggtcatggcgcgcccggaccaggactgggcggcccaggatgcggccttcagccatcggcggacggcagagggcgtgctggcactgggggcggtgttcgaccgggcgcacctggacgatctggtccgactcgccgaactgagcccgggcatggaccgggactggatgcaacggctgcacagcgcggccccctatggcgagctgcgggatgcccacctgcgtctgcgactgggcccggagggcgacctccagcgcctggactcggccgcccgtttccacggcgtggggatggcgccggtcggcccggtaccgggcatcggaccgctggatggccatttccgcaccaccgaggagggcggtcagggggccgtcagcgcccatggcgcggcgctggacttcccccacctgttccccgagaccatcccggtgaccgaggcccgtgccgacctgcgctggtggctggagggcgagggccactaccggctggacgtggacgatatcgcgctggaaaacccggatgcccgtgccgagggcgcccttagtctcgccggccgacccggcgagccgccgtggatgcgcctgcgggccgaggcctgggacggtgacgccagccgcaccgcccgctacctgccgctccgccacctgccgccggccgcccgggagtgggtggcggcggcggtgattggcggtgaggtcaccgaggcccgggtccattgggatgggccgctctcgggcgagcgctttcgccagggcgaggtggcgttccaggccggcggccgggtcatcgacggggaactggcctatcagccggactggccacgcctgaccggggccgaggccgagctggatttccgggggcggtccatgcacatccgcggccatgggggccggctcgcgggcacgagcgtgcagcgggtggaggtgaccctcgccgacctcttcgagccggtgctcgcggtccagggcgaggtccacggcagcggtgaggcctacctggactatctgcgccagatgcccttgaccgcccgcctgctcaacgacgtggtgcccatggcactggacggcgaccacgacctgaccctggcactggccataccgctgcgcaacttcgatccgaaccgggtgcgtctggacgggcggttgcaactgggcgagggggccaactaccgcctgccgcgctgggatctggccttcaacaacgtggtcggtgaggtgcatttcgatgagcgcggattgcgcatcagcgacttgcaggcgcgctatctcggccacccgctgcgggtggaggccgagaccgacgagcagcggatccggctgcgcgggcgtacccggggggcaccgggcgcgctctttccgcaggtcggcctgcccgagggctggctccacggtgaacccgcctggcaggccgaactgcagttgcccaacttccggcccgaccaggggccggacgacgtgcgcctgcgcctgagcagcgccctggaggagctggccgtggatctgcccgagccgctgggcaaacccgccggcgagccccgcgacctgaccctggaggcgcggatcgatgaggacgggctgggcccggtgcgctggcgttaccacgacaccctcaacggtgtgctggcactggacccggagcgtggcgcggtgccgcgaatggccgtccggctcggtaccgagccggcctcgctgcccgccgagcggagctggctggtccgcggccgggtgcctccagtggccgtggacccctggctggactggctcgagcagcacaccgcagcgaccgggcaggagcggcccgaatggcccgaggacctgccgccgctggggctggatctgcactttgagcgtctcgacctgggggcgctggcgctgagcgggcagcgactggtcctggccgccgacgcgcaccccgactggcggctgcagttggatgggccgatacgcggtggggtgttttggccgttggccccggacgccgcgacgccgatgcgtgcggatctcgaacgcgtggacttggacctggacctgctcaccggggaccgggaggagcgggccgcagagcctgcggacggaccggagcccttgcgccccggccggctgccccacatggacctgtccatcgggcaactggtcatcgatcgccgcgatctcgggcgcctggacctgcgggtgacgccggagggggacagcgcccggtttgagtcgatccggctggacacgcccagtttcgccctgcagggcgacatggcctggcattatcgcgacgggggccaccgcaccgagctgaaaagccgcctgcagggcgagcgtgccggggacatcctggccaccctgggctacctgccctccgtcagccgcggccgcaccgagatcgacaacgacgtggcctgggacaacctgccccaccgctttaccctggccgagatggagggggcggtctcgctgcgcatcgacgacgggcagatccccgacctcagcccgggcgccgggcgcctgttcgggctgctcagtgtcaccaccctgccgcgtcgcctggcgctggatttctccgatatcttcggccgcggctttgccttcgacagcctgcgcgccgacctggaactggtcgacggtcaggcgcacatccagcggttcgacatcgacggcccggccgccaagctggccatcgagggccgcattggcctgcgcgaccgcgactacgaccagaccgtccaggtgacgccccgcctgggggccaccatgccgctggtgggcttcatcgtcggcggcccggtgggtgcggctgccgggtggctggccgatcgggtggcgggagatgaggtggagcgtgcaacccggtacagttatcgggtgacggggccatgggatgaccccaaagtggagcgcaggggcgcggaccggcccgacgccggtgtaccgccggcctgggcagattga

SEQ ID NO: 9483 - protein, 1309 aa, Alkalilimnicola ehrlichei MLHE-1
MGRTGLNGAGESPLHPAFTDKLPGYALRALALGLLLLALVLWTLRLALPALVPDYRATLELRLAEELDQPVAVEALRLDWQGWRPVLYADGVEVGPDDQALGFQALRVELAPVASLVHWQPVVRDLALVGLRLEAGLDERGRPVVRGLEGLTLAEEPFDLERLADFDWSLLPAGMRLEDAEVLWHGADGRLWRLPGVARLERDARRLRAAVTLEPPEALGGGLQGRLELDLSGRGTLPGGRFHLEGRRLVLDALPGLLPSPETAYRLYGDADLTLWGEWTGGAGSVTGDFQLLDLEWRREADAEVQLLAHRLAGQARWSGTPAGWRVDVNDLVMARPDQDWAAQDAAFSHRRTAEGVLALGAVFDRAHLDDLVRLAELSPGMDRDWMQRLHSAAPYGELRDAHLRLRLGPEGDLQRLDSAARFHGVGMAPVGPVPGIGPLDGHFRTTEEGGQGAVSAHGAALDFPHLFPETIPVTEARADLRWWLEGEGHYRLDVDDIALENPDARAEGALSLAGRPGEPPWMRLRAEAWDGDASRTARYLPLRHLPPAAREWVAAAVIGGEVTEARVHWDGPLSGERFRQGEVAFQAGGRVIDGELAYQPDWPRLTGAEAELDFRGRSMHIRGHGGRLAGTSVQRVEVTLADLFEPVLAVQGEVHGSGEAYLDYLRQMPLTARLLNDVVPMALDGDHDLTLALAIPLRNFDPNRVRLDGRLQLGEGANYRLPRWDLAFNNVVGEVHFDERGLRISDLQARYLGHPLRVEAETDEQRIRLRGRTRGAPGALFPQVGLPEGWLHGEPAWQAELQLPNFRPDQGPDDVRLRLSSALEELAVDLPEPLGKPAGEPRDLTLEARIDEDGLGPVRWRYHDTLNGVLALDPERGAVPRMAVRLGTEPASLPAERSWLVRGRVPPVAVDPWLDWLEQHTAATGQERPEWPEDLPPLGLDLHFERLDLGALALSGQRLVLAADAHPDWRLQLDGPIRGGVFWPLAPDAATPMRADLERVDLDLDLLTGDREERAAEPADGPEPLRPGRLPHMDLSIGQLVIDRRDLGRLDLRVTPEGDSARFESIRLDTPSFALQGDMAWHYRDGGHRTELKSRLQGERAGDILATLGYLPSVSRGRTEIDNDVAWDNLPHRFTLAEMEGAVSLRIDDGQIPDLSPGAGRLFGLLSVTTLPRRLALDFSDIFGRGFAFDSLRADLELVDGQAHIQRFDIDGPAAKLAIEGRIGLRDRDYDQTVQVTPRLGATMPLVGFIVGGPVGAAAGWLADRVAGDEVERATRYSYRVTGPWDDPKVERRGADRPDAGVPPAWAD

SEQ ID NO: 9484 - DNA, 23 bp, Artificial sequence
  primer
atgaggcgattgccggggatttt

SEQ ID NO: 9485 - DNA, 22 bp, Artificial sequence
  primer
ttatccaccgacagcgtatgcg

SEQ ID NO: 9486 - protein, 1320 aa, Artificial sequence
  consensus sequence
  Variant (7)..(10): Xaa in position 7 to 10 is any amino acid
  Variant (12)..(12): Xaa in position 12 is any amino acid
  Variant (14)..(19): Xaa in position 14 to 19 is any amino acid
  Variant (25)..(25): Xaa in position 25 is any amino acid
  Variant (28)..(29): Xaa in position 28 to 29 is any amino acid
  Variant (32)..(36): Xaa in position 32 to 36 is any amino acid
  Variant (37)..(37): Xaa in position 37 is any or no amino acid
  Variant (40)..(46): Xaa in position 40 to 46 is any amino acid
  Variant (48)..(49): Xaa in position 48 to 49 is any amino acid
  Variant (51)..(51): Xaa in position 51 is any amino acid
  Variant (53)..(61): Xaa in position 53 to 61 is any amino acid
  Variant (63)..(64): Xaa in position 63 to 64 is any amino acid
  Variant (68)..(68): Xaa in position 68 is any amino acid
  Variant (71)..(88): Xaa in position 71 to 88 is any amino acid
  Variant (89)..(89): Xaa in position 89 is any or no amino acid
  Variant (91)..(91): Xaa in position 91 is any amino acid
  Variant (95)..(95): Xaa in position 95 is any amino acid
  Variant (97)..(97): Xaa in position 97 is any amino acid
  Variant (102)..(102): Xaa in position 102 is any amino acid
  Variant (105)..(105): Xaa in position 105 is any amino acid
  Variant (112)..(112): Xaa in position 112 is any amino acid
  Variant (115)..(136): Xaa in position 115 to 136 is any amino acid
  Variant (137)..(147): Xaa in position 137 to 147 is any or no amino acid
  Variant (149)..(149): Xaa in position 149 is any amino acid
  Variant (152)..(152): Xaa in position 152 is any amino acid
  Variant (154)..(154): Xaa in position 154 is any amino acid
  Variant (156)..(156): Xaa in position 156 is any amino acid
  Variant (157)..(157): Xaa in position 157 is any or no amino acid
  Variant (159)..(159): Xaa in position 159 is any amino acid
  Variant (161)..(161): Xaa in position 161 is any amino acid
  Variant (164)..(166): Xaa in position 164 to 166 is any amino acid
  Variant (170)..(170): Xaa in position 170 is any amino acid
  Variant (173)..(173): Xaa in position 173 is any amino acid
  Variant (176)..(176): Xaa in position 176 is any amino acid
  Variant (178)..(179): Xaa in position 178 to 179 is any amino acid
  Variant (187)..(189): Xaa in position 187 to 189 is any amino acid
  Variant (194)..(194): Xaa in position 194 is any amino acid
  Variant (196)..(197): Xaa in position 196 to 197 is any amino acid
  Variant (201)..(204): Xaa in position 201 to 204 is any amino acid
  Variant (208)..(209): Xaa in position 208 to 209 is any amino acid
  Variant (211)..(211): Xaa in position 211 is any amino acid
  Variant (213)..(213): Xaa in position 213 is any amino acid
  Variant (216)..(216): Xaa in position 216 is any amino acid
  Variant (218)..(219): Xaa in position 218 to 219 is any amino acid
  Variant (220)..(220): Xaa in position 220 is any or no amino acid
  Variant (222)..(222): Xaa in position 222 is any amino acid
  Variant (224)..(224): Xaa in position 224 is any amino acid
  Variant (227)..(229): Xaa in position 227 to 229 is any amino acid
  Variant (234)..(235): Xaa in position 234 to 235 is any amino acid
  Variant (237)..(238): Xaa in position 237 to 238 is any amino acid
  Variant (241)..(243): Xaa in position 241 to 243 is any amino acid
  Variant (245)..(247): Xaa in position 245 to 247 is any amino acid
  Variant (249)..(250): Xaa in position 249 to 250 is any amino acid
  Variant (251)..(253): Xaa in position 251 to 253 is any or no amino acid
  Variant (255)..(256): Xaa in position 255 to 256 is any amino acid
  Variant (258)..(258): Xaa in position 258 is any amino acid
  Variant (262)..(263): Xaa in position 262 to 263 is any amino acid
  Variant (265)..(269): Xaa in position 265 to 269 is any amino acid
  Variant (271)..(274): Xaa in position 271 to 274 is any amino acid
  Variant (276)..(278): Xaa in position 276 to 278 is any amino acid
  Variant (280)..(281): Xaa in position 280 to 281 is any amino acid
  Variant (283)..(295): Xaa in position 283 to 295 is any amino acid
  Variant (296)..(296): Xaa in position 296 is any or no amino acid
  Variant (298)..(299): Xaa in position 298 to 299 is any amino acid
  Variant (300)..(309): Xaa in position 300 to 309 is any or no amino acid
  Variant (312)..(322): Xaa in position 312 to 322 is any amino acid
  Variant (323)..(323): Xaa in position 323 is any or no amino acid
  Variant (325)..(326): Xaa in position 325 to 326 is any amino acid
  Variant (327)..(327): Xaa in position 327 is any or no amino acid
  Variant (329)..(355): Xaa in position 329 to 355 is any amino acid
  Variant (356)..(362): Xaa in position 356 to 362 is any or no amino acid
  Variant (364)..(388): Xaa in position 364 to 388 is any amino acid
  Variant (390)..(390): Xaa in position 390 is any amino acid
  Variant (392)..(425): Xaa in position 392 to 425 is any amino acid
  Variant (426)..(428): Xaa in position 426 to 428 is any or no amino acid
  Variant (430)..(435): Xaa in position 430 to 435 is any amino acid
  Variant (437)..(444): Xaa in position 437 to 444 is any amino acid
  Variant (446)..(461): Xaa in position 446 to 461 is any amino acid
  Variant (463)..(476): Xaa in position 463 to 476 is any amino acid
  Variant (478)..(482): Xaa in position 478 to 482 is any amino acid
  Variant (484)..(485): Xaa in position 484 to 485 is any amino acid
  Variant (486)..(486): Xaa in position 486 is any or no amino acid
  Variant (488)..(502): Xaa in position 488 to 502 is any amino acid
  Variant (504)..(514): Xaa in position 504 to 514 is any amino acid
  Variant (515)..(521): Xaa in position 515 to 521 is any or no amino acid
  Variant (523)..(527): Xaa in position 523 to 527 is any amino acid
  Variant (529)..(533): Xaa in position 529 to 533 is any amino acid
  Variant (535)..(539): Xaa in position 535 to 539 is any amino acid
  Variant (542)..(542): Xaa in position 542 is any amino acid
  Variant (544)..(561): Xaa in position 544 to 561 is any amino acid
  Variant (563)..(566): Xaa in position 563 to 566 is any amino acid
  Variant (568)..(572): Xaa in position 568 to 572 is any amino acid
  Variant (574)..(586): Xaa in position 574 to 586 is any amino acid
  Variant (588)..(600): Xaa in position 588 to 600 is any amino acid
  Variant (603)..(603): Xaa in position 603 is any amino acid
  Variant (606)..(606): Xaa in position 606 is any amino acid
  Variant (608)..(613): Xaa in position 608 to 613 is any amino acid
  Variant (615)..(615): Xaa in position 615 is any amino acid
  Variant (617)..(629): Xaa in position 617 to 629 is any amino acid
  Variant (631)..(649): Xaa in position 631 to 649 is any amino acid
  Variant (651)..(657): Xaa in position 651 to 657 is any amino acid
  Variant (659)..(659): Xaa in position 659 is any amino acid
  Variant (661)..(665): Xaa in position 661 to 665 is any amino acid
  Variant (667)..(670): Xaa in position 667 to 670 is any amino acid
  Variant (673)..(686): Xaa in position 673 to 686 is any amino acid
  Variant (688)..(692): Xaa in position 688 to 692 is any amino acid
  Variant (694)..(694): Xaa in position 694 is any amino acid
  Variant (696)..(696): Xaa in position 696 is any amino acid
  Variant (700)..(707): Xaa in position 700 to 707 is any amino acid
  Variant (708)..(710): Xaa in position 708 to 710 is any or no amino acid
  Variant (712)..(714): Xaa in position 712 to 714 is any amino acid
  Variant (716)..(723): Xaa in position 716 to 723 is any amino acid
  Variant (725)..(730): Xaa in position 725 to 730 is any amino acid
  Variant (731)..(731): Xaa in position 731 is any or no amino acid
  Variant (733)..(734): Xaa in position 733 to 734 is any amino acid
  Variant (736)..(743): Xaa in position 736 to 743 is any amino acid
  Variant (745)..(748): Xaa in position 745 to 748 is any amino acid
  Variant (750)..(750): Xaa in position 750 is any amino acid
  Variant (752)..(756): Xaa in position 752 to 756 is any amino acid
  Variant (758)..(763): Xaa in position 758 to 763 is any amino acid
  Variant (765)..(794): Xaa in position 765 to 794 is any amino acid
  Variant (795)..(798): Xaa in position 795 to 798 is any or no amino acid
  Variant (800)..(802): Xaa in position 800 to 802 is any amino acid
  Variant (804)..(811): Xaa in position 804 to 811 is any amino acid
  Variant (812)..(813): Xaa in position 812 to 813 is any or no amino acid
  Variant (815)..(828): Xaa in position 815 to 828 is any amino acid
  Variant (830)..(835): Xaa in position 830 to 835 is any amino acid
  Variant (837)..(870): Xaa in position 837 to 870 is any amino acid
  Variant (871)..(873): Xaa in position 871 to 873 is any or no amino acid
  Variant (875)..(878): Xaa in position 875 to 878 is any amino acid
  Variant (880)..(886): Xaa in position 880 to 886 is any amino acid
  Variant (887)..(887): Xaa in position 887 is any or no amino acid
  Variant (889)..(910): Xaa in position 889 to 910 is any amino acid
  Variant (911)..(912): Xaa in position 911 to 912 is any or no amino acid
  Variant (914)..(919): Xaa in position 914 to 919 is any amino acid
  Variant (922)..(938): Xaa in position 922 to 938 is any amino acid
  Variant (939)..(961): Xaa in position 939 to 961 is any or no amino acid
  Variant (963)..(971): Xaa in position 963 to 971 is any amino acid
  Variant (973)..(1051): Xaa in position 973 to 1051 is any amino acid
  Variant (1052)..(1061): Xaa in position 1052 to 1061 is any or no amino acid
  Variant (1063)..(1078): Xaa in position 1063 to 1078 is any amino acid
  Variant (1080)..(1111): Xaa in position 1080 to 1111 is any amino acid
  Variant (1113)..(1120): Xaa in position 1113 to 1120 is any amino acid
  Variant (1122)..(1128): Xaa in position 1122 to 1128 is any amino acid
  Variant (1130)..(1139): Xaa in position 1130 to 1139 is any amino acid
  Variant (1141)..(1154): Xaa in position 1141 to 1154 is any amino acid
  Variant (1156)..(1157): Xaa in position 1156 to 1157 is any amino acid
  Variant (1159)..(1161): Xaa in position 1159 to 1161 is any amino acid
  Variant (1163)..(1171): Xaa in position 1163 to 1171 is any amino acid
  Variant (1173)..(1180): Xaa in position 1173 to 1180 is any amino acid
  Variant (1182)..(1188): Xaa in position 1182 to 1188 is any amino acid
  Variant (1190)..(1190): Xaa in position 1190 is any amino acid
  Variant (1192)..(1193): Xaa in position 1192 to 1193 is any amino acid
  Variant (1195)..(1196): Xaa in position 1195 to 1196 is any amino acid
  Variant (1198)..(1198): Xaa in position 1198 is any amino acid
  Variant (1200)..(1202): Xaa in position 1200 to 1202 is any amino acid
  Variant (1204)..(1204): Xaa in position 1204 is any amino acid
  Variant (1206)..(1206): Xaa in position 1206 is any amino acid
  Variant (1208)..(1209): Xaa in position 1208 to 1209 is any amino acid
  Variant (1212)..(1212): Xaa in position 1212 is any amino acid
  Variant (1214)..(1214): Xaa in position 1214 is any amino acid
  Variant (1216)..(1218): Xaa in position 1216 to 1218 is any amino acid
  Variant (1220)..(1220): Xaa in position 1220 is any amino acid
  Variant (1224)..(1232): Xaa in position 1224 to 1232 is any amino acid
  Variant (1234)..(1242): Xaa in position 1234 to 1242 is any amino acid
  Variant (1245)..(1246): Xaa in position 1245 to 1246 is any amino acid
  Variant (1248)..(1252): Xaa in position 1248 to 1252 is any amino acid
  Variant (1254)..(1256): Xaa in position 1254 to 1256 is any amino acid
  Variant (1258)..(1273): Xaa in position 1258 to 1273 is any amino acid
  Variant (1276)..(1285): Xaa in position 1276 to 1285 is any amino acid
  Variant (1287)..(1289): Xaa in position 1287 to 1289 is any amino acid
  Variant (1292)..(1294): Xaa in position 1292 to 1294 is any amino acid
  Variant (1296)..(1310): Xaa in position 1296 to 1310 is any amino acid
  Variant (1312)..(1314): Xaa in position 1312 to 1314 is any amino acid
  Variant (1316)..(1319): Xaa in position 1316 to 1319 is any amino acid
MRRLPGXXXXTXAXXXXXXALLVSXLRXXLPXXXXXXRPXXXXXXXSXXGXPXXXXXXXXXWXXFGPXLEXXXXXXXXXXXXXXXXXXXTXALDXWXSLLHXRWXFRDLTFXQLXXXXXXXXXXXXXXXXXXXXXXXXXXXXXXXXXDXFLXQXDXXFXLXDSXXXFLTXSGXRAXLXXPQLTWLNXXXRHRAXGXXSLSXXXXQHGXXQXRXDLXDXXXGXLXNGXXXLQADXXDXXPWXXXWXXXNXXXXXLXXAXFSLXXWXXXXXGXXXXGXXXLXXGXXXXXXXXXXXXXXVXXXXXXXXXXXXGWXXXXXXXXXXXXDXXXWXXXXXXXXXXXXXXXXXXXXXXXXXXXXXXXXXXLXXXXXXXXXXXXXXXXXXXXXXXXXPXGXXXXXXXXXXXXXXXXXXXXXXXXXXXXXXXXXXXXXPXXXXXXGXXXXXXXXGXXXXXXXXXXXXXXXXFXXXXXXXXXXXXXXWXXXXXGXXXLXXXXXXXXXXXXXXXGXXXXXXXXXXXXXXXXXXPXXXXXAXXXXXDXXXXXRYXPXXXXXXXXXXXXXXXXXXGXXXXAXXXXXGXXXXXXXXXXXXXFXXXXXXXXXXXXXQPXWPXLXXXXXXLXFXXXXXXXXXXXXXLXXXXXXXXXXXXXXXXXXXLXXXXXXXGXGXXXXXYXXXXPLXXXXXXXXXXXXXXGXXXXXLXLXIPLXXXXXXXXXXXGXXXLXXXXXXXXPXXXXXXXNXXGXXXXXXXXLXXXXLXAXXXXXPXXXXXXTXXXXXXXXXXXXXXXXXXXXXXXXXXXXXXXXXXGXXXWXXXXXXXXXXPXXXXXXXXXXXXXXLXXXXXXLXXXXXXXXXXXXXXXXXXXXXXXXXXXXXXXXXXXXXNXXXXLXXXXXXXXRXXXXXXXXXXXXXXXXXXXXXXXXPXXXXXXWLXXXXXXXXXXXXXXXXXXXXXXXXXXXXXXXXXXXXXXXXPXXXXXXXXXLXXXXXXXXXXXXXXXXXXXXXXXXXXXXXXXXXXXXXXXXXXXXXXXXXXXXXXXXXXXXXXXXXXXXXXXXXXXXXXXXXXXXXXXXXPXXXXXXXXXXXXXXXXGXXXXXXXXXXXXXXXXXXXXXXXXXXXXXXXXWXXXXXXXXTXXXXXXXGXXXXXXXXXXGXXXXXXXXXXXXXXDXXWXXXPXXXXXXXXXGXXXXXXXXGXXXXXXXGXAXXLXXLXSXXXLXRXLXXDFXDXFXXXFXFDSXXXXXXXXXGXXXXXXXXXDGXXAXXXXXGXXXLXXXXXXXXXXXXXXXXATXXXXXXXXXXPXXXAAXXXAXXXXXXXXXXXXXXXYXXXGXXXXP

SEQ ID NO: 9487 - protein, 44 aa, Artificial sequence
  protein pattern
  Variant (3)..(3): Xaa in position 3 is Glu, Pro, Gln or Ser
  Variant (6)..(6): Xaa in position 6 is Asp or Glu
  Variant (8)..(8): Xaa in position 8 is any amino acid
  Variant (9)..(9): Xaa in position 9 is Ile or Leu
  Variant (17)..(18): Xaa in position 17 to 18 is any amino acid
  Variant (19)..(19): Xaa in position 19 is any or no amino acid
  Variant (21)..(21): Xaa in position 21 is any or no amino acid
  Variant (24)..(24): Xaa in position 24 is Glu or Gln
  Variant (26)..(26): Xaa in position 26 is any amino acid
  Variant (27)..(27): Xaa in position 27 is Ile or Val
  Variant (31)..(31): Xaa in position 31 is Ser or Thr
  Variant (32)..(32): Xaa in position 32 is Phe, Ile or Leu
  Variant (33)..(33): Xaa in position 33 is Asn or Thr
  Variant (34)..(34): Xaa in position 34 is Gly or Asn
  Variant (38)..(38): Xaa in position 38 is Asp or Val
  Variant (39)..(39): Xaa in position 39 is Ile, Met or Val
  Variant (41)..(41): Xaa in position 41 is Met or Val
  Variant (42)..(42): Xaa in position 42 is Lys or Arg
  Variant (43)..(43): Xaa in position 43 is Phe or Met
SGXRAXLXXPQLTWLNXXXRXRAXGXXSLSXXXXQHGXXQXXXD

SEQ ID NO: 9488 - protein, 25 aa, Artificial sequence
  protein pattern
  Variant (2)..(2): Xaa in position 2 is Leu or Val
  Variant (6)..(6): Xaa in position 6 is Ile or Val
  Variant (8)..(8): Xaa in position 8 is any amino acid
  Variant (12)..(12): Xaa in position 12 is His or Arg
  Variant (13)..(13): Xaa in position 13 is any amino acid
  Variant (16)..(16): Xaa in position 16 is Asn or Gln
  Variant (23)..(23): Xaa in position 23 is His, Trp or Tyr
TXALDXWXSLLXXRWXFRDLTFXQL

SEQ ID NO: 9489 - protein, 45 aa, Artificial sequence
  protein pattern
  Variant (2)..(2): Xaa in position 2 is any amino acid
  Variant (3)..(3): Xaa in position 3 is Gly, Ile, Leu or Val
  Variant (4)..(5): Xaa in position 4 to 5 is Ile or Val
  Variant (6)..(6): Xaa in position 6 is Ile, Met or Val
  Variant (7)..(7): Xaa in position 7 is Ala or Val
  Variant (9)..(11): Xaa in position 9 to 11 is any or no amino acid
  Variant (13)..(13): Xaa in position 13 is Ala or Gly
  Variant (16)..(16): Xaa in position 16 is Phe, Ile, Leu or Met
  Variant (17)..(17): Xaa in position 17 is any amino acid
  Variant (20)..(20): Xaa in position 20 is any amino acid
  Variant (21)..(21): Xaa in position 21 is Ile or Leu
  Variant (22)..(22): Xaa in position 22 is Asp or Asn
  Variant (23)..(23): Xaa in position 23 is any amino acid
  Variant (24)..(24): Xaa in position 24 is Phe, Trp or Tyr
  Variant (27)..(27): Xaa in position 27 is Ala, Glu or Gln
  Variant (28)..(28): Xaa in position 28 is Ile or Leu
  Variant (29)..(29): Xaa in position 29 is Phe, Leu or Val
  Variant (30)..(30): Xaa in position 30 is Ala or Asn
  Variant (31)..(31): Xaa in position 31 is any amino acid
  Variant (32)..(32): Xaa in position 32 is Ala or Ile
  Variant (33)..(33): Xaa in position 33 is Glu or Gln
  Variant (35)..(35): Xaa in position 35 is Ala, Ile or Val
  Variant (36)..(36): Xaa in position 36 is any amino acid
  Variant (38)..(38): Xaa in position 38 is Ile, Met or Val
  Variant (40)..(40): Xaa in position 40 is Ile, Leu or Val
  Variant (41)..(41): Xaa in position 41 is Ala, Asp or Glu
  Variant (42)..(42): Xaa in position 42 is Ala, Ile or Val
  Variant (43)..(43): Xaa in position 43 is Gly or Ser
  Variant (44)..(44): Xaa in position 44 is any amino acid
  Variant (45)..(45): Xaa in position 45 is Ile, Leu or Met
AXXXXXXAXXXSXLRXXLPXXXXXRPXXXXXXXSXXGXPXXXXXX

SEQ ID NO: 9490 - protein, 29 aa, Artificial sequence
  protein pattern
  Variant (2)..(2): Xaa in position 2 is any or no amino acid
  Variant (4)..(4): Xaa in position 4 is any amino acid
  Variant (5)..(5): Xaa in position 5 is any or no amino acid
  Variant (8)..(8): Xaa in position 8 is any amino acid
  Variant (9)..(9): Xaa in position 9 is Phe, Ile or Val
  Variant (10)..(10): Xaa in position 10 is Trp or Tyr
  Variant (11)..(11): Xaa in position 11 is Leu or Met
  Variant (15)..(15): Xaa in position 15 is Asp or Asn
  Variant (16)..(16): Xaa in position 16 is Ile or Val
  Variant (18)..(18): Xaa in position 18 is Leu, Met or Val
  Variant (19)..(19): Xaa in position 19 is His or Lys
  Variant (22)..(22): Xaa in position 22 is Ile or Leu
  Variant (23)..(23): Xaa in position 23 is Gly or Ser
  Variant (24)..(24): Xaa in position 24 is His, Lys or Arg
  Variant (26)..(26): Xaa in position 26 is Leu or Met
  Variant (27)..(27): Xaa in position 27 is any amino acid
  Variant (28)..(28): Xaa in position 28 is Asp or Asn
GXLXXNGXXXXQADXXDXXPWXXXWXXXN

SEQ ID NO: 9491 - protein, 11 aa, Artificial sequence
  protein pattern
  Variant (2)..(2): Xaa in position 2 is Gln or Arg
  Variant (3)..(3): Xaa in position 3 is Asp or Asn
  Variant (5)..(5): Xaa in position 5 is Glu, Gln or Arg
  Variant (6)..(6): Xaa in position 6 is Phe, Ile or Val
  Variant (7)..(7): Xaa in position 7 is Ser or Thr
  Variant (11)..(11): Xaa in position 11 is Leu or Pro
LXXSXXXFLTX

SEQ ID NO: 9492 - DNA, 1350 bp, Escherichia coli
  CDS (1)..(1350): transl_table=11
atgctggataaaattgttattgccaaccgcggcgagattgcattgcgtattcttcgtgcctgtaaagaactgggcatcaagactgtcgctgtgcactccagcgcggatcgcgatctaaaacacgtattactggcagatgaaacggtctgtattggccctgctccgtcagtaaaaagttatctgaacatcccggcaatcatcagcgccgctgaaatcaccggcgcagtagcaatccatccgggttacggcttcctctccgagaacgccaactttgccgagcaggttgaacgctccggctttatcttcattggcccgaaagcagaaaccattcgcctgatgggcgacaaagtatccgcaatcgcggcgatgaaaaaagcgggcgtcccttgcgtaccgggttctgacggcccgctgggcgacgatatggataaaaaccgtgccattgctaaacgcattggttatccggtgattatcaaagcctccggcggcggcggcggtcgcggtatgcgcgtagtgcgcggcgacgctgaactggcacaatccatctccatgacccgtgcggaagcgaaagctgctttcagcaacgatatggtttacatggagaaatacctggaaaatcctcgccacgtcgagattcaggtactggctgacggtcagggcaacgctatctatctggcggaacgtgactgctccatgcaacgccgccaccagaaagtggtcgaagaagcgccagcaccgggcattaccccggaactgcgtcgctacatcggcgaacgttgcgctaaagcgtgtgttgatatcggctatcgcggtgcaggtactttcgagttcctgttcgaaaacggcgagttctatttcatcgaaatgaacacccgtattcaggtagaacacccggttacagaaatgatcaccggcgttgacctgatcaaagaacagctgcgtatcgctgccggtcaaccgctgtcgatcaagcaagaagaagttcacgttcgcggccatgcggtggaatgtcgtatcaacgccgaagatccgaacaccttcctgccaagtccgggcaaaatcacccgtttccacgcacctggcggttttggcgtacgttgggagtctcatatctacgcgggctacaccgtaccgccgtactatgactcaatgatcggtaagctgatttgctacggtgaaaaccgtgacgtggcgattgcccgcatgaagaatgcgctgcaggagctgatcatcgacggtatcaaaaccaacgttgatctgcagatccgcatcatgaatgacgagaacttccagcatggtggcactaacatccactatctggagaaaaaactcggtcttcaggaaaaataa

SEQ ID NO: 9493 - protein, 449 aa, Escherichia coli
MLDKIVIANRGEIALRILRACKELGIKTVAVHSSADRDLKHVLLADETVCIGPAPSVKSYLNIPAIISAAEITGAVAIHPGYGFLSENANFAEQVERSGFIFIGPKAETIRLMGDKVSAIAAMKKAGVPCVPGSDGPLGDDMDKNRAIAKRIGYPVIIKASGGGGGRGMRVVRGDAELAQSISMTRAEAKAAFSNDMVYMEKYLENPRHVEIQVLADGQGNAIYLAERDCSMQRRHQKVVEEAPAPGITPELRRYIGERCAKACVDIGYRGAGTFEFLFENGEFYFIEMNTRIQVEHPVTEMITGVDLIKEQLRIAAGQPLSIKQEEVHVRGHAVECRINAEDPNTFLPSPGKITRFHAPGGFGVRWESHIYAGYTVPPYYDSMIGKLICYGENRDVAIARMKNALQELIIDGIKTNVDLQIRIMNDENFQHGGTNIHYLEKKLGLQEK

SEQ ID NO: 9494 - DNA, 1350 bp, Salmonella enterica subsp. enterica serovar Typhi
  CDS (1)..(1350): transl_table=11
atgttggataaaattgtcatcgccaaccgcggcgagatcgcactacgtattcttcgagcctgtaaagaactcggcatcaagaccgtcgctgtgcactcaagcgcggatcgcgatttaaaacacgtattgctggcggatgagacggtctgtattggcccggcaccgtccgtaaaaagttatctgaacatcccggctatcattagcgccgctgaaatcaccggcgcggtggcaatccacccgggttacggcttcctttctgagaacgccaattttgccgagcaggttgaacgctccggctttatctttatcggcccgaaagcggacaccatccgcctgatgggcgataaagtgtccgcgattaccgcgatgaaaaaagcgggcgtgccgaccgtaccaggatctgacggcccactgggcgacgatatgaatgcgaaccgcgctcatgccaaacgtattggctatccggtgatcatcaaagcgtccggcggcggcggcggccgcggtatgcgcgtggttcgtagcgatgctgaactggcgcagtccatctccatgactaaagcggaagcgaaagcagctttcagcaacgacatggtatacatggaaaaatacctggaaaatccacgccacatcgaaattcaggtgctggcggacggccagggcaacgctatctatctggcggaacgcgactgctccatgcagcgtcgccaccagaaagtggttgaagaagccccggcgccaggcattacgccggaactgcgtcgctatatcggcgaacgctgcgcgaaagcgtgcgtagacatcggctatcgcggcgcaggaacgttcgaattcctgttcgaaaacggcgagttctatttcatcgaaatgaacacccgtattcaggttgaacacccggtaactgaaatgattaccggcgtcgatttgatcaaagagcagttgcgcatcgcggcgggtcagccactgtcgatcacacaggacgaagttgtcgttcgaggccatgcggtagaatgccgtatcaatgccgaagatccgaacaccttcctgccaagccctggcaaaatcacgcgcttccatgcgcctggcggctttggcgttcgctgggaatctcatatctacgcgggctacacggtgccgccgtactatgattccatgatcggcaaactcatctgctacggtgaaaaccgcgacgtggcgattgcccgtatgaaaaatgccctgcaggaactgattatcgatggtatcaaaaccaatatcgatctgcagacccgcatcatgaatgacgagcacttccagcacggtggaaccaacatccactatctggagaaaaaactcggtcttcaggaaaagtaa

SEQ ID NO: 9495 - protein, 449 aa, Salmonella enterica subsp. enterica serovar Typhi
MLDKIVIANRGEIALRILRACKELGIKTVAVHSSADRDLKHVLLADETVCIGPAPSVKSYLNIPAIISAAEITGAVAIHPGYGFLSENANFAEQVERSGFIFIGPKADTIRLMGDKVSAITAMKKAGVPTVPGSDGPLGDDMNANRAHAKRIGYPVIIKASGGGGGRGMRVVRSDAELAQSISMTKAEAKAAFSNDMVYMEKYLENPRHIEIQVLADGQGNAIYLAERDCSMQRRHQKVVEEAPAPGITPELRRYIGERCAKACVDIGYRGAGTFEFLFENGEFYFIEMNTRIQVEHPVTEMITGVDLIKEQLRIAAGQPLSITQDEVVVRGHAVECRINAEDPNTFLPSPGKITRFHAPGGFGVRWESHIYAGYTVPPYYDSMIGKLICYGENRDVAIARMKNALQELIIDGIKTNIDLQTRIMNDEHFQHGGTNIHYLEKKLGLQEK

SEQ ID NO: 9496 - DNA, 1344 bp, Dichelobacter nodosus VCS1703A
  CDS (1)..(1344): transl_table=11
atgtttaaaaaagtattgattgcaaatcgcggcgaaattgcgttgcgcattttgcgcgcctgtcggcaaatggggattgaaacggttgctgttcactccaaacccgatgccaatttaatgcacgttaaactcgccgatgaatcagtatgcattggtccggcgccttcaagcgaaagttatttaaatatgccggcaattattgcggcagcggaagtgacaaacgccgacgccattcaccctggttacggttttttatcagaaaacgctgattttgctgaacgcgtttcgcaatcgggatttgtttttatcggcccgcgtcctgacaccattcgcatgatgggcgataaagtcgaagcgattaaagcgatgaaagccgcaggcattccgtgcgtacccggttctggtggcgcgctcggaaacgatgcagaaaaaattctggcaatggcgcatcaaattggttatcccgtcattattaaagcggcaggcggcggtggcggacgcggtatgcgcgtggtgcataaagatgcggaattaatcgatgccgttaaattaaccaaaaccgaagccaaacaagcttttggtaacgatatggtttatatggaaaaatacttggaaaaaccgcgccacgtggaaattcaagtgctcgctgatagccacggcaatgccattcatttagccgaacgtgattgctctttgcaacgtcgccatcaaaaagtgatggaagaagcgccggcgccgcaaattaccgcaaaacaacgcgaaatcatcggcaaaatttgtactgacgcgtgcaaacgcatcggttatctcggcgcgggtacttttgaatttctctatgaaaacgggcaattttatttcattgaaatgaatacgcgggtgcaagtagaacaccccattactgaaatgattaccggcgttgatattgtgcgcgaacaaattcgcatcgcatctggattaccgctttcttttaaacaaaaagatatcgtggtttcggggcatgccattgaatgtcggattaacgctgaagatcccaaaacctttattccgtctcctggaaaaattactgattttcacgcgcccggtggtttaggcgttcgcgttgaatcgtatttatataatggttacgtagtgccgccgcattatgattccatgattggaaaattgattgcttggggcgaaaatcgagatattgccttgtcgcgcatgcgtatggcgttatcagaaatgggcgttgaaggcattaaaaccaatatcgctttgcatcgcgaattattagaagacgaacgcatttgcgaaggcggcatggatattcactatttagaacacaaattgggtttggcatga

SEQ ID NO: 9497 - protein, 447 aa, Dichelobacter nodosus VCS1703A
MFKKVLIANRGEIALRILRACRQMGIETVAVHSKPDANLMHVKLADESVCIGPAPSSESYLNMPAIIAAAEVTNADAIHPGYGFLSENADFAERVSQSGFVFIGPRPDTIRMMGDKVEAIKAMKAAGIPCVPGSGGALGNDAEKILAMAHQIGYPVIIKAAGGGGGRGMRVVHKDAELIDAVKLTKTEAKQAFGNDMVYMEKYLEKPRHVEIQVLADSHGNAIHLAERDCSLQRRHQKVMEEAPAPQITAKQREIIGKICTDACKRIGYLGAGTFEFLYENGQFYFIEMNTRVQVEHPITEMITGVDIVREQIRIASGLPLSFKQKDIVVSGHAIECRINAEDPKTFIPSPGKITDFHAPGGLGVRVESYLYNGYVVPPHYDSMIGKLIAWGENRDIALSRMRMALSEMGVEGIKTNIALHRELLEDERICEGGMDIHYLEHKLGLA

SEQ ID NO: 9498 - DNA, 1500 bp, Arabidopsis thaliana
  CDS (1)..(1500)
atggacgcttctatgattaccaattccaaatccattacttctccaccctctttagccttagggaagtcaggaggaggaggagttatcagaagttcactatgtaacttaatgatgccaagcaaagttaacttccctagacaaagaactcaaactctaaaggttagccagaagaaactcaagagagctactagtggtggtcttggtgttacatgcagtggtggtgataagattctcgtagcgaatcgaggtgaaattgcagttcgtgttatcagaactgctcatgaaatggggattccttgtgttgctgtgtattctactatagataaagatgctcttcatgttaaattagctgatgaagctgtttgtattggtgaagctcctagtaaccagtcgtatttggtgattccgaatgttctgtctgcggctattagccgtggatgtacaatgcttcatcctggatatggttttctttcggagaacgctctctttgttgaaatgtgtagagaccatgggatcaattttattggacctaatcctgatagcatccgtgttatgggagacaaagcgactgcaagagagacaatgaaaaatgcaggggttcccactgtaccagggagtgatgggctattgcagagtacagaagaagctgtcagggtcgccaatgagattggtttccctgtaatgatcaaggcaacagctggtggtggtggacgtggaatgcgtcttgctaaggaaccgggagagtttgtaaaactgttgcagcaagctaagagcgaggctgctgctgcttttgggaatgatggatgttatctggagaagttcgtacaaaaccctagacatattgagttccaggtgctggcagataaatttggaaatgttgttcactttggtgagcgtgactgcagcatccagaggcgtaaccaaaagcttctggaagaagcaccttctccagcattgaccgctgaattgcgaaaagccatgggtgatgcagcagtcgcagcagcagcatccattgggtacattggtgttggtactgtggagtttcttttagatgagagaggttccttctacttcatggaaatgaacactaggatccaggtggagcatcctgtgacagagatgatttactctgttgatttgatagaggagcagattcgtgttgcaatgggagagaaacttcgttacaaacaggaagatattgtgctcagagggcactcaattgaatgtcgtatcaatgcagaagatccatttaaaggattcagacctggacctggcagaataacatcatacctgccatctggaggtcctttcgttagaatggacagccatgtctattccgactatgttgtgcctccaagctatgattctcttcttgggaagcttattgtgtgggctccaacgagggaaaaagcaattgaacggatgaagcgggcgcttaatgacactatcattacaggtatgggttccaacgactatcaattaccacaaacttatccttga

SEQ ID NO: 9499 - protein, 499 aa, Arabidopsis thaliana
MDASMITNSKSITSPPSLALGKSGGGGVIRSSLCNLMMPSKVNFPRQRTQTLKVSQKKLKRATSGGLGVTCSGGDKILVANRGEIAVRVIRTAHEMGIPCVAVYSTIDKDALHVKLADEAVCIGEAPSNQSYLVIPNVLSAAISRGCTMLHPGYGFLSENALFVEMCRDHGINFIGPNPDSIRVMGDKATARETMKNAGVPTVPGSDGLLQSTEEAVRVANEIGFPVMIKATAGGGGRGMRLAKEPGEFVKLLQQAKSEAAAAFGNDGCYLEKFVQNPRHIEFQVLADKFGNVVHFGERDCSIQRRNQKLLEEAPSPALTAELRKAMGDAAVAAAASIGYIGVGTVEFLLDERGSFYFMEMNTRIQVEHPVTEMIYSVDLIEEQIRVAMGEKLRYKQEDIVLRGHSIECRINAEDPFKGFRPGPGRITSYLPSGGPFVRMDSHVYSDYVVPPSYDSLLGKLIVWAPTREKAIERMKRALNDTIITGMGSNDYQLPQTYP

SEQ ID NO: 9500 - DNA, 1344 bp, Mesorhizobium loti MAFF303099
  CDS (1)..(1344): transl_table=11
atgttccagaagatcctcatcgccaatcgcggcgaaatcgcgcttcgggtgctgcgcgcctgcaaggaactcggcatccagacggtggtggtgcattcgaccgccgacgccgacgccatgcatgtgcggcttgccgacgagagcgtctgcattggcccgccgccatcgcgcgacagctatctcaacatccatcagatcgtcgcggcctgcgagatcaccggcgccgacgcagtgcatccgggctatggattcctgtctgagaatgccaagttcgccgacatattggccgcgcacaacatcaccttcatcggcccgtccggcgatcatatccgcatcatgggcgacaagatcgaggccaagcgcaccgccaagcgcctcggcattccggtggtgcccggttccgacggcgcggtgaccgaggagaaggaagccaagcgcatcgccgccgaaatcggctatcccgtgatcatcaaggcttcggccggcggcggcgggcgcggcatgaaggtcgcgcacagcgaggccgacctcgaggtcgccctgcagacggcgcgctcggaagcaggcgcggcttttggcgacgacgccgtctacatcgagaagtacctgcagaagccgcggcacatcgaagtgcaagtgttcggcgacggatttggccgcggcgtgcattttggtgagcgcgactgttcgctgcaacggcgtcaccagaaggtctgggaagaggccaattcgccggcgctcaacgccgaggagcggtcccgcatcggcggcatctgcgccaaggccattgccgatctcggctattccggcgccggcacgatcgagttcctctacgagaatggcgagttctatttcatcgagatgaacacgcgcctgcaggtcgagcatccggtgacggaagcaatcaccggcatcgatctcgtgcatgaacagatccgcgtcgcttccggcggcggtctttcggtcaagcaggaagacatcaagttcaatggccacgccatcgaatgccgtatcaatgccgaggatccgcgcaccttcaccccctcgcccggcaccatcacgcatttccacacgccaggcggtctcggcatccgcgtcgattccggcgtctattccggctacaagatcccgccctattacgacagcctgatcggcaagctgatcgtgcatgggcgcaaccgcgtcgaatgcatgatgcggctgcgccgggcgctggatgaattcgtcgtcgacggcatcaagacgacgttgccgctgtttcgcgatctggtcggcaatgccgacatcgccaatggcgactatgacatccactggctggaaaaatacctggccaaggaagagtag

SEQ ID NO: 9501 - protein, 447 aa, Mesorhizobium loti MAFF303099
MFQKILIANRGEIALRVLRACKELGIQTVVVHSTADADAMHVRLADESVCIGPPPSRDSYLNIHQIVAACEITGADAVHPGYGFLSENAKFADILAAHNITFIGPSGDHIRIMGDKIEAKRTAKRLGIPVVPGSDGAVTEEKEAKRIAAEIGYPVIIKASAGGGGRGMKVAHSEADLEVALQTARSEAGAAFGDDAVYIEKYLQKPRHIEVQVFGDGFGRGVHFGERDCSLQRRHQKVWEEANSPALNAEERSRIGGICAKAIADLGYSGAGTIEFLYENGEFYFIEMNTRLQVEHPVTEAITGIDLVHEQIRVASGGGLSVKQEDIKFNGHAIECRINAEDPRTFTPSPGTITHFHTPGGLGIRVDSGVYSGYKIPPYYDSLIGKLIVHGRNRVECMMRLRRALDEFVVDGIKTTLPLFRDLVGNADIANGDYDIHWLEKYLAKEE

SEQ ID NO: 9502 - DNA, 6765 bp, Arabidopsis thaliana
  CDS (1)..(6765)
atggctggctcggttaacgggaatcatagtgctgtaggacctggtataaattatgagacggtgtctcaagtggatgagttctgtaaagcacttagagggaaaaggccgatccatagtattttgatagctaacaatggaatggcggctgtgaagtttatacgtagtgtcagaacatgggcttatgaaacatttggtacggaaaaagccatattgttggtggggatggcaacccctgaagacatgcggatcaatgcggagcatatcagaatcgctgatcagtttgttgaggttcccggaggaaccaacaataacaattatgctaacgttcagctgattgtggagatggctgaagtaacacgcgtggatgcagtttggcctggttggggtcatgcatctgaaaaccccgaattacctgatgccctagatgcaaaaggaatcatatttcttggtcctccagcatcttcaatggcagcactgggagataagattggttcttcgttgattgcacaagctgctgatgtacccactctgccatggagtggttcccatgttaaaatacctcctaatagcaacttggtaaccatcccagaggagatctaccggcaagcatgtgtctacacaactgaagaagcgattgctagctgtcaagttgtcggttacccagcaatgatcaaagcatcgtggggtggtggtggtaaaggaatcaggaaggttcataatgatgatgaggttagggctctattcaagcaagttcagggtgaggtcccaggctcaccaatattcataatgaaggttgcgtcacagagtcggcatctagaggtccagctgctctgtgacaagcatggaaatgtttcagctctgcatagccgtgattgtagcgtccagagaagacatcaaaagatcatagaggagggtccaattactgtggctccgccagaaactgtcaagaaacttgaacaagcagctagaaggttggctaagagtgttaactatgttggagctgctactgttgagtatctctacagtatggacactggggagtactacttcttagagcttaaccctcgcttacaggttgagcatcctgtcactgagtggattgccgagataaatcttcctgctgcccaagttgctgtggggatgggaattcctctctggcaaatccctgagataagacggttctatggaatagaacatggtggaggttatgattcttggcgaaaaacatctgttgtagccttcccttttgattttgataaagctcaatctataaggccaaaaggtcattgtgtggctgtacgtgtgacaagtgaggatcctgatgacgggttcaaaccaaccagcggtagagttcaggagttgagttttaagagcaagccaaatgtgtgggcgtacttctctgtcaagtctggtggaggcatccacgagttctcggattcccagtttggacatgtttttgcatttggggaatccagagccctggcgatagcgaatatggttcttgggctaaaagaaattcagatccgtggagaaattaggactaacgttgactacacgatcgaccttttacatgcttctgattaccgtgataacaaaattcacactggttggttggatagtaggattgctatgcgggtcagagctgagaggcctccatggtatctctctgttgtcggcggagctctctataaagcatcagcgaccagtgctgctgtggtttcagattacgttggttatctggagaaggggcaaatccctccaaagcatatatctcttgtacattctcaagtgtctctgaatattgaaggaagtaaatatacgattgatgtagtccggggtggatcaggaacctacaggctaagaatgaacaagtcagaagtggtagcagaaatacacactctacgtgatggaggtctgttgatgcagttggatggcaaaagccatgtgatatatgcagaggaagaagctgcaggaactcgtcttctcattgatggaagaacttgtttgctacagaatgaccacgatccatcaaagttaatggctgagacaccgtgcaagttgatgaggtatttgatttccgacaacagcaatattgacgctgatacgccttatgccgaagttgaggtcatgaagatgtgcatgccacttctttcacctgcttcaggagttatccattttaaaatgtctgaaggacaagccatgcaggctggtgaacttatagccaatcttgatcttgatgatccttctgctgtaagaaaggccgaacccttccatggaagtttcccaagattagggcttccaactgcaatatccggtagagttcatcagagatgtgccgcaacattaaatgctgcacgcatgattcttgctggctatgagcataaagtagatgaggttgttcaagacttacttaattgccttgatagccctgaactcccatttcttcagtggcaagagtgctttgcagttctggcgacacgactacctaaaaatctcaggaacatgctagaatcaaagtatagggaatttgagagtatttccagaaactctttgaccaccgatttccctgccaaacttttaaaaggcattcttgaggcacatttatcttcttgtgatgagaaagagagaggtgcccttgaaaggctcattgaaccattgatgagccttgcaaaatcttatgaaggtggtagagaaagtcatgcccgtgttattgttcattctctctttgaagaatatctatcagtagaagaattattcaatgataacatgctggctgatgttatagaacgcatgcgtcagctatacaagaaagatctgttgaaaattgtggatatagtgctctcacaccagggcataaaaaacaaaaacaaactcgttctccggctcatggagcagcttgtttaccctaatcctgctgcttacagagataaacttattcgattctcaacacttaaccatactaactactctgagttggcgctcaaggcgagtcaattacttgaacagaccaaactaagtgagcttcgttcaaacattgctagaagcctttcagagttagaaatgtttacagaggacggagaaaatatggatactcccaagaggaaaagtgccattaatgaaagaatagaagatcttgtaagcgcatctttagctgttgaagacgctctcgtgggactatttgaccatagcgatcacacacttcaaagacgggttgttgagacttatattcgcagattataccagccctacgtcgttaaagatagcgtgaggatgcagtggcaccgttctggtcttcttgcttcctgggagttcctagaggagcatatggaaagaaaaaacattggcttagacgatcccgacacatctgaaaaaggattggttgagaagcgtagtaagagaaaatggggggctatggttataatcaaatctttgcagtttcttccaagtataataagtgcagcattgagagaaacaaagcacaacgactatgaaactgccggagctcctttatctggcaatatgatgcacattgctattgtgggcatcaacaaccagatgagtctgcttcaggacagtggggatgaagaccaagctcaggaaagagtaaacaagttggccaaaattcttaaagaggaagaagtgagttcaagcctctgttctgccggtgttggtgtaatcagctgtataattcagcgagatgaaggacgaacacccatgagacattctttccattggtcgttggagaaacagtattatgtagaagagccgttgctgcgtcatcttgaacctcctctgtccatttaccttgagttggataagctgaaaggatactcaaatatacaatatacgccttctcgagatcgtcaatggcatctgtatactgttacagacaagccagtgccaatcaagaggatgttcctgagatctcttgttcgacaggctacaatgaacgatggatttatattgcagcaagggcaggataagcagcttagccaaacactgatctccatggcgtttacgtcgaaatgtgttctgaggtctttgatggatgccatggaggaactggaactgaatgcccataatgctgcaatgaaaccagatcacgcacatatgtttctttgcatattgcgtgagcagcagatagatgatcttgtgcctttccccaggagagttgaagtgaatgcggaggatgaagaaactacagttgaaatgatcttagaagaagcagcacgagagatacatagatctgttggagtgagaatgcataggttgggcgtgtgcgagtgggaagtgcggctgtggttggtgtcctctggactggcatgtggtgcttggagggttgtggttgcaaacgtgacaggccgtacatgcactgtccacatataccgagaagttgaaactcctggaagaaacagtttaatctaccactcaataaccaagaagggacctttgcatgaaacaccaatcagtgatcaatataagcccctgggatatctcgacaggcaacgtttagcagcaaggaggagtaacactacttattgctatgacttcccgttggcatttgggacagccttggaactgttgtgggcatcacaacacccaggagttaagaaaccatataaggatactctgatcaatgttaaagagcttgtattctcaaaaccagaaggttcttcgggtacatctctagatctggttgaaagaccacccggtctcaacgactttggaatggttgcctggtgcctagatatgtcgaccccagagtttcctatggggcggaaacttctcgtgattgcgaatgatgtcaccttcaaagctggttcttttggtcctagagaggacgcgtttttccttgctgttactgaactcgcttgtgccaagaagcttcccttgatttacttggcagcaaattctggtgcccgacttggggttgctgaagaagtcaaagcctgcttcaaagttggatggtcggatgaaatttcccctgagaatggttttcagtatatatacctaagccctgaagaccacgaaaggattggatcatctgtcattgcccatgaagtaaagctctctagtggggaaactaggtgggtgattgatacgatcgttggcaaagaagatggtattggtgtagagaacttaacaggaagtggggccatagcgggtgcttactcaaaggcatacaatgaaacttttactttaacctttgttagtggaagaacggttggaattggtgcttatcttgcccgcctaggtatgcggtgcatacagagacttgatcagccgatcatcttgactggcttctctacactcaacaagttacttgggcgtgaggtctatagctctcacatgcaactgggtggcccgaaaatcatgggcacaaatggtgttgttcatcttacagtctcagatgatcttgaaggcgtatcagcaattctcaactggctcagctacattcctgcttacgtgggtggtcctcttcctgttcttgcccctttagatccaccggagagaattgtggagtatgtcccagagaactcttgcgacccacgagcggctatagctggggtcaaagacaataccggtaaatggcttggaggtatctttgataaaaatagtttcattgagactcttgaaggctgggcaaggacggtagtgactggtagagccaagctcgggggaatacccgttggagttgttgcagttgagacacagactgtcatgcagatcatcccagccgatcctggacagcttgactctcatgaaagagtggttccgcaagcagggcaagtctggtttcctgattcagcggccaagactgctcaagcgcttatggatttcaaccgggaagagcttccattgtttatcctagcgaactggagagggttttcaggtgggcagagagatcttttcgaaggaatacttcaggcaggttcaactatagtagaaaatctgagaacctatcgtcagccagtgtttgtgtacatcccaatgatgggagagctgcgcggtggagcgtgggttgttgttgacagccagataaattcggattatgttgaaatgtatgctgatgaaacagctcgtggaaatgtgcttgagccagaagggacaatagagataaaatttagaacaaaagagctattagagtgcatgggaaggttggaccagaagctaatcagtctgaaagcaaaactgcaagatgccaagcaaagcgaggcctatgcaaacatcgagcttctccagcaacagattaaagcccgagagaaacagcttttaccagtttatatccaaatcgccaccaaatttgcagaacttcatgacacttccatgagaatggctgcaaagggagtgatcaaaagtgttgtggaatggagcggctcgcggtccttcttctacaaaaagctcaataggagaatcgctgagagctctcttgtgaaaaacgtaagagaagcatctggagacaacttagcatataaatcttcaatgcgtctgattcaggattggttctgcaactctgatattgcaaaggggaaagaagaagcttggacagacgaccaagtgttctttacatggaaggacaatgttagtaactacgagttgaagctgagcgagttgagagcgcagaaactactgaaccaacttgcagagattgggaattcctcagatttgcaagctctgccacaaggacttgctaatcttctaaacaaggtggagccgtcgaaaagagaagagctggtggctgctattcgaaaggtcttgggttga

SEQ ID NO: 9503 - protein, 2254 aa, Arabidopsis thaliana
MAGSVNGNHSAVGPGINYETVSQVDEFCKALRGKRPIHSILIANNGMAAVKFIRSVRTWAYETFGTEKAILLVGMATPEDMRINAEHIRIADQFVEVPGGTNNNNYANVQLIVEMAEVTRVDAVWPGWGHASENPELPDALDAKGIIFLGPPASSMAALGDKIGSSLIAQAADVPTLPWSGSHVKIPPNSNLVTIPEEIYRQACVYTTEEAIASCQVVGYPAMIKASWGGGGKGIRKVHNDDEVRALFKQVQGEVPGSPIFIMKVASQSRHLEVQLLCDKHGNVSALHSRDCSVQRRHQKIIEEGPITVAPPETVKKLEQAARRLAKSVNYVGAATVEYLYSMDTGEYYFLELNPRLQVEHPVTEWIAEINLPAAQVAVGMGIPLWQIPEIRRFYGIEHGGGYDSWRKTSVVAFPFDFDKAQSIRPKGHCVAVRVTSEDPDDGFKPTSGRVQELSFKSKPNVWAYFSVKSGGGIHEFSDSQFGHVFAFGESRALAIANMVLGLKEIQIRGEIRTNVDYTIDLLHASDYRDNKIHTGWLDSRIAMRVRAERPPWYLSVVGGALYKASATSAAVVSDYVGYLEKGQIPPKHISLVHSQVSLNIEGSKYTIDVVRGGSGTYRLRMNKSEVVAEIHTLRDGGLLMQLDGKSHVIYAEEEAAGTRLLIDGRTCLLQNDHDPSKLMAETPCKLMRYLISDNSNIDADTPYAEVEVMKMCMPLLSPASGVIHFKMSEGQAMQAGELIANLDLDDPSAVRKAEPFHGSFPRLGLPTAISGRVHQRCAATLNAARMILAGYEHKVDEVVQDLLNCLDSPELPFLQWQECFAVLATRLPKNLRNMLESKYREFESISRNSLTTDFPAKLLKGILEAHLSSCDEKERGALERLIEPLMSLAKSYEGGRESHARVIVHSLFEEYLSVEELFNDNMLADVIERMRQLYKKDLLKIVDIVLSHQGIKNKNKLVLRLMEQLVYPNPAAYRDKLIRFSTLNHTNYSELALKASQLLEQTKLSELRSNIARSLSELEMFTEDGENMDTPKRKSAINERIEDLVSASLAVEDALVGLFDHSDHTLQRRVVETYIRRLYQPYVVKDSVRMQWHRSGLLASWEFLEEHMERKNIGLDDPDTSEKGLVEKRSKRKWGAMVIIKSLQFLPSIISAALRETKHNDYETAGAPLSGNMMHIAIVGINNQMSLLQDSGDEDQAQERVNKLAKILKEEEVSSSLCSAGVGVISCIIQRDEGRTPMRHSFHWSLEKQYYVEEPLLRHLEPPLSIYLELDKLKGYSNIQYTPSRDRQWHLYTVTDKPVPIKRMFLRSLVRQATMNDGFILQQGQDKQLSQTLISMAFTSKCVLRSLMDAMEELELNAHNAAMKPDHAHMFLCILREQQIDDLVPFPRRVEVNAEDEETTVEMILEEAAREIHRSVGVRMHRLGVCEWEVRLWLVSSGLACGAWRVVVANVTGRTCTVHIYREVETPGRNSLIYHSITKKGPLHETPISDQYKPLGYLDRQRLAARRSNTTYCYDFPLAFGTALELLWASQHPGVKKPYKDTLINVKELVFSKPEGSSGTSLDLVERPPGLNDFGMVAWCLDMSTPEFPMGRKLLVIANDVTFKAGSFGPREDAFFLAVTELACAKKLPLIYLAANSGARLGVAEEVKACFKVGWSDEISPENGFQYIYLSPEDHERIGSSVIAHEVKLSSGETRWVIDTIVGKEDGIGVENLTGSGAIAGAYSKAYNETFTLTFVSGRTVGIGAYLARLGMRCIQRLDQPIILTGFSTLNKLLGREVYSSHMQLGGPKIMGTNGVVHLTVSDDLEGVSAILNWLSYIPAYVGGPLPVLAPLDPPERIVEYVPENSCDPRAAIAGVKDNTGKWLGGIFDKNSFIETLEGWARTVVTGRAKLGGIPVGVVAVETQTVMQIIPADPGQLDSHERVVPQAGQVWFPDSAAKTAQALMDFNREELPLFILANWRGFSGGQRDLFEGILQAGSTIVENLRTYRQPVFVYIPMMGELRGGAWVVVDSQINSDYVEMYADETARGNVLEPEGTIEIKFRTKELLECMGRLDQKLISLKAKLQDAKQSEAYANIELLQQQIKAREKQLLPVYIQIATKFAELHDTSMRMAAKGVIKSVVEWSGSRSFFYKKLNRRIAESSLVKNVREASGDNLAYKSSMRLIQDWFCNSDIAKGKEEAWTDDQVFFTWKDNVSNYELKLSELRAQKLLNQLAEIGNSSDLQALPQGLANLLNKVEPSKREELVAAIRKVLG

SEQ ID NO: 9504 - DNA, 1614 bp, Arabidopsis thaliana
  CDS (1)..(1614)
atggacgcttctatgattaccaattccaaatccattacttctccaccctctttagccttagggaagtcaggaggaggaggagttatcagaagttcactatgtaacttaatgatgccaagcaaagttaacttccctagacaaagaactcaaactctaaaggttagccagaagaaactcaagagagctactagtggtggtcttggtgttacatgcagtggtggtgataagattctcgtagcgaatcgaggtgaaattgcagttcgtgttatcagaactgctcatgaaatggggattccttgtgttgctgtgtattctactatagataaagatgctcttcatgttaaattagctgatgaagctgtttgtattggtgaagctcctagtaaccagtcgtatttggtgattccgaatgttctgtctgcggctattagccgtggatgtacaatgcttcatcctggatatggttttctttcggagaacgctctctttgttgaaatgtgtagagaccatgggatcaattttattggacctaatcctgatagcatccgtgttatgggagacaaagcgactgcaagagagacaatgaaaaatgcaggggttcccactgtaccagggagtgatgggctattgcagagtacagaagaagctgtcagggtcgccaatgagattggtttccctgtaatgatcaaggcaacagctggtggtggtggacgtggaatgcgtcttgctaaggaaccgggagagtttgtaaaactgttgcagcaagctaagagcgaggctgctgctgcttttgggaatgatggatgttatctggagaagttcgtacaaaaccctagacatattgagttccaggtgctggcagataaatttggaaatgttgttcactttggtgagcgtgactgcagcatccagaggcgtaaccaaaagcttctggaagaagcaccttctccagcattgaccgctgaattgcgaaaagccatgggtgatgcagcagtcgcagcagcagcatccattgggtacattggtgttggtactgtggagtttcttttagatgagagaggttccttctacttcatggaaatgaacactaggatccaggtggagcatcctgtgacagagatgatttactctgttgatttgatagaggagcagattcgtgttgcaatgggagagaaacttcgttacaaacaggaagatattgtgctcagagggcactcaattgaatgtcgtatcaatgcagaagatccatttaaaggattcagacctggacctggcagaataacatcatacctgccatctggaggtcctttcgttagaatggacagccatgtctattccgactatgttgtgcctccaagctatgattctcttcttgggaagcttattgtgtgggctccaacgagggaaaaagcaattgaacggatgaagcgggcgcttaatgacactatcattacaggggttccaacgactatcaattaccacaaacttatccttgatgttgaggatttcaaaaatggaaaagttgatacagctttcatcgtcaagcatgaagaggagctagctgagcctcaagaaattgtggcagtgaaagatctgacaaacgcaacggtttag

SEQ ID NO: 9505 - protein, 537 aa, Arabidopsis thaliana
MDASMITNSKSITSPPSLALGKSGGGGVIRSSLCNLMMPSKVNFPRQRTQTLKVSQKKLKRATSGGLGVTCSGGDKILVANRGEIAVRVIRTAHEMGIPCVAVYSTIDKDALHVKLADEAVCIGEAPSNQSYLVIPNVLSAAISRGCTMLHPGYGFLSENALFVEMCRDHGINFIGPNPDSIRVMGDKATARETMKNAGVPTVPGSDGLLQSTEEAVRVANEIGFPVMIKATAGGGGRGMRLAKEPGEFVKLLQQAKSEAAAAFGNDGCYLEKFVQNPRHIEFQVLADKFGNVVHFGERDCSIQRRNQKLLEEAPSPALTAELRKAMGDAAVAAAASIGYIGVGTVEFLLDERGSFYFMEMNTRIQVEHPVTEMIYSVDLIEEQIRVAMGEKLRYKQEDIVLRGHSIECRINAEDPFKGFRPGPGRITSYLPSGGPFVRMDSHVYSDYVVPPSYDSLLGKLIVWAPTREKAIERMKRALNDTIITGVPTTINYHKLILDVEDFKNGKVDTAFIVKHEEELAEPQEIVAVKDLTNATV

SEQ ID NO: 9506 - DNA, 1335 bp, Aquifex aeolicus VF5
  CDS (1)..(1335): transl_table=11
atgttcaaaagggttttaatagccaacaggggagaaatcgcagtaagggctataagggcgtgtagggaactgggattgaaaactgtggcgatttactcggaggctgacaaaaacagcctccatgtagaactcgcagacgaagctatatgcataggtcctcccgacccttcaaagagttatctcgatattccgaggataatgtccgcactggaagtgagtaaagctgatgcggtgtatcccggctacggatttttatccgagaacccaaaattcgcggaaatcgtagaaaagagcggggcgaagtttataggaccacgctccgaggttctggcgaagattggggataaagttctggcaaagaaggttgcaaaggaagtaggactccctttagttcccggaagcgatgagccccttgagttttctgaagctgtgaaactcgcttcaaagataggttatcccgttgttataaaggctgcggccggaggcggaggaaggggaataagaataataagggatgaaaaagaactgagggaaaagtttcccttagcgaagaaagaggcggaaagtgctttcggagatggtaggctttacatagaaaagtacgtgataaatcccaaacacatagagtttcaggtaattgcggacgaacacggaaacgtgtacgttctcggagaaagggaatgctctattcagagaagacaccagaagttaatagaagaagctccgagtgtttccgtgagtgaagagaaaagaaaggaaatctccgaaaaggtagcggaattttgtaaaagactcggttacacttccgcggggacggttgagttcctgatggacgaagaggggaacttttactttatggaaatgaacggaaggatacaggttgaacacccggtaacggagatggtaacgggtgtggacatagtaaagctccagttaatagcagccatgggagaggagataaaacttgaaaaagtggaaactaatggttttgctatagagttcaggataaacgctgaagatccagtaacttttattccctctcccgggcaggtggaaaaattaatccttcccggaggtccgggagtcagagtagacactcacctgtaccaaggctacacagttccgccctattacgactccctgcttgcaaagataattgtatggggaaatacgcgtcaggaagcgatagcgagaggaaaaagggctctcggagaactaaagattgaaggaaagggattaaaggtcaacacggaatttcaccttagggtacttgatcagaaagagtttatagaaggaaagcacgacataacctttgtggaaaggataatggtttaa

SEQ ID NO: 9507 - protein, 444 aa, Aquifex aeolicus VF5
MFKRVLIANRGEIAVRAIRACRELGLKTVAIYSEADKNSLHVELADEAICIGPPDPSKSYLDIPRIMSALEVSKADAVYPGYGFLSENPKFAEIVEKSGAKFIGPRSEVLAKIGDKVLAKKVAKEVGLPLVPGSDEPLEFSEAVKLASKIGYPVVIKAAAGGGGRGIRIIRDEKELREKFPLAKKEAESAFGDGRLYIEKYVINPKHIEFQVIADEHGNVYVLGERECSIQRRHQKLIEEAPSVSVSEEKRKEISEKVAEFCKRLGYTSAGTVEFLMDEEGNFYFMEMNGRIQVEHPVTEMVTGVDIVKLQLIAAMGEEIKLEKVETNGFAIEFRINAEDPVTFIPSPGQVEKLILPGGPGVRVDTHLYQGYTVPPYYDSLLAKIIVWGNTRQEAIARGKRALGELKIEGKGLKVNTEFHLRVLDQKEFIEGKHDITFVERIMV

SEQ ID NO: 9508 - DNA, 1374 bp, Chlamydia trachomatis D/UW-3/CX
  CDS (1)..(1374): transl_table=11
atgaagaaagtattgattgcaaatagaggcgagatagctattcggattattcgagcatgtcatgatctaggattagctactgttgctgtatattctatggcggatcaagaagctttgcatgtgcttcttgctgacgaagctgtttgtattggagaagctcaggcagcaaaatcctacctaaagatcgccaatattttagctgcttgtgagattactggggtagatgctgtgcatcctggttatggtttcttaagtgaaaatgcaaactttgcttctatttgtgaaagttgtgggctcacatttatcggtcctagtgctgagtcgatagcgactatgggagataaagtcgcagctaagcagttggctaaaaagattaagtgccctgtaatccctggatctgaaggtgtagtgaaggatgaggtggaagggattagaattgcagaaaagatcggattccccatcgtcatcaaagctgttgctggaggcggtggacgaggaatacggattgttagagaaaaagacgaattctacagggcttttactgccgctcgggctgaagcagaagcgggatttaataatcctgacgtgtatattgaaaaatttattgaaaatccaagacatttagaagttcaagtaattggagataagcacggaaattacgtgtatcttggagaacgagattgtacagtacaaaggcgtcggcaaaaattaatagaagagactccaagtcctattttaactccagaaatgcgagctaaagttggaaaagtagcagtggatttagctcggagtgccgggtatttctctgttggaacagtagaatttctgttagataaggagaagcgtttttatttcatggagatgaatacgcgtatccaagtggaacatactattacggaagaagtgacagggatcgatttgttaaaggctcagattagtgtcgctaagggagaaaaactgccttggaagcaaaagaatataaagtttaaagggcacgtgattcaatgccgaatcaatgcagaggatccaattaataactttactccttcccctggtagattagattattatctccctcctgcaggtcctgctgtgcgagtagacggggcttgctacagtggttatgcgatacctccttattatgattccatgattgctaaggtaatcacaaaaggaaagaatcgagaggaagcgatagccattatgaaaagagctttaaaagagttccatattggtggggtgcattctacaattccttttcatcagttcatgttggataatccgaagtttcttctttctgattatgatattaattacgtggaccagcttttagcgtctggtagcacctttttaaatttagctgatggcagctaa

SEQ ID NO: 9509 - protein, 457 aa, Chlamydia trachomatis D/UW-3/CX
MKKVLIANRGEIAIRIIRACHDLGLATVAVYSMADQEALHVLLADEAVCIGEAQAAKSYLKIANILAACEITGVDAVHPGYGFLSENANFASICESCGLTFIGPSAESIATMGDKVAAKQLAKKIKCPVIPGSEGVVKDEVEGIRIAEKIGFPIVIKAVAGGGGRGIRIVREKDEFYRAFTAARAEAEAGFNNPDVYIEKFIENPRHLEVQVIGDKHGNYVYLGERDCTVQRRRQKLIEETPSPILTPEMRAKVGKVAVDLARSAGYFSVGTVEFLLDKEKRFYFMEMNTRIQVEHTITEEVTGIDLLKAQISVAKGEKLPWKQKNIKFKGHVIQCRINAEDPINNFTPSPGRLDYYLPPAGPAVRVDGACYSGYAIPPYYDSMIAKVITKGKNREEAIAIMKRALKEFHIGGVHSTIPFHQFMLDNPKFLLSDYDINYVDQLLASGSTFLNLADGS

SEQ ID NO: 9510 - DNA, 1368 bp, Helicobacter pylori J99
  CDS (1)..(1368): transl_table=11
atgaataaagaaaataaaaaggtggaaaaaaaagaactttcgcgcattttgatcgctaataggggcgagatcgctttaagagcgatccaaaccattcaagaaatgggtaaagaatccatagccatttattctatcgctgacaaggacgcccactatctcaatacggctaacgcaaaagtgtgtatagggggggcaaaatccagcgagagttacttgaatatccctgcgatcatcagcgcggcggaattgtttgaagccgatgcgattttccctgggtatgggtttttgagtgaaaatcaaaactttgtagagatttgctcgcaccattctttagagtttattggcccaagcgcaaaagtcatggctttaatgagcgataaagctaaagccaaaatcgtgatgaaagaagccggcatgcctgtgattgagggcagtgatgggttgcttaaaagctatcaagaagctgaagaaatcgctgataaaatcggttatcctgtcatcattaaagcggccgctggtgggggcggaaggggaatgcgcgtcgtaggagataaatccaagcttaaaaacctctatctagccgcagaaacggaagctttgagcgcgtttggcgatgggagcgtgtatttagaaaaatttatcaacaagcccaagcacattgaagtccaaattctagccgacaagcatggcaatgtcattcatgtaggcgaaagggattgttcggtgcaaagacgccagcaaaagctcattgaagaaaccccggcggtggttttagaagaaagcgtgcgtaagcgtttgctagaaacagcgatcaaggccgctaaatacatcggctatgtgggggcggggacttttgaatttttgcttgattctaacatgaaagatttttatttcatggagatgaacactcgtttgcaagtggaacacaccattagcgaaatggtgagcgggttaaacctcattgagtggatgattaaaatcgctcaaggcgaagaattgcccaagcaagaaagcttttctctcaaagggcatgcgatagaatgccgaatcacagcagaagatcctaaaaaattctacccaagcccgggcaaaatcaccgaatggatcgcccctggtggggtgaatgtgcgccttgattcgcatgcgcatgccaattatgtcgtgcctacgaactatgattccatgataggcaagctcattgtgtggggtgaaaacagagaaagagcgatcgctaagatgaaaagggctttaaaggaatttaaagtagaaggcattaaaacgaccattccttttcatattgaaatgcttgaaaatgcggatttcaggcaagcaaaaatccacacgaagtatttagaagaaaatttttaa

SEQ ID NO: 9511 - protein, 455 aa, Helicobacter pylori J99
MNKENKKVEKKELSRILIANRGEIALRAIQTIQEMGKESIAIYSIADKDAHYLNTANAKVCIGGAKSSESYLNIPAIISAAELFEADAIFPGYGFLSENQNFVEICSHHSLEFIGPSAKVMALMSDKAKAKIVMKEAGMPVIEGSDGLLKSYQEAEEIADKIGYPVIIKAAAGGGGRGMRVVGDKSKLKNLYLAAETEALSAFGDGSVYLEKFINKPKHIEVQILADKHGNVIHVGERDCSVQRRQQKLIEETPAVVLEESVRKRLLETAIKAAKYIGYVGAGTFEFLLDSNMKDFYFMEMNTRLQVEHTISEMVSGLNLIEWMIKIAQGEELPKQESFSLKGHAIECRITAEDPKKFYPSPGKITEWIAPGGVNVRLDSHAHANYVVPTNYDSMIGKLIVWGENRERAIAKMKRALKEFKVEGIKTTIPFHIEMLENADFRQAKIHTKYLEENF

SEQ ID NO: 9512 - DNA, 1359 bp, Bacillus halodurans C-125
  CDS (1)..(1359): transl_table=11
atgataaagaaactgctagttgccaatcgcggggaaattgccgttcgaattattcgcgcttgtcgcgagttaggaattgaaaccgtggctgttttttcagaagctgatcgcgatgcccttcacgtacgaatggcggatgaagcttattgcattggaccgacgccatctgcaaaaagctatttaaacttcacgaatatcatgagtgtggcgactttaactgaagtggatgcgattcaccctggatatggatttttagcagagaacgccgattttgctgaaatatgtggggaatgcaacattacttttgtaggtcctagtgcggatgcgattagcaaaatgggaacgaaagacgtggcaagagaaacaatgaaacgtgccggcgttccaatcgtcccaggctcagaaggaatcatcgagagtgtggaagacggcttagcagtagcggaacaaatcggttatccagtcatcattaaagctacagcaggcggtgggggtaagggaattcgcgtcgctcgtaatgaagaggaattgcgaaaaggtattaacattacccaacaagaagccgcaacagcgttcgggaatcctggtgtctaccttgaaaaatacattgaagatttccgtcatgttgaaattcaagtgcttgccgacaaccacggtcacgtaattcatctaggggaacgggactgctcgattcagcgaagattgcaaaagctattagaggaaacaccgtctcctgcaattacagagaagaagcgtaaggagatgggggaagccgctgttgctgcagcgaaagccgtcaactattcgggggcaggaaccgttgagtttatttatgaccataataatggtgatttctactttatggaaatgaacacgagaatccaagttgagcatccagtgacagaaatggtgacgggaattgacttgattaaagagcaaatcaaagtagcttcagggaagccgttgtcctacaaacaagaagacgttacatttaatggttggtcgatagagtgtcggattaacgcagaaagcccagagaaaaattttatgccatctccaggtaaattaaaaagctacttagcacctggtggactaggagttcgggtcgattctgctgcatacccaggctatactattcctcctttttacgattccatgattgctaaggtgatcacccacggagcgacaagggacgaggcgattgcaaaaatgaagcgagcacttgcagagtttgaggtagagggaattgagacgaccattccgtttcacttgcgcttgctaaaccatgaaacgtttgtatctggagatttcaacacgaaatttttagagatttataacatcatggaggagagcaaatag

SEQ ID NO: 9513 - protein, 452 aa, Bacillus halodurans C-125
MIKKLLVANRGEIAVRIIRACRELGIETVAVFSEADRDALHVRMADEAYCIGPTPSAKSYLNFTNIMSVATLTEVDAIHPGYGFLAENADFAEICGECNITFVGPSADAISKMGTKDVARETMKRAGVPIVPGSEGIIESVEDGLAVAEQIGYPVIIKATAGGGGKGIRVARNEEELRKGINITQQEAATAFGNPGVYLEKYIEDFRHVEIQVLADNHGHVIHLGERDCSIQRRLQKLLEETPSPAITEKKRKEMGEAAVAAAKAVNYSGAGTVEFIYDHNNGDFYFMEMNTRIQVEHPVTEMVTGIDLIKEQIKVASGKPLSYKQEDVTFNGWSIECRINAESPEKNFMPSPGKLKSYLAPGGLGVRVDSAAYPGYTIPPFYDSMIAKVITHGATRDEAIAKMKRALAEFEVEGIETTIPFHLRLLNHETFVSGDFNTKFLEIYNIMEESK

SEQ ID NO: 9514 - DNA, 1347 bp, Pasteurella multocida subsp. multocida str. Pm70
  CDS (1)..(1347): transl_table=11
atgttagagaaagtggttattgccaatcgtggtgaaattgcgctacgtattttgcgtgcttgcaaagaattaggcataaaaactgttgcggtgcattccacagcagaccgtgaattgaaacatgttttacttgcagatgaaactgtttgtattggtcctgcgccttcaacgaaaagttatcttaatattccggctatcattgcagcggctgaagtaacaggtgcggatgccattcaccctggttatggttttttatctgaaaatgcagattttgcggagcaagttgaacgttctggatttatttttattggtcccactgcagacgtgatccgtttaatgggtgacaaagtttctgcgattgaagcaatgaagaaatcaggtgtaccttgtgtaccgggctctgatggtcctgtgggtagcgatatggtaaaaaataaagaaatcgccaaacgtattggttaccctgtgattattaaagcttcaggcggcggtggtggtcgtggtatgcgtgtagtgcgtgatgaggcctctttagaagaatctatcgcgatgaccaaagcagaagcaaaagcggcttttaataacgatatggtgtatatggaaaaatacctagaaaatccacgtcatattgaaattcaagtcttagccgatacccatggtaatgccatttatttagcggagcgtgattgctcaatgcaacgtcgccatcaaaaagtagtagaagaagccccagcaccgggtatttccgatgaagttcgtcgtgatattggtgaacgttgtgccaaagcatgcgtagaaattggttatcgtggggcaggtacgtttgagttcttgtatgaaaatggggagttctatttcattgagatgaatacccgtattcaagtagaacatccagtcacagaaatgatcacgggtgtggacttggtgaaagaacaattgcgtatcgcagccggattgccgatctccattaagcaagaagatgtgaaagtgcgtggtcatgcgatcgaatgccgtattaatgcagaagatcctaaatccttcttgccttcaccgggtaaggtggatcatttacactctccgggtggattaggtgtgcgttgggattcacatgtttatgcgggttataccgtcccaccacattatgattcaatgattgcaaaattgattacttatggtgatactcgtgaagtcgcgattcgtcgtatgcaaaatgcactgggtgaaacgattttaaccggtattaaaaccaatattcctctgcacgaattgattctggcagatgaaaattttcaacagggtggcacgaatatccattacctagagaaaaaacttggcatgcgtgactaa

SEQ ID NO: 9515 - protein, 448 aa, Pasteurella multocida subsp. multocida str. Pm70
MLEKVVIANRGEIALRILRACKELGIKTVAVHSTADRELKHVLLADETVCIGPAPSTKSYLNIPAIIAAAEVTGADAIHPGYGFLSENADFAEQVERSGFIFIGPTADVIRLMGDKVSAIEAMKKSGVPCVPGSDGPVGSDMVKNKEIAKRIGYPVIIKASGGGGGRGMRVVRDEASLEESIAMTKAEAKAAFNNDMVYMEKYLENPRHIEIQVLADTHGNAIYLAERDCSMQRRHQKVVEEAPAPGISDEVRRDIGERCAKACVEIGYRGAGTFEFLYENGEFYFIEMNTRIQVEHPVTEMITGVDLVKEQLRIAAGLPISIKQEDVKVRGHAIECRINAEDPKSFLPSPGKVDHLHSPGGLGVRWDSHVYAGYTVPPHYDSMIAKLITYGDTREVAIRRMQNALGETILTGIKTNIPLHELILADENFQQGGTNIHYLEKKLGMRD

SEQ ID NO: 9516 - DNA, 1377 bp, Pseudomonas aeruginosa PAO1
  CDS (1)..(1377): transl_table=11
atgcacaagcgactgaacaagctgctggtggccaatcgcggcgagatcgccgtgcgcatcatccgcgccgcgcaggcactgggcattcccacggtagcggtgtgcagcgaggcggatcgcgattcgctggccgcgcggctggccgatgaggtacgcctgatcggccctgcgcgggccgaccggagctacctggatatcgaggcgattctcatggcggcgcgggaaaccggtgccgactcgatccatcccggctacggtttcctctccgagaaccccgccttcgccgaagcggtgcaggcggccggcctggtcttcgtcggtccggaggcgcagaccatccgccgcatgggcgacaaggccgaggcgcggcgtaccgcgatggccgccggggtgccggtggtgccgggctcgcccggcgagctgggcgacctcgacgcggcgctggcttgcgccgaagaggtcggctatccgctgctggtcaaggcctccgccggcggcggcgggcgtggcatccgtatcgcccacgacgccgacgaactgcgtcgggaattccccatcgcccagcgcgaggcgcaggccgccttcggttcgccggcggtgtacctggagcgcttcatccgccaggcacggcacatcgaagtgcagatcctcggcgatggcgagcgcgcggtgcatctgttcgaacgcgaatgctcgctgcagcggcggcgccagaaggtcttcgaggaggcaccttcggcggcgctggacggcgcgcagcgccaggccctctgcgagagcgcggtgcgcctggcgcagagtctcggctatcgtggcgcgggcaccctggaatacctgttcgacgcgcacagcggcgagttcttcttcatcgagatgaacacccgtatccaggtcgagcatccggtcagcgagatggtcaccggcatcgacctggtccaggccatgctgcgcatcgccgccggcgaggcgctgccctggcgccaggaggacattcgcctgaacggcgcggcgctggagatgcggatcaacgccgaagatccggcgcgcaatttcttccccagccccggcaccgtggagcgcctggaatggccgcagggcgagggcgtgcgagtggacagccacctgtatcccggctaccgggtgccgccgtactacgattcgttgctggccaagctgatcgtccatggtcgcgaccgcgacgaagcgttcgcccgcgcgcgccaggcgctggagcgcaccgtgctggccggcatggccactaccctgccgctgcaccgctggctgctcgccgatgcgcgggtacaggccgcgcagttcgataccgctaccctggaaacctggctcgccgagcggaccgccgccgcgcaggaggtttga

SEQ ID NO: 9517 - protein, 458 aa, Pseudomonas aeruginosa PAO1
MHKRLNKLLVANRGEIAVRIIRAAQALGIPTVAVCSEADRDSLAARLADEVRLIGPARADRSYLDIEAILMAARETGADSIHPGYGFLSENPAFAEAVQAAGLVFVGPEAQTIRRMGDKAEARRTAMAAGVPVVPGSPGELGDLDAALACAEEVGYPLLVKASAGGGGRGIRIAHDADELRREFPIAQREAQAAFGSPAVYLERFIRQARHIEVQILGDGERAVHLFERECSLQRRRQKVFEEAPSAALDGAQRQALCESAVRLAQSLGYRGAGTLEYLFDAHSGEFFFIEMNTRIQVEHPVSEMVTGIDLVQAMLRIAAGEALPWRQEDIRLNGAALEMRINAEDPARNFFPSPGTVERLEWPQGEGVRVDSHLYPGYRVPPYYDSLLAKLIVHGRDRDEAFARARQALERTVLAGMATTLPLHRWLLADARVQAAQFDTATLETWLAERTAAAQEV

SEQ ID NO: 9518 - DNA, 1368 bp, Lactococcus lactis subsp. lactis Il1403
  CDS (1)..(1368): transl_table=11
atgtttaataaaattttgattgccaatcgtggcgaaattgctgtaagaattattcgtgcagctcgtgaattaggagtgggtacagttgccatttattcaactgcagaccgcgatgctttacatgttcatttagctgacgaagcaatttgtgtgggcccagctagaagtactgagtcttatcttaatatgaataatattctgtcagctgctgtggcaactggcgcacaagcgattcacccaggttttggattcctttctgagaattcaaaatttgctcgtctttgtgaagaaatgaatattaaatttatcggtccgtcagcaaaagttatggatatgatgggtgataaaatcaatgctcgtgcagaaatgattaaagctggtgttcctgtaacaccgggttctgagggcgaagttcataccactgatgaagcagtaaaaattgctgaagaaattggctatccaatcatgcttaaagcatcagctggtggtggtggtaaaggaattcgtaaggttaataatgttgaggaacttgttccagcatttgaggcagcacaagcggaagcacaagcagcttttggtaatggagccatgttcatcgaacgaatgattttcccagcgcgtcatattgaggttcaaatcttaggagatagtcaaggaaatgtgattcatcttggtgaacgtgattgttcattgcaaagaaataatcaaaaagttcttgaagaatctccgtcagttgcaattggacacactttacgaaatgaaataacagctgcggctgttaaagctgctcagcatgtttcttatgaaaatgcgggaaccattgagttcttacttgatgaatcttctggtaagttttatttcatggaaatgaacacacgtgttcaagttgaacatccggtcacagagtttgtatcaggtgttgatattgtaaaagaacagattcgtgtagccaatggcaatgaattgtctgtcaagcaagaagatgtgacttttagtggacatgcgattgaatgtcgaattaatgcggaaaatcctaaatttaattttgcaccaagtccaggaaaaattactaatcttttcttgccaagtggtggagttggtttgcgggttgatagcgctatgtacagtggttacagtattccgccatattatgatagtatgattgctaaagtcattgttcatggtgaaaatcgttttgaagcactgatgaaaatgcaacgcgcccttcttgaatttgacgttgaaggggtcattacaaatgttgatttccaactagaattaatttctgacccacatgttgtggcaggagattatgatacaagcttcttaggaaatgttttcttaccagaatatcaaaaagaagattaa

SEQ ID NO: 9519 - protein, 455 aa, Lactococcus lactis subsp. lactis Il1403
MFNKILIANRGEIAVRIIRAARELGVGTVAIYSTADRDALHVHLADEAICVGPARSTESYLNMNNILSAAVATGAQAIHPGFGFLSENSKFARLCEEMNIKFIGPSAKVMDMMGDKINARAEMIKAGVPVTPGSEGEVHTTDEAVKIAEEIGYPIMLKASAGGGGKGIRKVNNVEELVPAFEAAQAEAQAAFGNGAMFIERMIFPARHIEVQILGDSQGNVIHLGERDCSLQRNNQKVLEESPSVAIGHTLRNEITAAAVKAAQHVSYENAGTIEFLLDESSGKFYFMEMNTRVQVEHPVTEFVSGVDIVKEQIRVANGNELSVKQEDVTFSGHAIECRINAENPKFNFAPSPGKITNLFLPSGGVGLRVDSAMYSGYSIPPYYDSMIAKVIVHGENRFEALMKMQRALLEFDVEGVITNVDFQLELISDPHVVAGDYDTSFLGNVFLPEYQKED

SEQ ID NO: 9520 - DNA, 1833 bp, Halobacterium sp. NRC-1
  CDS (1)..(1833): transl_table=11
atgttcgagaaggtactcgttgccaaccgcggcgagatcgcggtgcgtgtgatgcgggcgtgtgacgacctcggggtcgacacggtcgctgtgtacagcgatgccgacgcgcacgccggacacgtgcggtacgccgacgaggcgtacaacgtcgggccggcgcgcgcggcggactcctatctcgaccacgacgccatcatcgacgcggccacgcgggccggggccgacgccatccaccccggctacggcttcctcgccgagaacgccgagttcgcgggcaaagtcgaggacaccgacggcgtcacgtgggtcggcccgtccgcggactcgatgcgccagctcggcgagaagaccagcgcccggaagacgatgcgggaggccgacgtgcccatcgtccccggtaccaccgaccccgtggagtccgtcgccgacatccacgagttcggcgaggaacacggctaccccatcgctatcaaggccgagggcggtggtggcggccgcggcatgaagatcgtgcgcagcgccgacgaggccgaagaccaactggagtcggcggagcgtgagggtgaggcgtacttcgacaacgcgaacgtctatctggagcgctacttggagaacccccgccacatcgaggtccagatccttgcggaccaccacgggaacgtccggcacctcggcgagcgggactgttcgctgcagcgccgccaccagaaagtcatcgaagaaggcccgagccccgcgctcacggacgagcttcgcgaggagatcgggacggcggcccggcgtggagccgacgccgcgggctactacaacgcaggcaccttcgagttcctcgtcgaggaagacaccgagcgggagcccggtgacctcctcgggccggagacggagttctacttcctcgaagtgaacacccggattcaggtcgagcacaccgtcacggaggcgctcacgggcgtcgacattgtgaagtggcagctcaagatcgcatccgacgacgagctcaccttcgagcaggacgacgtggcactggacggccacgccgtcgagtaccgcatcaacgcggagaacgcggccgacgacttcgcgcccgccacgggcggcgagttggagacctacgacccgccgggcggcatcggcgtgcgcgtcgacgacggcctccggcagggcgacgatctcgtcaccgactacgactcgatggtcgcgaagctcatcgtgcacggcagcgaccgcgaggagtgtctggcgcggtcccggcgcgcgctcgccgagtacgacatcgagggcatcccgacgatcatcccgttccatcggctgatgctgaccgacgacgcgttcgtcgggggcacgcacacgacgaagtatctcgaccgcgacatcgaggagtcgcggatcagtgacgcccaggcggagtgggggacgacgacggcctccgagagcagtgccgatgagaacgtggtggagcgggatttcacggtggaagtcaacggcaagcgcttcgaggtcaacctggaggagcgcggcgcggcgcagttcgctgcccccgaagcggacaccggcggcggcgggccgccggagcccgcgggcggagccgacgacggcgagacggtcgttgagggcgacggcgagacggtcacggcggagatgcaggggacgatcctggacgtggccgtgtccgagggcgatgcggtcgacgcaggagacgtgctggttgtgctggaagcgatgaaaatggagaacgacgtcgtggcgtcccacggtggcacggtcacgcaggtcgccgtcagcgaggacgacagcgtcgacatggacgacgtgctggtggtcatcgactag

SEQ ID NO: 9521 - protein, 610 aa, Halobacterium sp. NRC-1
MFEKVLVANRGEIAVRVMRACDDLGVDTVAVYSDADAHAGHVRYADEAYNVGPARAADSYLDHDAIIDAATRAGADAIHPGYGFLAENAEFAGKVEDTDGVTWVGPSADSMRQLGEKTSARKTMREADVPIVPGTTDPVESVADIHEFGEEHGYPIAIKAEGGGGGRGMKIVRSADEAEDQLESAEREGEAYFDNANVYLERYLENPRHIEVQILADHHGNVRHLGERDCSLQRRHQKVIEEGPSPALTDELREEIGTAARRGADAAGYYNAGTFEFLVEEDTEREPGDLLGPETEFYFLEVNTRIQVEHTVTEALTGVDIVKWQLKIASDDELTFEQDDVALDGHAVEYRINAENAADDFAPATGGELETYDPPGGIGVRVDDGLRQGDDLVTDYDSMVAKLIVHGSDREECLARSRRALAEYDIEGIPTIIPFHRLMLTDDAFVGGTHTTKYLDRDIEESRISDAQAEWGTTTASESSADENVVERDFTVEVNGKRFEVNLEERGAAQFAAPEADTGGGGPPEPAGGADDGETVVEGDGETVTAEMQGTILDVAVSEGDAVDAGDVLVVLEAMKMENDVVASHGGTVTQVAVSEDDSVDMDDVLVVID

SEQ ID NO: 9522 - DNA, 1332 bp, Campylobacter jejuni subsp. jejuni NCTC 11168
  CDS (1)..(1332): transl_table=11
atggaaattaaaagcatattaattgctaatcgtggagaaatagcactgcgtgctttaagaacgattaaagaaatgggtaaaaaagcaatttgtgtgtattctgaagcagataaagatgctttgtatttaaaatacgctgatgcaagcatttgtataggtaaggcaagaagttctgaaagttatttaaatatcccagctatcatcgcagcggctgaaatagcagaagctgatgcgatttttccaggatacggatttttaagtgaaaatcaaaattttgttgaaatttgtgctaaacataacatcaaatttataggtccttctgtggaagctatgaatttaatgagtgataaatcaaaagcaaaacaagtcatgcaaagagcaggcgtacctgtgatcccaggaagcgatggggctttggcaggagctgaagcagctaaaaaacttgccaaagaaataggttatcctgtgattttaaaagcagctgcaggtggtggtggtcgtggtatgcgtgtggttgaaaatgaaaaagatcttgaaaaagcgtattggtcggctgaaagcgaggctatgacagcatttggcgatggaactatgtatatggaaaaatacatacaaaatccacgccatatagaagtgcaggttataggagatagttttggcaatgtgattcatgtgggcgaaagagattgttctatgcaaagacgccatcaaaaacttatagaagaatcccctgcgattttgcttgatgaaaaaacacgcactaggcttcatgaaactgctattaaggcagctaaagctataggatatgaaggtgcgggaacttttgagtttttagtagataaaaatttagacttttattttatagaaatgaatacgcgtttgcaagttgaacactgtgtaagtgaaatggtaagtgggattgatatcatagaacaaatgattaaagtagcagaaggttatgccttaccatctcaagaaagtattaagcttaatgggcattctatagaatgtagaatcacagctgaagattctaaaaccttcttgccaagtccaggtaagattactaaatacattccacccgcaggacgcaatgtaagaatggaaagtcattgttatcaagactatagcgtgcctgcttattatgattctatgataggcaaacttgtagtttgggcagaagatcgtaataaagctattgcaaagatgaaagtagctttagatgagttgcttataagtgggataaaaacgactaaagattttcatctttccatgatggaaaatcctgattttattaataataattacgatacaaattatcttgcaagacattaa

SEQ ID NO: 9523 - protein, 443 aa, Campylobacter jejuni subsp. jejuni NCTC 11168
MEIKSILIANRGEIALRALRTIKEMGKKAICVYSEADKDALYLKYADASICIGKARSSESYLNIPAIIAAAEIAEADAIFPGYGFLSENQNFVEICAKHNIKFIGPSVEAMNLMSDKSKAKQVMQRAGVPVIPGSDGALAGAEAAKKLAKEIGYPVILKAAAGGGGRGMRVVENEKDLEKAYWSAESEAMTAFGDGTMYMEKYIQNPRHIEVQVIGDSFGNVIHVGERDCSMQRRHQKLIEESPAILLDEKTRTRLHETAIKAAKAIGYEGAGTFEFLVDKNLDFYFIEMNTRLQVEHCVSEMVSGIDIIEQMIKVAEGYALPSQESIKLNGHSIECRITAEDSKTFLPSPGKITKYIPPAGRNVRMESHCYQDYSVPAYYDSMIGKLVVWAEDRNKAIAKMKVALDELLISGIKTTKDFHLSMMENPDFINNNYDTNYLARH

SEQ ID NO: 9524 - DNA, 1362 bp, Neisseria meningitidis Z2491
  CDS (1)..(1362): transl_table=11
atgctgaaaaaagttttaatcgccaaccgaggcgaaatcgcattacgcgtactccgtgcctgccgcgaaatgggcattgccaccgtcgccgtgcattccgaggccgacaaagacagcctgcacgtcaaactcgccgacgaatccgtgtgcatcggccctgccgcatctgcacaaagctacctcaacgtccccgccattattgccgccgccgaagtaagctgcgcggacgctgtccacccgggctacggtttccttgccgaaaacgccgatttcgccgaacaggtcgagcagtccggctttacctttatcggcccgaaacccgacaccatccgcctgatgggcgacaaagtctccgccaaacacgcgatgatagcggcaggcgtaccctgcgtccccggttctgacggcgcattgcccgacgacggcgaagaaatcctcaaaatcgccgataaaatcggttatcccgtcattatcaaagcctctggcggcggcggcggtcgcggtatgcgcgtggtcgagaaaaaagaagacctcctccaatctgtcgaaatgaccaaggcagaagcaggcgcggcattcggcaacccgatggtttacatggaacgctatctgcaacgtccgcgccacgtcgaaatccaagtgattgccgacgaacacggcaacgccgtatatcttgccgagcgcgactgttcgctgcaacgccgccaccaaaaagtcatcgaggaagcaccggctccgttcatcactgaaaaagaacgcgccaaaatcggcaaagcctgtgccgacgcttgcaaacgcatcggctatcgcggcgcaggtacgtttgaattcctgtacgaagacggcgagttcttctttatcgagatgaacacacgcgttcaggttgagcatccggttaccgagctcatcaccggcgtggacattgtgcaggagcaactccgcatcgccgccggcctgcctttgcaatacaaacaaaaggatattcaagtcgaaggccacgcgtttgagtgccgtatcaacgccgaagacccatacaacttcatccccagcccgggcccgattgaaagctgccacctgcccagcggcttcggtatccgcgtcgacagccacatttaccaaggctaccgcatccctccttactacgacagcctgatcggcaaagtctgcgtcgtcggtaaagaccgcgaccaagccatggctaaaatgcgcgtagcccttgccgaactggcgattaccggcatcaaaaccaatacgccgctgcaccgcgacttgttcaacgacccaggtttccaaaaaggcggcgtcagcatccactatttggaacactggctggaagatcgcaaagccaaacaggacaagtaa

SEQ ID NO: 9525 - protein, 453 aa, Neisseria meningitidis Z2491
MLKKVLIANRGEIALRVLRACREMGIATVAVHSEADKDSLHVKLADESVCIGPAASAQSYLNVPAIIAAAEVSCADAVHPGYGFLAENADFAEQVEQSGFTFIGPKPDTIRLMGDKVSAKHAMIAAGVPCVPGSDGALPDDGEEILKIADKIGYPVIIKASGGGGGRGMRVVEKKEDLLQSVEMTKAEAGAAFGNPMVYMERYLQRPRHVEIQVIADEHGNAVYLAERDCSLQRRHQKVIEEAPAPFITEKERAKIGKACADACKRIGYRGAGTFEFLYEDGEFFFIEMNTRVQVEHPVTELITGVDIVQEQLRIAAGLPLQYKQKDIQVEGHAFECRINAEDPYNFIPSPGPIESCHLPSGFGIRVDSHIYQGYRIPPYYDSLIGKVCVVGKDRDQAMAKMRVALAELAITGIKTNTPLHRDLFNDPGFQKGGVSIHYLEHWLEDRKAKQDK

SEQ ID NO: 9526 - DNA, 1350 bp, Escherichia coli O157:H7 EDL933
  CDS (1)..(1350): transl_table=11
  misc_feature (665)..(665): y is t or c
atgctggataaaattgttattgccaaccgcggcgagattgcattgcgtattcttcgtgcctgtaaagaactgggcatcaagactgtcgctgtgcactccagcgcggatcgcgatctaaaacacgtattactggcagatgaaacggtctgtattggccctgctccgtcagtaaaaagttatctgaacatcccggcaatcatcagcgccgctgaaatcaccggcgcagtagcaatccatccgggttacggcttcctctccgagaacgccaactttgccgagcaggttgaacgctccggctttatcttcattggcccgaaagcagaaaccattcgcctgatgggcgacaaagtatccgcaatcgcggcgatgaaaaaagcgggcgtcccttgcgtaccgggttctgacggcccgctgggcgacgatatggataaaaaccgtgccattgctaaacgcattggttatccggtgattatcaaagcctccggcggcggcggtggtcgcggtatgcgcgtagtgcgcggcgacgctgaactggcacaatccatctccatgacccgtgcggaagcgaaagctgctttcagcaacgatatggtttacatggagaaatacctggaaaatcctcgccacgtcgagattcaggtactggctgacggtcagggcaactytatctatctggcggaacgtgactgctccatgcagcgccgccaccagaaagtggtcgaagaagcaccagcaccgggcattaccccggaactgcgtcgctacatcggcgaacgttgcgctaaagcgtgtgttgatatcggctatcgcggtgcaggtactttcgagttcctgttcgaaaacggcgagttctatttcatcgaaatgaacacccgtattcaggtagaacacccggttacagaaatgatcaccggcgttgacctgatcaaagaacagctgcgtatcgctgccggtcaaccgctgtcgatcaagcaagaagaagttcacgttcgcggccatgcggtggaatgtcgtatcaacgccgaagatccgaacaccttcctgccaagtccgggcaaaatcacccgtttccacgcacctggcggttttggcgtacgttgggagtctcatatctacgcgggctacaccgtaccgccgtactatgactcaatgatcggtaagctgatttgctacggtgaaaaccgtgacgtggcgattgcccgcatgaagaatgcgctgcaggagctgatcatcgacggtatcaaaaccaacgttgatctgcagatccgcatcatgaatgacgagaacttccagcatggtggcactaacatccactatctggagaaaaaactcggtcttcaggaaaaataa

SEQ ID NO: 9527 - protein, 449 aa, Escherichia coli O157:H7 EDL933
  misc_feature (222)..(222): The Xaa at location 222 stands for Phe, or Ser.
MLDKIVIANRGEIALRILRACKELGIKTVAVHSSADRDLKHVLLADETVCIGPAPSVKSYLNIPAIISAAEITGAVAIHPGYGFLSENANFAEQVERSGFIFIGPKAETIRLMGDKVSAIAAMKKAGVPCVPGSDGPLGDDMDKNRAIAKRIGYPVIIKASGGGGGRGMRVVRGDAELAQSISMTRAEAKAAFSNDMVYMEKYLENPRHVEIQVLADGQGNXIYLAERDCSMQRRHQKVVEEAPAPGITPELRRYIGERCAKACVDIGYRGAGTFEFLFENGEFYFIEMNTRIQVEHPVTEMITGVDLIKEQLRIAAGQPLSIKQEEVHVRGHAVECRINAEDPNTFLPSPGKITRFHAPGGFGVRWESHIYAGYTVPPYYDSMIGKLICYGENRDVAIARMKNALQELIIDGIKTNVDLQIRIMNDENFQHGGTNIHYLEKKLGLQEK

SEQ ID NO: 9528 - DNA, 1338 bp, Deinococcus radiodurans R1
  CDS (1)..(1338): transl_table=11
atgttcaagaaaatcctgatcgccaaccgtggcgagatcgccctgcgcgtcatccggacggcgcgggaaatgggcatccagacggtcgtggtgtattccaccgccgacgaaaagagcctgccggtgctgctcgccgacgaatcggtctgcgtggggccgcccgcttcaaatcagagctacctcaacatccccaacatcctctcggcggcgctgatgaccggcgccgaggcgattcaccccggctacggcttcatggccgagaaccccgacttcgccgagatgtgccgcgagcacggcatcgtgtttatcgggccgacgccggaaagtatgcgggcgctgggcagcaaagcgggcggacgcgaaatcgccgcacagagcaatgtgcccaccgtgccgggcactggcgtgctggaaagcgtggacgctgcgctgctcgccgccaagcagatcggctacccggtgctgctcaaggccagcgcgggcggcggcggacgcggccagaaagtgattcgcacccaggaagagctgcaaaagggcttcaatcaggcgcaggaagaagcgcggctgtacttcggcgacccggcgatcatcatggagaaattcctggaggagttccgccacatcgaggtgcaggtgatgggcgacggccaggggcacgtcatccacatcggcgagcgcgactgttcgattcagcgccgcaaccagaagctgatcgaggaagcgccctccacgctgcccgagtcgctgcgtcaggaaatcctcgccgccggggtgcgcctcgcccagttcgtgaactacgcgggcgccggcacgctggaattcatcatggaccgcgacggcaactactacttcatggagatgaacacccgcattcaggtcgagcactgcgtgtcggaaatgatttccagcctcgacctcgtgcgcctgcaaatcgaaattgccgccggcctgggcctcaacattcagcaggacgacgtgaagttgcacggccacgccatcgagtgccgcatcaacgccgaggaccccgacaaggacttccgcccggcagccggcaaaatcgacgacgcgcacttcgcgggcggagcgggcgtgcgggtggacacccacgtctacagcggctactcgatcccgccgcactacgactcgctgatcggcaaactgatcgtgtggcacgaggaccgcgacaaggcggtgtcgcgcatgaaacgggcgctggaagaaaccgtgattcaggggccgaagacgaccattccgctctacatcaagatcatggacaacccgttctacaaacgcggcgcggtgatgaccaacttcctgaagacgcgcatggagatgtag

SEQ ID NO: 9529 - protein, 445 aa, Deinococcus radiodurans R1
MFKKILIANRGEIALRVIRTAREMGIQTVVVYSTADEKSLPVLLADESVCVGPPASNQSYLNIPNILSAALMTGAEAIHPGYGFMAENPDFAEMCREHGIVFIGPTPESMRALGSKAGGREIAAQSNVPTVPGTGVLESVDAALLAAKQIGYPVLLKASAGGGGRGQKVIRTQEELQKGFNQAQEEARLYFGDPAIIMEKFLEEFRHIEVQVMGDGQGHVIHIGERDCSIQRRNQKLIEEAPSTLPESLRQEILAAGVRLAQFVNYAGAGTLEFIMDRDGNYYFMEMNTRIQVEHCVSEMISSLDLVRLQIEIAAGLGLNIQQDDVKLHGHAIECRINAEDPDKDFRPAAGKIDDAHFAGGAGVRVDTHVYSGYSIPPHYDSLIGKLIVWHEDRDKAVSRMKRALEETVIQGPKTTIPLYIKIMDNPFYKRGAVMTNFLKTRMEM

SEQ ID NO: 9530 - DNA, 1410 bp, Xylella fastidiosa 9a5c
  CDS (1)..(1410): transl_table=11
ttggccgttgccttaaggacgccgtacttcggaacctttctcatgttagacaaagtcgttattgccaaccgtggtgagatcgcgttgcgtattcttcgcgcatgccacacgttgggtatccgcacggttgcggttcactctaccgttgatcgcaatctgaagcatgtcgcgatggctgatgagtcggtgtgcattggctctgcaccctctgcggagagttatctcaatatcccggcgctgattgccgctgctgaggtcacggatgctcaggccatccaccctggctatggttttttgtcggaaaacgctagttttgctgaacgtgtggaacagtctggtttcattttcattgggccacgggcagagacgattcgtttaatgggcgacaaggtgcaggcgatccatgcgatgaaagcggctggtgtgccgtgtgtccctggttcggatggtccattgggtgatgacattgtcgctaacgtcaaaattgcacgtgagatcggttatccggtcatcattaaggctgccggcggcggcggtggacgtgggatgcgtgtggtacataccgaggtcggtttaaaggcggctatcgagaccacgcagtctgaagctaaagccgcttttggcaatggccaggtgtatatggaaaagtttctggagaatccgcgtcacgtggagattcaggtgctcgccgatggtcaggggaacgcgatccatttgggggagcgggattgttcgatgcaacgccgccatcagaaggtggtggaggaagcccccgcacccggtatcactgaggcgttgcgcaatgaaatcggtcaagtgtgtgtagatgcctgtattcgtatcggttaccgcggtgccgggacgtttgaatttctgttcgagaatggtcgtttttacttcatcgagatgaatacgcgcatccaggtagagcatccggtgacggagcgtatcactggtattgacttggtatgcgagcagttgcgtattgccgctggtcagccattgagtatcaagcagagcgatgtggtgttgcgtggccatgcgatcgaatgccgtatcaatgctgaggatgctgagacgtttttgcccaatccgggtttgattactgcgttccatccaccaggtggtccgggtgtgcgtatggatacgcatatctacagtggttacaaggtgccgccgaactatgattcgatgatcggcaagctcatcgtgcatggtccggaccgtgagacggcgattgcgcgcatgcatttggcgctgagcgaaatggttgtggatgggatcaagaccaatatcccattgcagcagcgcattatgtgcgataagggtttccagttcggtggacagaacatccattatttggagaagtgtttggcggagcgtaagaaccaaacgatcgggcggacctga

SEQ ID NO: 9531 - protein, 469 aa, Xylella fastidiosa 9a5c
MAVALRTPYFGTFLMLDKVVIANRGEIALRILRACHTLGIRTVAVHSTVDRNLKHVAMADESVCIGSAPSAESYLNIPALIAAAEVTDAQAIHPGYGFLSENASFAERVEQSGFIFIGPRAETIRLMGDKVQAIHAMKAAGVPCVPGSDGPLGDDIVANVKIAREIGYPVIIKAAGGGGGRGMRVVHTEVGLKAAIETTQSEAKAAFGNGQVYMEKFLENPRHVEIQVLADGQGNAIHLGERDCSMQRRHQKVVEEAPAPGITEALRNEIGQVCVDACIRIGYRGAGTFEFLFENGRFYFIEMNTRIQVEHPVTERITGIDLVCEQLRIAAGQPLSIKQSDVVLRGHAIECRINAEDAETFLPNPGLITAFHPPGGPGVRMDTHIYSGYKVPPNYDSMIGKLIVHGPDRETAIARMHLALSEMVVDGIKTNIPLQQRIMCDKGFQFGGQNIHYLEKCLAERKNQTIGRT

SEQ ID NO: 9532 - DNA, 1533 bp, Sulfolobus solfataricus P2
  CDS (1)..(1533): transl_table=11
atgtcaccctttaataaagttctcgtagccaacagaggagaaattgccataagggttatgaaagccgtaaaagaaatgggaatgaaggcagttgctgtatattctgatgctgataaatatgccccccacgttaaatatgcagatgaagcttattggatagggccacctccagctttagaaagttacttgaatattgaaagaattatcgatgcggcagaaaaggctcatgcagatgctgtacatcccggttatgggttcctttccgaaaacgcgtcttttgtagaagctgttgaaaaagctggaatggttttcataggaccttctgcttctgtaatgaatagaatcaaggacaaattggaaggaaagatgatagctagaaaggctggtgtccccacgtcccctggacctttaacaccaattgaaaatgtagatgaggcgttaaagatagctggagaaataggatatcccataatgttgaaggctgcgggaggtggagcaggagtgggtattataaaggttgataatcctagtgaactagctgaggcttttgaaagaagcaaaagattagcgtactctgcctttggcagggcagaaatttacatagaaaaggctgctataaaaccaaaacacattgaaacgcaattgataggagataagtatggaaattacgtagtcgcctttgaaagagaatgcacaattcaaagaaggaaccaaaagttaatcgaagaagccccctctccatccattaaagaagaggaaagaaaggagattattgaggcgtcaataagatttgggaaagaaattaactactttaccttaggtaccatggagttcgtgttctcaccagttactcgtgaattttacttcttagaaattaataaaagagttcaagtagagcacacagtcactgagttcataactggaatagacttagtcaaattacagataagactagctgctggtgaatatttacctttttctcaagaagacttgaaaataagaggacatgcaatacagtttagaattaacgctgaggacccattaaataacttcacgcctcaatccggatacataacctattataaggaaccaactggtcccggtgtgagagtggatagcggtatagaacttggttcatgggttccaccatattatgatccccttgtttccaagttaattgtttatggacaaagtagagactacgcgattcaagtcggactaagggctctaaacgattataaaataggaggagttaaaactacaattccattatataagttgatcttgcaagatccagacttctgggaaggtaatttcactactgcatatatatctgagaaagcagagtactttacgaccaaattaaaagaagaacaagagatacaaattgcaatagccatttcgatttataataggggattgatgaagaagaaaaaaactgaacagaaagtacccatctcaactagtaatggtaaaagtaattggaaaacttatggtatcatattccaatcctctccaagggtgttgtggtaa

SEQ ID NO: 9533 - protein, 510 aa, Sulfolobus solfataricus P2
MSPFNKVLVANRGEIAIRVMKAVKEMGMKAVAVYSDADKYAPHVKYADEAYWIGPPPALESYLNIERIIDAAEKAHADAVHPGYGFLSENASFVEAVEKAGMVFIGPSASVMNRIKDKLEGKMIARKAGVPTSPGPLTPIENVDEALKIAGEIGYPIMLKAAGGGAGVGIIKVDNPSELAEAFERSKRLAYSAFGRAEIYIEKAAIKPKHIETQLIGDKYGNYVVAFERECTIQRRNQKLIEEAPSPSIKEEERKEIIEASIRFGKEINYFTLGTMEFVFSPVTREFYFLEINKRVQVEHTVTEFITGIDLVKLQIRLAAGEYLPFSQEDLKIRGHAIQFRINAEDPLNNFTPQSGYITYYKEPTGPGVRVDSGIELGSWVPPYYDPLVSKLIVYGQSRDYAIQVGLRALNDYKIGGVKTTIPLYKLILQDPDFWEGNFTTAYISEKAEYFTTKLKEEQEIQIAIAISIYNRGLMKKKKTEQKVPISTSNGKSNWKTYGIIFQSSPRVLW

SEQ ID NO: 9534 - DNA, 1344 bp, Clostridium acetobutylicum ATCC 824
  CDS (1)..(1344): transl_table=11
atgataagtaaaattttaattgctaataggggagagatagcagttagaataataagagcctgtagagaaatgggaatagagacagtggctatttattctgaggcagataaagaatcaatgcatgtatatcttgcagatgaagcagtatgtgttggaccagcgaaaactcaagatagctatcttaacataggaaatataataagtgctacagttcttacaaaagcacaagcgatacatccaggctttggttttctatctgagaatggtaagttcgcaaaaatgtgcagtgaatgtaatatagcatttataggaccagatgctgaaaccattgaaaacatgggaaataaagcaaaagcaagagaaataatgataaaggcaggagtaccggtagttccaggatgtgaaggaactattgatagtgaagatcaggctttaaaagaggcaactagaataggatatcctgttatgcttaaagcttcagcaggtggaggcggaagaggtataagaattgtaagagaagaaaaagacctcataagttcctttagaaatgctaaaagcgaagctaaagcagcctttggtgatgattcaatgtatatggaaaagtttatagaagaacctagacatgttgagtttcaaatattaggagattcttttggaaatgtagtttatcttggagaaagagactgctcaattcaaagaagaaaccaaaaagttttagaggaagcaccatcaccagttatgacagaagaacttaggcgtgagatgggagaagcggctgtaagagcagctaaagccgtaaattataaaaatgctggaaccatagaatttctattagataagcatggaaattattacttcatggaaatgaatacaagaattcaggttgaacatggtataactgaaatggttacaggcgttgacctagttaaagagcagataaaaatagcatcaggaaataaattatctttcaatcaaagtgatataaaaattaagggtcatgcaatagagtgtagaataaatgctgaaaatcctgaaaagaactttatgccatcacctggagaaattaagtacttccatgttcctggtggacctggagtaagattagatagcgcagcatatactggatacaatatacctccaaattatgattccatgattggaaagcttatagcatatggcaaggatagagctgaagctataaatataatggagagagctcttggagagttcataattgatggtattgatacaaatgtagacttccagtatgaagtaataaacaatgagaagtttattaagggaaaatataatacaagttttatagaaaaagaattaaaacattga

SEQ ID NO: 9535 - protein, 447 aa, Clostridium acetobutylicum ATCC 824
MISKILIANRGEIAVRIIRACREMGIETVAIYSEADKESMHVYLADEAVCVGPAKTQDSYLNIGNIISATVLTKAQAIHPGFGFLSENGKFAKMCSECNIAFIGPDAETIENMGNKAKAREIMIKAGVPVVPGCEGTIDSEDQALKEATRIGYPVMLKASAGGGGRGIRIVREEKDLISSFRNAKSEAKAAFGDDSMYMEKFIEEPRHVEFQILGDSFGNVVYLGERDCSIQRRNQKVLEEAPSPVMTEELRREMGEAAVRAAKAVNYKNAGTIEFLLDKHGNYYFMEMNTRIQVEHGITEMVTGVDLVKEQIKIASGNKLSFNQSDIKIKGHAIECRINAENPEKNFMPSPGEIKYFHVPGGPGVRLDSAAYTGYNIPPNYDSMIGKLIAYGKDRAEAINIMERALGEFIIDGIDTNVDFQYEVINNEKFIKGKYNTSFIEKELKH

SEQ ID NO: 9536 - DNA, 1347 bp, Agrobacterium tumefaciens str. C58
  CDS (1)..(1347): transl_table=11
atggtttcgaagatccttatagccaaccgcggcgaaatcgcgctgcgcgtcctgcgcgccgcgaaagagcttggcattccgaccgtcgccgtgcattccacggcagatgcggatgcgatgcatgtgcgccttgccgacgaaagtgtgtgcatcggcccgccgccctcgcgtgacagctacctcaacatccaccagatcgttgcggcctgcgaaatcacaggtgcggatgccgttcaccccggttacggcttcctgtcggaaaacgccaagttcgccgatattctcgacgcccacggcatcaccttcatcgggccgaccgccgaacatatccgcatcatgggcgacaagatcaccgccaagcagacggcacaggaactcggcattcccgtggttccgggttcggatggcgaagtgaagcctgaaaatgcgctggaaatcgcccggacgatcggcttcccggtcctcatcaaggcgacggcaggcggtggcggccgcggcatgaaggtggcgaagaccgaagccgatctggaagatgcagttgcgactgcccgttccgaagcggcagcagccttcggcaacgatgccgtctatatggaaaaatacctcggcaagccgcgccatatcgaagtgcaggttttcggcgatggcgaaggcaatgccgttcaccttggcgagcgcgattgctcgcttcagcgccgccaccagaaggtgctggaagaagccaattcaccggctctcacagtcgaacagcgcatgaaaatcggcgaaatttgcgccgacgcgatgcgcaagctgaaatatcgcggcgccggcaccatcgagttcctgtatgaaaacggcgagttctatttcatcgaaatgaacacccgtctgcaggtggagcatccagtgacggaagcgatcactggcatggacctcgtgcaggaacagatcagggtcgcttctggtcagggcctgtcggtcacacaggctgatatcgaatttcatggccatgccatcgaatgccgtatcaatgccgaagacccgcgcaccttcgttccgtcgccgggcacactgacctatttccacacgccgggcggccttggcgttcgcgtcgattcgggtgcctatcagggctacaagatcccgccctattacgacagcatgatcggcaagctgatcgttcacggtcgcgaccgtgacgagtgcatccgtcgcctgcgtcgggcgctggacgaattcgtcgtcgatggcatcaagaccacgctgccgcttttccaggatctccttcagaacgaggatattctgaacggcgattacgacattcactggctggagaagtatctggccggtgacgcgtctcactaa

SEQ ID NO: 9537 - protein, 448 aa, Agrobacterium tumefaciens str. C58
MVSKILIANRGEIALRVLRAAKELGIPTVAVHSTADADAMHVRLADESVCIGPPPSRDSYLNIHQIVAACEITGADAVHPGYGFLSENAKFADILDAHGITFIGPTAEHIRIMGDKITAKQTAQELGIPVVPGSDGEVKPENALEIARTIGFPVLIKATAGGGGRGMKVAKTEADLEDAVATARSEAAAAFGNDAVYMEKYLGKPRHIEVQVFGDGEGNAVHLGERDCSLQRRHQKVLEEANSPALTVEQRMKIGEICADAMRKLKYRGAGTIEFLYENGEFYFIEMNTRLQVEHPVTEAITGMDLVQEQIRVASGQGLSVTQADIEFHGHAIECRINAEDPRTFVPSPGTLTYFHTPGGLGVRVDSGAYQGYKIPPYYDSMIGKLIVHGRDRDECIRRLRRALDEFVVDGIKTTLPLFQDLLQNEDILNGDYDIHWLEKYLAGDASH

SEQ ID NO: 9538 - DNA, 3525 bp, Agrobacterium tumefaciens str. C58
  CDS (1)..(3525): transl_table=11
ttggttttgctgctttattccgcagtgcagcagaattctgttttggcgtgtggggagaccgtcttgaagatatcgaaaatacttgttgccaaccgatccgaaattgcgatccgcgttttccgggcagcgaacgagcttgggatcaaaaccgttgcgatttgggcggaagaggacaagctgtctttgcaccgcttcaaggcggatgaatcctatcaggtcggcaggggtccgcatctcgccaaggatatgggaccgatcgagagttatctttcgatcgaggaggttatccgcgtggccaagctctccggagcggatgcgatccatcccggttatggtcttctgtccgaaagccctgagttcgtggaggcctgcaacaaggccggcatcaccttcatcgggccgacaccggacacgatgcgccagctcggcaacaaggtcgccgcccgcaatctggcgatttcggttgatgtccccgttgttcccgccaccaatcctctgcctgacgatatcgcggaagtggagcgtatggccgaggaaatcggttatcccgtcatgctcaaggcctcctggggcggcggtggccgcggcatgcgcgccattcgcaaaaaggaagatctcgcccgtgaggtgacggaagccaagcgcgaggcgaaggccgccttcggcaaggacgaggtttatctggaaaagctcgtcgagcgcgcccgccatgtcgagagccagattctcggcgatacgcatggcaatgtcgtgcatctgttcgagcgggattgttcgatccagagacgcaatcaaaaggtcgtcgagcgcgcgccagcaccgtatctgtccgaagcgcagcgccaggaactggccgcctattccctgaagatcgcagccgcgaccaactacatcggcgccggcactgtcgaatatctgatggatgccgataccggcaaattctacttcatcgaggtcaatccgcgtatccaggtggagcataccgttaccgaagtcgtgaccggcatcgatatcgtcaaggcgcagatccatattctcgaaggagcggccatcggcacggcggaatccggcgtgcccaagcaggaagatatccgcctcaacggccatgcgctgcagtgccgcatcacgacggaagacccggaacacaatttcattccggactatggccgtattaccgcctatcgctcggcttccggtttcggcatccgtctggatgggggcacgtcctataccggcgccgtcatcacccgttattacgatccgctgctcgtcaaggtcacggcctgggcgccggagccggatgaagcgatcagccgcatggatcgcgcgttgcgcgaatttcgtatccgcggcgttgcgaccaacctgaccttcctcgaagccatcatcggtcacgacagtttccgcaacaacacctatacgacgcgcttcatcgattcgacgccggagttgttcgcgcaggtcaagcgtcaggaccgcgccaccaagcttctgacctatctggccgatgtgaccgtcaatggtcacccagaaaccaagggtcgtgcgaagcctgcggacaaggcggcaaagcccatcgtgccctatatcgatgcgccgacgcctgacggcaccaagcaattgctggacaagcttggccctaagggctttgcggactggatgcgcaacgaaaagcgcgtgctggtcacggatacgaccatgcgcgacggacaccagtcgctgctggccacccgcgtccgtacccatgatatcgcccgcgttgccagcgtttattccaaggcgcttccgcagcttctgtcgctggaatgctggggcggtgcgaccttcgacgtctcaatgcgcttcctgaccgaagacccgtgggagcgcctgtcactcattcgcgaaggtgcgccgaacctgctgttgcagatgcttctgcgtggtgccaacggcgtcggttacaagaactatcccgataatgtcgtgaagtatttcgtccgtcaggcggcaaggggcggcgtcgatctttttcgcgtcttcgactgcctgaactgggtggagaatatgcgggtgtcgatggatgcgattgccgaggagaacaagctctgcgaggcaaccatctgctacaccggcgatctcttgaattcggcacgtccgaaatatgatctcaaatattataccaacctcgcggtcgagctggaaaaggccggcgcccatatcatcgccgtcaaggatatggcgggcctgctgaaaccggccgccgccaaggttctgttcaaggcgttgcgcgaggcgaccggtctgccgatccacttccacacccatgatacgtcgggcatttccgccgcgaccgttcttgcggccgtggatgccggcgtcgacgccgtcgatgccgcgatggatgccttctccggcaatacgtcgcagccctgcctcggctcgatcgtggaggcgctctccggatcggaacgcgatacgggtctcgataccgaatggattcgccgcatttccttctattgggaagccgtgcgcaatcaatatgcggcgttcgagagtgacctcaaagggcctgcctcggaagtctatctgcatgaaatgccgggtggccagttcaccaacctcaaggaacaggcacgttcgctgggtctcgaaagccgctggcacgaggtggcgcaggcctatgccgatgccaacaggatgttcggcgatatcgtcaaggtgacgccgtcctccaaggtagtcggcgacatggcgctgatgatggtgagccaggacctgacggtggccgatgtcgaaaaccctgaccgtgaagtgtccttcccggactcggtggtatcgatgctgaagggcgatctcggtcaatcgccgggcggctggccggaagcgctgcagaagaaggcgctgaagggtgaaaagccttacacggttcgtccgggttcgcttctggaagatgccgatctcgatgccgaacggaaggtgatcgagaccaagctggagcgcaaggtcgatgacttcgagtttgcctcctatctgatgtatccgaaggtgttcaccgatttcgcgctgaccgccgagacatacggcccggtctccgtgctgcccacccatgcctatttctatggcatggaggatggcgaagagctgtttgcggatatcgagcgcggcaagacgcttgtcatcgtcaatcaggcttcgtccggcattgacgataagggcatggtgacggtgttcttcgagatcaacggccagccgcgccgcatcaaggtgccggatcgcgcccatggcgcttccggctctgcggtgcgccgcaaggcagaacccggcaatgcgtcccatatcggcgcgccgatgcctggtgtcatcagccgcgtcttcatcaaccagggtcaggaggtcaaggccggcgacgtgctgctctcgatcgaggccatgaagatggaaacggcgctgcatgccgaacgcgacggcaagatcgctgaagttctggtgaagcccggtgaccagatcgacgccaaggatttgttgatctcttacgccgaataa

SEQ ID NO: 9539 - protein, 1174 aa, Agrobacterium tumefaciens str. C58
MVLLLYSAVQQNSVLACGETVLKISKILVANRSEIAIRVFRAANELGIKTVAIWAEEDKLSLHRFKADESYQVGRGPHLAKDMGPIESYLSIEEVIRVAKLSGADAIHPGYGLLSESPEFVEACNKAGITFIGPTPDTMRQLGNKVAARNLAISVDVPVVPATNPLPDDIAEVERMAEEIGYPVMLKASWGGGGRGMRAIRKKEDLAREVTEAKREAKAAFGKDEVYLEKLVERARHVESQILGDTHGNVVHLFERDCSIQRRNQKVVERAPAPYLSEAQRQELAAYSLKIAAATNYIGAGTVEYLMDADTGKFYFIEVNPRIQVEHTVTEVVTGIDIVKAQIHILEGAAIGTAESGVPKQEDIRLNGHALQCRITTEDPEHNFIPDYGRITAYRSASGFGIRLDGGTSYTGAVITRYYDPLLVKVTAWAPEPDEAISRMDRALREFRIRGVATNLTFLEAIIGHDSFRNNTYTTRFIDSTPELFAQVKRQDRATKLLTYLADVTVNGHPETKGRAKPADKAAKPIVPYIDAPTPDGTKQLLDKLGPKGFADWMRNEKRVLVTDTTMRDGHQSLLATRVRTHDIARVASVYSKALPQLLSLECWGGATFDVSMRFLTEDPWERLSLIREGAPNLLLQMLLRGANGVGYKNYPDNVVKYFVRQAARGGVDLFRVFDCLNWVENMRVSMDAIAEENKLCEATICYTGDLLNSARPKYDLKYYTNLAVELEKAGAHIIAVKDMAGLLKPAAAKVLFKALREATGLPIHFHTHDTSGISAATVLAAVDAGVDAVDAAMDAFSGNTSQPCLGSIVEALSGSERDTGLDTEWIRRISFYWEAVRNQYAAFESDLKGPASEVYLHEMPGGQFTNLKEQARSLGLESRWHEVAQAYADANRMFGDIVKVTPSSKVVGDMALMMVSQDLTVADVENPDREVSFPDSVVSMLKGDLGQSPGGWPEALQKKALKGEKPYTVRPGSLLEDADLDAERKVIETKLERKVDDFEFASYLMYPKVFTDFALTAETYGPVSVLPTHAYFYGMEDGEELFADIERGKTLVIVNQASSGIDDKGMVTVFFEINGQPRRIKVPDRAHGASGSAVRRKAEPGNASHIGAPMPGVISRVFINQGQEVKAGDVLLSIEAMKMETALHAERDGKIAEVLVKPGDQIDAKDLLISYAE

SEQ ID NO: 9540 - DNA, 1395 bp, Agrobacterium tumefaciens str. C58
  CDS (1)..(1395): transl_table=11
gtgatggtggaggtcttcaaagatacgacacctgccgaaaggcgcttcgatacggttctcattgccaacaggggtgaaatagcagcgagaatccagcgggcctgccatgaactcgggctaaaaaccgttgcaatatgctccgaggcggacaggggcgcatcctatgtccagactgccgatagttttctttgtatcggcccttccgctgcgggcaaaagttatctcaacaaggatgccatcctgctcgcggcgcggttgacatcttcaggagcgatccatcccggttacgggtttctatcagaaaataccgccttttcggacgccgtcgaaaaagccggccttgttttcatcggaccgggcgcatcgtcgattgcgacgatgggcgacaagatcgctgctaaacgggcgatgattgctgctgctgtgccgtgtgttcccggccctgatacggcattgccggatgatccggctgccgtcgaaagcattgcgcaggaaatcggttatcctgtcatcgtcaaggctgccggtggcggcggcgggcggggtatgcgggttgtgccggatgccggatctctgcatgaggcgattcccacgacacgcgaggaagcccgtcaggctttcggctcgccggcgctctacatggagaaattccttcagcatccccggcacattgaaatacaggtgctgtgcgacacccacggacatgccgtttggctgggacatcgcgactgctccatgcagcgtcgccaccagaaggtggtggaagaagcgcccgcgcccggcatttcgcctgacgtgatccggtccgtcggacaagcctgcgtcgaggcctgccagcagatcggttatcgtggagtcggaacgtttgaattcctctacgagaacggggccttctatttcatcgagatgaacacgcgtctgcaggtcgagcatcccgtcaccgaaatgaccagcgggatcgatatcgtccaggcgcagatcagggcggcacagggggaggaactggttctacgccagcaggatgtaaaatgcgaaggccacgccttcgagtgccgcatcaacgcggaagatccgcagacgtttctgccttccgccggggtcgtgacgggtcttgcctggccgcaggggcaaggtattcgtgtcgatacccatattcatgggggttacagggtttctccctattacgattcccttgtcgccaagctcatcgtccatgcgccaacccgcagcgaggcgatggcgaagatgcgcgaggcacttgccgggacatcgattgaaggcatttcgaccaatctgccgttcctgcgcgcgctgtttgaggacgacgctttcgtgtgtggtgaaacggacattcattatctggagaaatggctcaagcaacggagagtggcatga

SEQ ID NO: 9541 - protein, 464 aa, Agrobacterium tumefaciens str. C58
MMVEVFKDTTPAERRFDTVLIANRGEIAARIQRACHELGLKTVAICSEADRGASYVQTADSFLCIGPSAAGKSYLNKDAILLAARLTSSGAIHPGYGFLSENTAFSDAVEKAGLVFIGPGASSIATMGDKIAAKRAMIAAAVPCVPGPDTALPDDPAAVESIAQEIGYPVIVKAAGGGGGRGMRVVPDAGSLHEAIPTTREEARQAFGSPALYMEKFLQHPRHIEIQVLCDTHGHAVWLGHRDCSMQRRHQKVVEEAPAPGISPDVIRSVGQACVEACQQIGYRGVGTFEFLYENGAFYFIEMNTRLQVEHPVTEMTSGIDIVQAQIRAAQGEELVLRQQDVKCEGHAFECRINAEDPQTFLPSAGVVTGLAWPQGQGIRVDTHIHGGYRVSPYYDSLVAKLIVHAPTRSEAMAKMREALAGTSIEGISTNLPFLRALFEDDAFVCGETDIHYLEKWLKQRRVA

SEQ ID NO: 9542 - DNA, 1731 bp, Agrobacterium tumefaciens str. C58
  CDS (1)..(1731): transl_table=11
atgaaaaaagtgctgattgccaatcgcggcgagatcgcggtgcgcatcatccgggcctgtcgcgattacggcctgcaatcggtcgccgtttatgccgaccccgatcaggacgcgcttttcgtccggctggcggatgaagcctatgcgctggagggcgtgcgtcccgccgagacctatctcgatatcagcaagctgatcgcgattgccaaacgcgccggtgctgatgccgtgcatcccggttatggtttcctgtccgaacgcgccgaatttgcccaggctgtcatcgatgccggactgatctggatcggtcccgaccctgatgtcatcgaggcattgggcgacaaggtcatggcgcggcgcatcgccaccggtgttggcgcaccgctggttgccggcagcgatggccccgtttcttccgccgccgaagtcaccgcctttgccgaacagcacggcctgcccgtcgccatcaaggcggcccatggcggcggtggacgcggcctgaaagtcgcgtggaagatggaagagatcgcagagctctatgaatccgccgtgcgcgaggcgaccgtcgccttcggccgcggcgagtgttttctggaacgtttcctcgatcggccgcgtcatatcgaggcgcaggttattgctgacaagcacggcaatgtgctggtgctcggcacccgcgattgctcgctgcaacgccggaaccagaagctgatcgaagaagcacccgcccccttcctgtcggatgaacaacggcagaagatccatgatgccgccaaggcgatctgcgctgcagccggttattccggcgccggcaccgtcgaattcctgctcggtgtcgatggcacgatttccttccttgaggtcaatacccgcctgcaggtggaacatcccgttaccgaggaaaccaccggcattgatctcgtcatcgagcagtttcgtattgccgaaggccataagcttcgtgtgcttgaaacgccggaaccgcgtggccattcgatggagttccgtatcaatgccgaagatccgggccgcggctttctgccgacaccaggcttgatctcggttttcgatgcgccttccggtccgggcattcgcatggatagcggcgtcatcagcggctcaagcattcccggcgtgttcgattcgctgatggcaaagctcatcgtcaccggggttgaccgcgatcaggttctgcgccgtgcccgccgtgcgctgagggaattccgcatcgagggcatcgctaccgttctgccgttccaccgcgccgcgatcgagacggaggatttcatcggtactgacgggttcaaggttcacacccgctggatcgaaaccgatttcgccgccatgcccgatgcgatggagcgaccggcaccggccgacgacccttctatcacccgcacctatctcgagatagacggcaagcgtgtttcggttggcctgcccagcattctgctctccagcctcggcactgtcagcggtggcaatgcatccgctcccagtgctgcggtcgagaaaaaggaaggcgaaatgaccgcccccgtttccggcaccctgcaatctttcaaggtgaaggacggtgaaacggtttccgaaggtgatcttctggccgtcatggaagccatgaagatggagacgcagattgtcgccaccagggccggaaaggtccgcttgatcgtcaaggaaggcgattatctgcaggcgggagcaacccttatcgatatagccggctaa

SEQ ID NO: 9543 - protein, 576 aa, Agrobacterium tumefaciens str. C58
MKKVLIANRGEIAVRIIRACRDYGLQSVAVYADPDQDALFVRLADEAYALEGVRPAETYLDISKLIAIAKRAGADAVHPGYGFLSERAEFAQAVIDAGLIWIGPDPDVIEALGDKVMARRIATGVGAPLVAGSDGPVSSAAEVTAFAEQHGLPVAIKAAHGGGGRGLKVAWKMEEIAELYESAVREATVAFGRGECFLERFLDRPRHIEAQVIADKHGNVLVLGTRDCSLQRRNQKLIEEAPAPFLSDEQRQKIHDAAKAICAAAGYSGAGTVEFLLGVDGTISFLEVNTRLQVEHPVTEETTGIDLVIEQFRIAEGHKLRVLETPEPRGHSMEFRINAEDPGRGFLPTPGLISVFDAPSGPGIRMDSGVISGSSIPGVFDSLMAKLIVTGVDRDQVLRRARRALREFRIEGIATVLPFHRAAIETEDFIGTDGFKVHTRWIETDFAAMPDAMERPAPADDPSITRTYLEIDGKRVSVGLPSILLSSLGTVSGGNASAPSAAVEKKEGEMTAPVSGTLQSFKVKDGETVSEGDLLAVMEAMKMETQIVATRAGKVRLIVKEGDYLQAGATLIDIAG

SEQ ID NO: 9544 - DNA, 2004 bp, Agrobacterium tumefaciens str. C58
  CDS (1)..(2004): transl_table=11
atgatcaagaaaatcctcatcgccaatcgcggcgagatcgcctgccgggtgatcaagacggcgaagaagatgggcatcgccaccgttgcggtctattcggatgcggatgccaatgcgctgcatgtgaaaatggcggatgaagctgttcatatcggtccagcgccctcgtcgcagtcctatatagtcatcgataaaatccttgaggcgattcagaagaccggggcggatgcggtccatcccggttatggtttcctgtctgaaaatgccgccttcgctcaggcgctagagaaggcaggcgttgtattcatcggcccgcccgttggtgcgatcgaggcgatgggtgacaagatcacctcgaagaaactggccgcaaaagccggcgtttccaccgtgcccggccatatggggctgatcgaggatgcggatgaggcggtgaagatcgcgtcgcagatcggttatcccgtcatgatcaaggcctctgccggcggcggcggtaagggcatgcgcatcgccttcaacgaagccgaggcgcgggaaggcttccagtcctcgaagaacgaggcgaaatcctcctttggcgatgaccgtatcttcatcgaaaaattcgtcacccagccgcgccatattgaaattcaggtgttgggcgacaagcacggcaccattctttatctcggtgagcgcgaatgctcgatccagcgccgcaaccagaaggtcatagaagaagcgccgtcgccctttctggatgaggcgacgcggcacgccatgggcgagcaggccgtggcgctggcgagagcggttggttaccattcggctggcacggtggaattcatcgttgatggcgagcgcaatttctatttcctcgaaatgaacacccgcctgcaggtggaacatccggtgacggagcttgtcaccggcattgatctggtcgagcagatgatccgtgtggcatcgggcgaaaaactctctctcgcgcagggggatgtgaagctgaacggctgggcgatcgaaagccggctttatgccgaagacccctatcgcaacttcctgccctccattggccggctgacgcgttatcgcccaccgggagagggtgcacaggacagtggcaccgtcatccgcaatgataccggcgttttcgaaggcggcgaaatctcgatgtattacgatccgatgatcgccaagctgtgcagctggggcaaggatcgggagaccgccatcgatgccatgggagaggcgctggatcgtttcgaggttgagggtattggccacaatttgccgttcctgtccgccgtcatgcaacatgaacgttttcgctccggccggctgacgacaggctttatcgcggaagaatttccggaaggcttttccgggatcgagccggacgagaccgctgcacgcaagctttccgcaattgccgccatagtcaatcaacgcttgcagagccgcgcggttgaaatttccggcaccatcggcaatcaccgtcgcatcgtcggccatgactgggtggtttcgtttggcgcattccgccacgggatcagcgttgaaaccgttgcggatggcacggcggtccgttttgaagacggaatggccttgaccattgataccggctggcgtcccggccagagccttggcctcttcacggtggcgggcgaggtcatcgccgccaaggtcgatcttgccggcgcagcggttcgcctgcgctggcgcggcatggatattcttgcccgggtgcgcagcccgcgcgtggcggaactggcactgctgatgccggaaaaactgccgccggatacctcgaaactgctgctctgcccgatgccgggcgtcattaccggcatttcggtgggtgagggtgaggaggtggaggccggccaggcgctggcgacggtggaggccatgaagatggaaaacatcctgcgcgcggaaaaacgtggtcgtgttgtaagagtggcggcaaaaccgggcgacagccttgcagtggatgaggtcatcctcgaattcgagtga

SEQ ID NO: 9545 - protein, 667 aa, Agrobacterium tumefaciens str. C58
MIKKILIANRGEIACRVIKTAKKMGIATVAVYSDADANALHVKMADEAVHIGPAPSSQSYIVIDKILEAIQKTGADAVHPGYGFLSENAAFAQALEKAGVVFIGPPVGAIEAMGDKITSKKLAAKAGVSTVPGHMGLIEDADEAVKIASQIGYPVMIKASAGGGGKGMRIAFNEAEAREGFQSSKNEAKSSFGDDRIFIEKFVTQPRHIEIQVLGDKHGTILYLGERECSIQRRNQKVIEEAPSPFLDEATRHAMGEQAVALARAVGYHSAGTVEFIVDGERNFYFLEMNTRLQVEHPVTELVTGIDLVEQMIRVASGEKLSLAQGDVKLNGWAIESRLYAEDPYRNFLPSIGRLTRYRPPGEGAQDSGTVIRNDTGVFEGGEISMYYDPMIAKLCSWGKDRETAIDAMGEALDRFEVEGIGHNLPFLSAVMQHERFRSGRLTTGFIAEEFPEGFSGIEPDETAARKLSAIAAIVNQRLQSRAVEISGTIGNHRRIVGHDWVVSFGAFRHGISVETVADGTAVRFEDGMALTIDTGWRPGQSLGLFTVAGEVIAAKVDLAGAAVRLRWRGMDILARVRSPRVAELALLMPEKLPPDTSKLLLCPMPGVITGISVGEGEEVEAGQALATVEAMKMENILRAEKRGRVVRVAAKPGDSLAVDEVILEFE

SEQ ID NO: 9546 - DNA, 2130 bp, Agrobacterium tumefaciens str. C58
  CDS (1)..(2130): transl_table=11
atgccagcgcgagactctgggacgatggcatcatcgacccgaaggatacccgcttggtgctgggccttggtctttccgccgcgctcaatgcgccgattgaacccacccgttttggcatattcaggatgtgaggcgacgatgttctcgaaaatactgatcgccaaccgtggcgaaatcgcctgccgcatcatccgcaccgcagccagtatgggcatccgcaccgtcgcggtctattcggatgccgaccgcgacgccatgcatgtggcgctggccgatgaggccatcgccatcggccccgcacctgcgcgcgcctcctatctcgacggcgaaaagatcattgccgccgcaaaggcaagcggcgcagaggccatccatccgggctatggttttctttcagaaaatgccggtttcgccgaagcctgcgcttctgcgggcctcgttttcatcggccctccaccagaagcaatccgcgccatgggcggaaaaagcgaagctaaggcgctgatggcaacggcaggcgttcccatcgttcccggttatcacggcgatgaacaggccgagaaacgactggcaagcgaggcggacaagatcggttacccggtgctgctgaaagcctcggcaggcggcggcggcaagggcatgcgcgtcgtccggcagaagcacgactttgctgcggagcttgccggcgccaaacgcgaagcactggccgccttcggcaatgaccgcatgctgatcgaaaaatacctggagcggccgcgccatgtggaagtgcaggttttcgccgatggccacggcaattgtgtttcgctttttgaacgcgactgctcgatccagcgccggcaccagaaggtgatagaggaagcccccgcccccggcctgcccgatgacttgcggcaacgcatgtatgacgcggcaaccgccgccgcccgtgccatcgattatcgcggcgcgggaacgatagaattcctccttgatccatccggcttctatttcatggaaatgaacacgcgccttcaggtcgagcatccggtgacggaatatattaccggtctcgatctggtcgaatggcagctgcgcgttgcgaatggagaagccctgcctaaagactgggccgatctccgcatcaacggccatgccatcgaggcacgcatttatgccgaagacccggcgcatgatttcctcccgtcgattggcacgatcagccacctcgtctttcccgatgaaggtcctcacctccggatcgacagcggcatccgcgccggcgacgccatcaccgtgcattacgatccgatgatcgccaagctgatcgtctgggatcatgaccgacccgccgccgtgcggcgtctaaaggtggcgcttgaaaagctggcaatttgcggcgtcaccagcaatgccacctttctggcgcggcttgcggggctcgaaactttcgcagcggccgatctggataccggcttcatcgcccgcaacgaggcagacctttttgctccgcaggccgtgggcgacaatgagatcgcactggcggcactcggcttccttctcagccgtaaaaacgcgagcaccaacccgcaagcgcaggccgaccctcatagtccctggaataccgccaacgccttccgactgaatgcgccggcgcgtgagacgctgcatttcaccatgcagaaccggccgatcgaccttggcgtagcccatgaggcagacagcttttcgctggagatgggcggacacacgatccgcgcttatggcgacctctctgacaacggccgctttcgcgcgaccatcaacgaccggacatggaaaggctatttctttgcagagagtgatagctacgcactttttctgcacggcgaacactatcgcatcagccagccagacccggtcgatatcgcagattcttctggccatacgggcggtctggaggcgcccatgccgggcgttatccgcgccgtgctcagccagagtggcgcggcggtcgagaccggtgatgcacttgtcgtgatggaagcgatgaagatggagcataccatccgcgcacccgcgaaaggcatcgtcaccgccgtcaactgcgccgaaggcgacatggtcgtcgccggtgcggtgctggtggatttcgagccggagggcatctga

SEQ ID NO: 9547 - protein, 709 aa, Agrobacterium tumefaciens str. C58
MPARDSGTMASSTRRIPAWCWALVFPPRSMRRLNPPVLAYSGCEATMFSKILIANRGEIACRIIRTAASMGIRTVAVYSDADRDAMHVALADEAIAIGPAPARASYLDGEKIIAAAKASGAEAIHPGYGFLSENAGFAEACASAGLVFIGPPPEAIRAMGGKSEAKALMATAGVPIVPGYHGDEQAEKRLASEADKIGYPVLLKASAGGGGKGMRVVRQKHDFAAELAGAKREALAAFGNDRMLIEKYLERPRHVEVQVFADGHGNCVSLFERDCSIQRRHQKVIEEAPAPGLPDDLRQRMYDAATAAARAIDYRGAGTIEFLLDPSGFYFMEMNTRLQVEHPVTEYITGLDLVEWQLRVANGEALPKDWADLRINGHAIEARIYAEDPAHDFLPSIGTISHLVFPDEGPHLRIDSGIRAGDAITVHYDPMIAKLIVWDHDRPAAVRRLKVALEKLAICGVTSNATFLARLAGLETFAAADLDTGFIARNEADLFAPQAVGDNEIALAALGFLLSRKNASTNPQAQADPHSPWNTANAFRLNAPARETLHFTMQNRPIDLGVAHEADSFSLEMGGHTIRAYGDLSDNGRFRATINDRTWKGYFFAESDSYALFLHGEHYRISQPDPVDIADSSGHTGGLEAPMPGVIRAVLSQSGAAVETGDALVVMEAMKMEHTIRAPAKGIVTAVNCAEGDMVVAGAVLVDFEPEGI

SEQ ID NO: 9548 - DNA, 1998 bp, Rickettsia conorii str. Malish 7
  CDS (1)..(1998): transl_table=11
atgaataaaccattatttgataaaattttaattgctaatcgtagcgagatcgccgttaggataatacgtaccttaaaaaagatggggataaagtcggttgcagtatattctgaagcagatacaaactcaatgtatgtgcagcatgcagatgaggcttattatataggtgattcccctgcaacggaaagttatttatctattaaaaatattatttcggcgattcgtgaaagtggcgcaagtgcagtacatccaggttacggttttttatcagaaaatccaaattttgccaatattcttaaaagagaaggtgttgttttaataggaccgagtgccggaactattaaaaaaatgggcgataaaatcgaagcaaaaaagatagcgatagaagccggagttagcaccgtgccaggttatatgggaactataaacgatgttaaacaagctatagatattgctaaagagattggttttccggtaatagtaaaagcggctgccggcggcggtggacgtggtatgagagtagtgaataatcccgctgaaatggccaatgcttttgagtcggcaaagcttgaagcagccaatagttttagtgacgatagattatttattgagaagttaattcaaactccccgtcatatcgaaattcagctaattgccgatcaatacggcaatagtgtatgtctcggagagcgggaatgttcaatacagcgtcaccatcaaaaagtaatcgaagaagcaccaagttcttttattactgaagatataaggcaagaaatgtatcggcaggtaatatccttatctcaaaaagtgggatattattcggccggtaccgttgagtttatagtagatagcaataaaaatttctattttttagagatgaatactaggttgcaagtcgagcatcctgttactgagctaattaccggtatagatatcgttgaagagatgatacaaatcgcagccggcgagaaattatcatttacacaagatgacgtaaaattaaaaggttgggcatttgaatcacgaatttgtgccgaaaacccaagccgaggtttcttaccttctagcggtagaattatagcttattccgaacctgcaaagagtcctaatatccgtatagatacagggattgggcttggcggcgaagtaagtatgttttatgactcaatgattgcaaaattatgtacttacggtgaaacaagagagcaggcaattgagctaatgcattctgctttgagttcttatataattaacggtattgctcataatatcagtttcttagaagcggtaatgctacatccacgctttgttagcggcgatatttctactgcctttattcaagaagaatatcctgacggtttttccggagctagtctaacttcagaagtaactaccgtatttttagcaacggctatttttatttatatatcggagcaaagacgtgcttctttaatttccggcaatattaacaatcaggctaacaaaataggtacaaggtgggtagtaactatcgatgataagctatttcctgtattaattacacctgttgaaaacggctataatatacgtcacgaaagcgatagaatatatattcgtagtaactggaatttaggtaatgaactttttacggctataattaacggtaaaaagacaaatgtgagaattgagaatatcagaaccggttatttattatcgcatgccggtattagcgtaaaagcctttgtacgctctcctcgtatctcagaacttgaagcgttgatggtctcaaaagtagtggtggaagaaagctccgaactacaagctcctctaagcggtcagattgctgcaataaaggtgaaagaagggcaggaagtgacggcaggacaagaaattatgattttaactgctatgaaaatggaaaacctgattcttgccgaaagagatggaaaaatagctaaaatttttgttaatgaaaaggataatgttataagagggcaggtattattagaatttgcttga

SEQ ID NO: 9549 - protein, 665 aa, Rickettsia conorii str. Malish 7
MNKPLFDKILIANRSEIAVRIIRTLKKMGIKSVAVYSEADTNSMYVQHADEAYYIGDSPATESYLSIKNIISAIRESGASAVHPGYGFLSENPNFANILKREGVVLIGPSAGTIKKMGDKIEAKKIAIEAGVSTVPGYMGTINDVKQAIDIAKEIGFPVIVKAAAGGGGRGMRVVNNPAEMANAFESAKLEAANSFSDDRLFIEKLIQTPRHIEIQLIADQYGNSVCLGERECSIQRHHQKVIEEAPSSFITEDIRQEMYRQVISLSQKVGYYSAGTVEFIVDSNKNFYFLEMNTRLQVEHPVTELITGIDIVEEMIQIAAGEKLSFTQDDVKLKGWAFESRICAENPSRGFLPSSGRIIAYSEPAKSPNIRIDTGIGLGGEVSMFYDSMIAKLCTYGETREQAIELMHSALSSYIINGIAHNISFLEAVMLHPRFVSGDISTAFIQEEYPDGFSGASLTSEVTTVFLATAIFIYISEQRRASLISGNINNQANKIGTRWVVTIDDKLFPVLITPVENGYNIRHESDRIYIRSNWNLGNELFTAIINGKKTNVRIENIRTGYLLSHAGISVKAFVRSPRISELEALMVSKVVVEESSELQAPLSGQIAAIKVKEGQEVTAGQEIMILTAMKMENLILAERDGKIAKIFVNEKDNVIRGQVLLEFA

SEQ ID NO: 9550 - DNA, 1542 bp, Sulfolobus tokodaii str. 7
  CDS (1)..(1542): transl_table=11
atgccaccttttggaaaagtactcgttgcaaatagaggagaaattgcagtaagagttatgaaagcaatcaaagaaatgggcatgaaagctgttgctgtgtattcagaagctgataaatatgctttgcacgtaaaatatgcagatgaggcttattatatagggccgccaccagcattagaaagctacttaaatattcaagccattattgatgcagcagaaaaagctcatgctgatgcagttcatcctggttacggtttcttatctgaaaacgcagattttgctgaagctgttgtaaaggctggattaacatggattggaccaccagtagatgcgatgagagctattaagagtaagctagacggcaaaagaattgcaaaacaagctggagtacctatttcacctggttctgacggtccagttgatagtttagatgaggctctaaaattagctgaaaaaattggctacccaataatggtaaaagcggcattcggtggtggaggtactggaataactagggttgataatccagaccagttagtcgaagtttgggaaaggaataaaagattagcttatcaagcctttggtaaagctgatttatatattgaaaaggcggcagttaatccaagacatattgagtttcagctaataggagataaatatggcaactatgtagtagcatgggaaagagagtgtacaattcaaagaagaaatcagaaattaattgaagaagcaccctcaccagctctaaaaatggaagaacgagaaagaatgtttgaaccaattatcaagttcggtcaaattattcattattacacattaggaacatttgaaacagttttctcagatactacgagagaattctatttccttgaattaaataaaagacttcaagttgaacacccaattaccgaaatgatatttagaattgacttagtaaaacttcaaataaatatcgctgcaggtgaacctttaccttttacccaagaagaattaaataaaagagtaagagggcacgcaatcgaatatagaatcaatgctgaagatccgttaaatgactttactggtagctcgggatttatcacatactataaggaaccgactggtccgggagtaagagtagatagtggtgttactttaggtagttacgtaccaccattttacgattcgttaatttcaaaactcattgtatatggcgaaaatagagcttatgccatacaggctggaataagagctttaaatgattataaaataggtggagttagaacaacaattgaactatacaaatggatatcacaagaggaagattttcaaaaaggtaaattctcaactgcatatatagctgagaagagagaacaatacctaaaatacttaaaagcaaaagagcagatgaaagccgctttagctgcaacgttatatcaaagaggattgttaaagaaagcaacgactacagttaattctactcaaccacaaaatcaaacaaagaggtcgaattggaaaacatacggtttattgcaacaatcctcttatagggtgatgtggtaa

SEQ ID NO: 9551 - protein, 513 aa, Sulfolobus tokodaii str. 7
MPPFGKVLVANRGEIAVRVMKAIKEMGMKAVAVYSEADKYALHVKYADEAYYIGPPPALESYLNIQAIIDAAEKAHADAVHPGYGFLSENADFAEAVVKAGLTWIGPPVDAMRAIKSKLDGKRIAKQAGVPISPGSDGPVDSLDEALKLAEKIGYPIMVKAAFGGGGTGITRVDNPDQLVEVWERNKRLAYQAFGKADLYIEKAAVNPRHIEFQLIGDKYGNYVVAWERECTIQRRNQKLIEEAPSPALKMEERERMFEPIIKFGQIIHYYTLGTFETVFSDTTREFYFLELNKRLQVEHPITEMIFRIDLVKLQINIAAGEPLPFTQEELNKRVRGHAIEYRINAEDPLNDFTGSSGFITYYKEPTGPGVRVDSGVTLGSYVPPFYDSLISKLIVYGENRAYAIQAGIRALNDYKIGGVRTTIELYKWISQEEDFQKGKFSTAYIAEKREQYLKYLKAKEQMKAALAATLYQRGLLKKATTTVNSTQPQNQTKRSNWKTYGLLQQSSYRVMW

SEQ ID NO: 9552 - DNA, 1350 bp, Sinorhizobium meliloti 1021
  CDS (1)..(1350): transl_table=11
gtggcgatgatctcgaaaatcctcattgccaatcgcggcgaaattgctctgcgcgtcctgcgcgcctgcaaggagctcggcatcgcgaccgtagccgtgcactcaacggcggacagcgacgccatgcatgtccggctcgccgacgagagcgtctgcatcggcccgccgccttcgcgcgagagctatctgaacatccatcagatcgttgccgcctgtgagatcaccggtgcggatgcggtgcatccgggttacggcttcctctcggagaacgccaagttcgccgatatcctcgatgcgcacggcatcactttcatcggaccgactgccgagcacatccgcctcatgggcgacaagatcaccgccaagaagacggcggaagaactcggcattccggtcgttccgggctccgatggcgaagtgaggccggagaatgccctggagatcgcccgccagatcggattccccgtgctgatcaaggcgacggcgggtggcggtggccgcggcatgaaggtcgcccgcaccgaggaggaactcgaaaatgcggttgcgacggcacgttccgaagccgcggccgcattcggcaacgacgcggtctacatggagaagtttctcggcaagccgcgccatatcgaaatacaggtcgtcggggacggcgaaggcaatgcgatccatctcggtgaacgcgactgctcgctgcagcgccgccatcagaaggtatgggaagaagccaactccccggccctgaacgtcgaacagcgcatgaagatcggtcaggtctgcgccgacgcgatgaagaagttgaagtatcgcggcgccggcacgatcgaattcctctacgagaacggcgagttctacttcatcgagatgaacacgcgcctgcaggtcgaacacccgattaccgaagcgatcaccgggatcgacctcgtgcacgagcagattcgcgtggcgtccggagccggcctctccgccaagcaggaggatatcgtcttctccggtcacgccatcgaatgccgcatcaatgccgaagatccgcgcaccttcgtcccttccccgggcacgatcacgcatttccacgccccgggcggcctcggtgtgcgcgtcgacagcggcgcctatcagggttaccgcatacccccctactatgacagcctgatcggtaagctgatcgtccacggccggacgcgcgtcgagtgcatgatgcggctgcgccgcgtgcttgacgaatttgtcatcgacggaatcaagacgactcttcccctttttcaggacctgatcaacaatcaggatatcgcaaacggcgattatgatatccattggctggagcaccatctggccacaacatccgcatag

SEQ ID NO: 9553 - protein, 449 aa, Sinorhizobium meliloti 1021
MAMISKILIANRGEIALRVLRACKELGIATVAVHSTADSDAMHVRLADESVCIGPPPSRESYLNIHQIVAACEITGADAVHPGYGFLSENAKFADILDAHGITFIGPTAEHIRLMGDKITAKKTAEELGIPVVPGSDGEVRPENALEIARQIGFPVLIKATAGGGGRGMKVARTEEELENAVATARSEAAAAFGNDAVYMEKFLGKPRHIEIQVVGDGEGNAIHLGERDCSLQRRHQKVWEEANSPALNVEQRMKIGQVCADAMKKLKYRGAGTIEFLYENGEFYFIEMNTRLQVEHPITEAITGIDLVHEQIRVASGAGLSAKQEDIVFSGHAIECRINAEDPRTFVPSPGTITHFHAPGGLGVRVDSGAYQGYRIPPYYDSLIGKLIVHGRTRVECMMRLRRVLDEFVIDGIKTTLPLFQDLINNQDIANGDYDIHWLEHHLATTSA

SEQ ID NO: 9554 - DNA, 1347 bp, Caulobacter crescentus CB15
  CDS (1)..(1347): transl_table=11
atgttcgacaagatcctcattgcgaaccggggcgagatcgcgctccgggttcaccgcgcctgtaaggaaatgggcatcgccacggtggcggtccattccgaggccgaccgcaactctatgtgggtgcgcctggccgacgaaagcgtctgcatcgggccggctccggccgccaagagctatctgaacatcccatcgatcatcgcggccgccgagatcaccggcgcccaggcgatccacccgggctatggcttcctgtcggaaaatgcccgcttcgccgagatcgtcggcgcgcacggcttcaccttcatcggtcccaagcccgagcacatccggatgatgggcgacaagatcaccgccaagcaggctgtgaaggacgccggcatcccggtcgttcccggctcggacggcggcgtgtcgaccgaggaagaagccttcgaggccgccgagaagatcggcttccccgtcctgatcaaggccgccgccggcggcggtggtcgtggcatgaaggtcgcccagacccgtgaggacctggccgaagcggtctcgaccgcccgcgccgaggcccgcgccgcctttggcgacgacacggtctatatggagcgctacctccagaagccgcgccatatcgaactgcaggtcatcgccgacagccacggcaacgtcgtgcacctgggcgagcgcgactgctcgctgcagcgtcgtcaccagaaggtgctggaagaagccccctcgcccgccctgtcggccgaaggtcgcgccaagatcggcaaggtcgtggtcgatgcggtcaaggccatcggctatctcggcgtcggcaccatcgagttcctgtgggagaacgacgagttcttcttcatcgagatgaacacccgcctgcaggtcgaacacccggtcaccgaagccatcaccggcatcgacctggtgcgcgagcagatccgcatcgccgccggcctgccgctgtcgttcacccaggacgatgtcgtcttcgagggtcacgccatcgagtgccggatcaacgccgagaacgcgcgaaccttcacgccctcgccgggcgtgatcaccgacttccacgcccccggcggcctgggcgttcgcctggattcggcgatctacaccggctacgcgatcccgccgtactacgacagcctgatcggcaaactgatcgtgcatgggcgtgaccgcgccgaatgcatcgcgcgtctgaagcgctgcctgggcgagatggtggtcggcggtgtcgaaaccacgattccgctgttccaggaccttctggtgcagcccgatatcctggccggtgactacaacatccactggctggaacgctggatcaaagcccaagaagcttaa

SEQ ID NO: 9555 - protein, 448 aa, Caulobacter crescentus CB15
MFDKILIANRGEIALRVHRACKEMGIATVAVHSEADRNSMWVRLADESVCIGPAPAAKSYLNIPSIIAAAEITGAQAIHPGYGFLSENARFAEIVGAHGFTFIGPKPEHIRMMGDKITAKQAVKDAGIPVVPGSDGGVSTEEEAFEAAEKIGFPVLIKAAAGGGGRGMKVAQTREDLAEAVSTARAEARAAFGDDTVYMERYLQKPRHIELQVIADSHGNVVHLGERDCSLQRRHQKVLEEAPSPALSAEGRAKIGKVVVDAVKAIGYLGVGTIEFLWENDEFFFIEMNTRLQVEHPVTEAITGIDLVREQIRIAAGLPLSFTQDDVVFEGHAIECRINAENARTFTPSPGVITDFHAPGGLGVRLDSAIYTGYAIPPYYDSLIGKLIVHGRDRAECIARLKRCLGEMVVGGVETTIPLFQDLLVQPDILAGDYNIHWLERWIKAQEA

SEQ ID NO: 9556 - DNA, 1365 bp, Listeria innocua Clip11262
  CDS (1)..(1365): transl_table=11
atgattaaaaaagtactggtagcgaaccgtggagaaatcgctgtccgtatcattcgcgctgcaaaagaacttggagtggagacagtggcgatttattcggaagcagataaagaagcgctacatattcagctagcggatgaagcttattgtgtaggtcccgcggcaacaaaagatagttatttaaatatgtctaatattattagtcttgctgttttaacaaactgtgatgcgattcatcctggttacggattcttggctgaaaatgctgacttcgctgagttgtgcgaagactgtaacatcacttttattgggccaagtgcctctgcaatttcacaaatggggacaaaagatgtggctcgcgaaacaatgcgaaaagctggcgtaccaatcgtacctggttcacaaggaattgtcgctgatgtagaagatggcaaaaaaatcgctaaaaaaatcggttatcctgtaatcatcaaagcaactgctggtggtggaggtaaaggtattcgtgtagcagaaaatgaagaaaaattaatttctggtattcaaactacacagcaagaagccgaagcagctttcggagatcctggcgtttatttagaaaaatacattcaagatttccgccacgtagaaattcaagtgcttgccgataatcatggtaatgttattcatttaggagaacgtgattgtagtattcaacgtcgcttacaaaagctaattgaagaatcaccttcaccagctattgatgaaaagacacgccaaaaaatgggtaaagctgctgtcaaagctgcaaaagccgtgaattattcgggtgcaggaacgatcgaatttatttttgatcatcacgaaaataatttttactttatggaaatgaatactcgtatccaagtagaacatcctgtaacagagcttgttactggtattgatttagtaaaacaacaatttttagtggcttcaggtgaagaactgaaaatcaaacaagccgatgttaaattaaccggttgggcgatggaatgtcggattaatgctgaaaatcctgagaaaaactttatgccagcaccaggagaaattaaattttatcttccaccaggtggcttaggcgttcgaattgactcagcagcatatccaaactacaaaatcccgccattttatgattcaatgattgcaaaagtaatctgttatgcagaaacacgtgaagaagttgttcaaaaaatgaaacgggcactttcggagtttgctattgatggcattccttccacaataccattccatttacgtgtgttagataacgatgtattcctgtcaggagactttaatacaaaattcttggagcaaaatgatgtaatgaatctttctaaggagggctaa

SEQ ID NO: 9557 - protein, 454 aa, Listeria innocua Clip11262
MIKKVLVANRGEIAVRIIRAAKELGVETVAIYSEADKEALHIQLADEAYCVGPAATKDSYLNMSNIISLAVLTNCDAIHPGYGFLAENADFAELCEDCNITFIGPSASAISQMGTKDVARETMRKAGVPIVPGSQGIVADVEDGKKIAKKIGYPVIIKATAGGGGKGIRVAENEEKLISGIQTTQQEAEAAFGDPGVYLEKYIQDFRHVEIQVLADNHGNVIHLGERDCSIQRRLQKLIEESPSPAIDEKTRQKMGKAAVKAAKAVNYSGAGTIEFIFDHHENNFYFMEMNTRIQVEHPVTELVTGIDLVKQQFLVASGEELKIKQADVKLTGWAMECRINAENPEKNFMPAPGEIKFYLPPGGLGVRIDSAAYPNYKIPPFYDSMIAKVICYAETREEVVQKMKRALSEFAIDGIPSTIPFHLRVLDNDVFLSGDFNTKFLEQNDVMNLSKEG

SEQ ID NO: 9558 - DNA, 1371 bp, Ralstonia solanacearum GMI1000
  CDS (1)..(1371): transl_table=11
atgttcgacaagatcctgatcgcgaatcgcggcgagatcgcgcttcgcatccagcgagcctgccgcgaactcggcatcaagaccgtggtggtctattccgaggcggacaaggaagccaagtacgtcaagctggccgatgaggccgtctgtatcggcccggcgccgtcgccgctgtcgtacctgaacatgccggccatcatctcggccgccgaagtgaccgacgcccaggccatccaccccggctacggcttcctgtcggagaacgccgatttcgccgagcgcgtggagcagtccggcttcaccttcatcggcccgacgcccgactgcatccgcctgatgggcgacaaggtctcggccaagcaggccatgatcaagtccggcgtgccgtgcgtgccgggctcggagggcgcgctgcccgacgacccgaaggaaatcctggcgaccgcccgcaaggtcggctacccggtcatcatcaaggccgcgggcggcggcggcggccgcggcatgcgcgtggtccacaccgaggccgcgctgatcaacgccgtcaacatgacgcgtgaagaagccggccgtgccttcggcaacccggaagtctatatggagaagttcctggagaatccgcgccacgtggagatccaggtcctggccgaccagcaccgcaacgccatctggctgggcgagcgcgactgctcgatgcagcgccgccaccagaaggtgatcgaggaagcgccggcaccgcacatcccgcgccgcctgatcgagcgcatcggcgaccgctgcgccgatgcctgcaagaagatcggctaccgcggcgccggcacgttcgagttcctgtacgagaacggcgagttctacttcatcgagatgaacacgcgcgtgcaggtcgagcacccggtcacggaaatgatcaccggcatcgacatcgtgcaggagcagatccgcgtggcagccaatgaaaagttgcgcttccgccagaaggacgtcgtcctgaagggtcacgccatcgagtgccgcatcaacgccgaggatccgtacaagttcacgccgtcccccggccgcatcacgtcgtggcacgtgccgggcggccccggcatccgtgtggattcgcacgcctacaacggctatttcgtgccgcccaactacgactcgatgatcggcaaggtgatctcgtacggcaccacgcgcgagcaggccatcgcccgcatgcgcatcgccctgtcggagatggtggtcgaaggcatccagaccaacgtgcccctgcaccgcgacctgatgctcgacgccaacttcgtcgaaggcggcaccagcatccactacctggagcaccgcctggcgcagcaggaagtggccaagggcggcggcaaggcctga

SEQ ID NO: 9559 - protein, 456 aa, Ralstonia solanacearum GMI1000
MFDKILIANRGEIALRIQRACRELGIKTVVVYSEADKEAKYVKLADEAVCIGPAPSPLSYLNMPAIISAAEVTDAQAIHPGYGFLSENADFAERVEQSGFTFIGPTPDCIRLMGDKVSAKQAMIKSGVPCVPGSEGALPDDPKEILATARKVGYPVIIKAAGGGGGRGMRVVHTEAALINAVNMTREEAGRAFGNPEVYMEKFLENPRHVEIQVLADQHRNAIWLGERDCSMQRRHQKVIEEAPAPHIPRRLIERIGDRCADACKKIGYRGAGTFEFLYENGEFYFIEMNTRVQVEHPVTEMITGIDIVQEQIRVAANEKLRFRQKDVVLKGHAIECRINAEDPYKFTPSPGRITSWHVPGGPGIRVDSHAYNGYFVPPNYDSMIGKVISYGTTREQAIARMRIALSEMVVEGIQTNVPLHRDLMLDANFVEGGTSIHYLEHRLAQQEVAKGGGKA

SEQ ID NO: 9560 - DNA, 1992 bp, Agrobacterium tumefaciens str. C58
  CDS (1)..(1992): transl_table=11
atgttctcgaaaatactgatcgccaaccgtggcgaaatcgcctgccgcatcatccgcaccgcagccagtatgggcatccgcaccgtcgcggtctattcggatgccgaccgcgacgccatgcatgtggcgctggccgatgaggccatcgccatcggccccgcacctgcgcgcgcctcctatctcgacggcgaaaagatcattgccgccgcaaaggcaagcggcgcagaggccatccatccgggctatggttttctttcagaaaatgccggtttcgccgaagcctgcgcttctgcgggcctcgttttcatcggccctccaccagaagcaatccgcgccatgggcggaaaaagcgaagctaaggcgctgatggcaacggcaggcgttcccatcgttcccggttatcacggcgatgaacaggccgagaaacgactggcaagcgaggcggacaagatcggttacccggtgctgctgaaagcctcggcaggcggcggcggcaagggcatgcgcgtcgtccggcagaagcacgactttgctgcggagcttgccggcgccaaacgcgaagcactggccgccttcggcaatgaccgcatgctgatcgaaaaatacctggagcggccgcgccatgtggaagtgcaggttttcgccgatggccacggcaattgtgtttcgctttttgaacgcgactgctcgatccagcgccggcaccagaaggtgatagaggaagcccccgcccccggcctgcccgatgacttgcggcaacgcatgtatgacgcggcaaccgccgccgcccgtgccatcgattatcgcggcgcgggaacgatagaattcctccttgatccatccggcttctatttcatggaaatgaacacgcgccttcaggtcgagcatccggtgacggaatatattaccggtctcgatctggtcgaatggcagctgcgcgttgcgaatggagaagccctgcctaaagactgggccgatctccgcatcaacggccatgccatcgaggcacgcatttatgccgaagacccggcgcatgatttcctcccgtcgattggcacgatcagccacctcgtctttcccgatgaaggtcctcacctccggatcgacagcggcatccgcgccggcgacgccatcaccgtgcattacgatccgatgatcgccaagctgatcgtctgggatcatgaccgacccgccgccgtgcggcgtctaaaggtggcgcttgaaaagctggcaatttgcggcgtcaccagcaatgccacctttctggcgcggcttgcggggctcgaaactttcgcagcggccgatctggataccggcttcatcgcccgcaacgaggcagacctttttgctccgcaggccgtgggcgacaatgagatcgcactggcggcactcggcttccttctcagccgtaaaaacgcgagcaccaacccgcaagcgcaggccgaccctcatagtccctggaataccgccaacgccttccgactgaatgcgccggcgcgtgagacgctgcatttcaccatgcagaaccggccgatcgaccttggcgtagcccatgaggcagacagcttttcgctggagatgggcggacacacgatccgcgcttatggcgacctctctgacaacggccgctttcgcgcgaccatcaacgaccggacatggaaaggctatttctttgcagagagtgatagctacgcactttttctgcacggcgaacactatcgcatcagccagccagacccggtcgatatcgcagattcttctggccatacgggcggtctggaggcgcccatgccgggcgttatccgcgccgtgctcagccagagtggcgcggcggtcgagaccggtgatgcacttgtcgtgatggaagcgatgaagatggagcataccatccgcgcacccgcgaaaggcatcgtcaccgccgtcaactgcgccgaaggcgacatggtcgtcgccggtgcggtgctggtggatttcgagccggagggcatctga

SEQ ID NO: 9561 - protein, 663 aa, Agrobacterium tumefaciens str. C58
MFSKILIANRGEIACRIIRTAASMGIRTVAVYSDADRDAMHVALADEAIAIGPAPARASYLDGEKIIAAAKASGAEAIHPGYGFLSENAGFAEACASAGLVFIGPPPEAIRAMGGKSEAKALMATAGVPIVPGYHGDEQAEKRLASEADKIGYPVLLKASAGGGGKGMRVVRQKHDFAAELAGAKREALAAFGNDRMLIEKYLERPRHVEVQVFADGHGNCVSLFERDCSIQRRHQKVIEEAPAPGLPDDLRQRMYDAATAAARAIDYRGAGTIEFLLDPSGFYFMEMNTRLQVEHPVTEYITGLDLVEWQLRVANGEALPKDWADLRINGHAIEARIYAEDPAHDFLPSIGTISHLVFPDEGPHLRIDSGIRAGDAITVHYDPMIAKLIVWDHDRPAAVRRLKVALEKLAICGVTSNATFLARLAGLETFAAADLDTGFIARNEADLFAPQAVGDNEIALAALGFLLSRKNASTNPQAQADPHSPWNTANAFRLNAPARETLHFTMQNRPIDLGVAHEADSFSLEMGGHTIRAYGDLSDNGRFRATINDRTWKGYFFAESDSYALFLHGEHYRISQPDPVDIADSSGHTGGLEAPMPGVIRAVLSQSGAAVETGDALVVMEAMKMEHTIRAPAKGIVTAVNCAEGDMVVAGAVLVDFEPEGI

SEQ ID NO: 9562 - DNA, 2034 bp, Agrobacterium tumefaciens str. C58
  CDS (1)..(2034): transl_table=11
atgacgacgatgcgaggggagaataaccgcatgatcaagaaaatcctcatcgccaatcgcggcgagatcgcctgccgggtgatcaagacggcgaagaagatgggcatcgccaccgttgcggtctattcggatgcggatgccaatgcgctgcatgtgaaaatggcggatgaagctgttcatatcggtccagcgccctcgtcgcagtcctatatagtcatcgataaaatccttgaggcgattcagaagaccggggcggatgcggtccatcccggttatggtttcctgtctgaaaatgccgccttcgctcaggcgctagagaaggcaggcgttgtattcatcggcccgcccgttggtgcgatcgaggcgatgggtgacaagatcacctcgaagaaactggccgcaaaagccggcgtttccaccgtgcccggccatatggggctgatcgaggatgcggatgaggcggtgaagatcgcgtcgcagatcggttatcccgtcatgatcaaggcctctgccggcggcggcggtaagggcatgcgcatcgccttcaacgaagccgaggcgcgggaaggcttccagtcctcgaagaacgaggcgaaatcctcctttggcgatgaccgtatcttcatcgaaaaattcgtcacccagccgcgccatattgaaattcaggtgttgggcgacaagcacggcaccattctttatctcggtgagcgcgaatgctcgatccagcgccgcaaccagaaggtcatagaagaagcgccgtcgccctttctggatgaggcgacgcggcacgccatgggcgagcaggccgtggcgctggcgagagcggttggttaccattcggctggcacggtggaattcatcgttgatggcgagcgcaatttctatttcctcgaaatgaacacccgcctgcaggtggaacatccggtgacggagcttgtcaccggcattgatctggtcgagcagatgatccgtgtggcatcgggcgaaaaactctctctcgcgcagggggatgtgaagctgaacggctgggcgatcgaaagccggctttatgccgaagacccctatcgcaacttcctgccctccattggccggctgacgcgttatcgcccaccgggagagggtgcacaggacagtggcaccgtcatccgcaatgataccggcgttttcgaaggcggcgaaatctcgatgtattacgatccgatgatcgccaagctgtgcagctggggcaaggatcgggagaccgccatcgatgccatgggagaggcgctggatcgtttcgaggttgagggtattggccacaatttgccgttcctgtccgccgtcatgcaacatgaacgttttcgctccggccggctgacgacaggctttatcgcggaagaatttccggaaggcttttccgggatcgagccggacgagaccgctgcacgcaagctttccgcaattgccgccatagtcaatcaacgcttgcagagccgcgcggttgaaatttccggcaccatcggcaatcaccgtcgcatcgtcggccatgactgggtggtttcgtttggcgcattccgccacgggatcagcgttgaaaccgttgcggatggcacggcggtccgttttgaagacggaatggccttgaccattgataccggctggcgtcccggccagagccttggcctcttcacggtggcgggcgaggtcatcgccgccaaggtcgatcttgccggcgcagcggttcgcctgcgctggcgcggcatggatattcttgcccgggtgcgcagcccgcgcgtggcggaactggcactgctgatgccggaaaaactgccgccggatacctcgaaactgctgctctgcccgatgccgggcgtcattaccggcatttcggtgggtgagggtgaggaggtggaggccggccaggcgctggcgacggtggaggccatgaagatggaaaacatcctgcgcgcggaaaaacgtggtcgtgttgtaagagtggcggcaaaaccgggcgacagccttgcagtggatgaggtcatcctcgaattcgagtga

SEQ ID NO: 9563 - protein, 677 aa, Agrobacterium tumefaciens str. C58
MTTMRGENNRMIKKILIANRGEIACRVIKTAKKMGIATVAVYSDADANALHVKMADEAVHIGPAPSSQSYIVIDKILEAIQKTGADAVHPGYGFLSENAAFAQALEKAGVVFIGPPVGAIEAMGDKITSKKLAAKAGVSTVPGHMGLIEDADEAVKIASQIGYPVMIKASAGGGGKGMRIAFNEAEAREGFQSSKNEAKSSFGDDRIFIEKFVTQPRHIEIQVLGDKHGTILYLGERECSIQRRNQKVIEEAPSPFLDEATRHAMGEQAVALARAVGYHSAGTVEFIVDGERNFYFLEMNTRLQVEHPVTELVTGIDLVEQMIRVASGEKLSLAQGDVKLNGWAIESRLYAEDPYRNFLPSIGRLTRYRPPGEGAQDSGTVIRNDTGVFEGGEISMYYDPMIAKLCSWGKDRETAIDAMGEALDRFEVEGIGHNLPFLSAVMQHERFRSGRLTTGFIAEEFPEGFSGIEPDETAARKLSAIAAIVNQRLQSRAVEISGTIGNHRRIVGHDWVVSFGAFRHGISVETVADGTAVRFEDGMALTIDTGWRPGQSLGLFTVAGEVIAAKVDLAGAAVRLRWRGMDILARVRSPRVAELALLMPEKLPPDTSKLLLCPMPGVITGISVGEGEEVEAGQALATVEAMKMENILRAEKRGRVVRVAAKPGDSLAVDEVILEFE

SEQ ID NO: 9564 - DNA, 1380 bp, Brucella melitensis 16M
  CDS (1)..(1380): transl_table=11
atggacgggcagcaaagcgcaatgtttcaaaagatactcatagccaatcgtggcgaaatcgctcttcgcgtgctcagggcttgcaaggagctgggcataaagacggtcgccgttcattccacggcagatgccgacgcaatgcatgtgcgcctggcagatgagagcgtatgcatcggaccgccgccctcacgcgacagctatctgaacatccatcagatcgtggccgcctgcgaaatcaccggcgcggatgcaattcaccccggctacggcttcctttcggaaaatgcaaaattcgccgaaatccttgaagcccatgacattaccttcatcggccccactgcttcgcatatccgcatcatgggcgacaagatcgaagccaagcgcaccgcaaagcgcctcggcatcccggtcgttccgggttcggacggcggcgtgacggatgaagtcgaagcagcccgtatcgccaaggaaatcggctatccggtcatcatcaaggcttcggccggcggcggtggtcgtggcatgaaggtcgcccgcagcgcggaagagcttccgatcgcacttgcgacggcacgttctgaagctggcgcggcctttggcgacgatgcggtctacatcgaaaaatatctcgaaaaaccgcgccatatcgaagttcaggtcatgggggacggtgcgggcaatgccgtccatctgggcgaacgcgactgctcgctgcaacgccgtcaccagaaggtctgggaagagggcaactcccccgccctcaatgcggaagcgcgcgaaaagatcggcatgatctgcgccaatgcctgcgcagagcttggctatcgcggcgcaggcacgatcgaatttctctatgaagatggagaattctatttcatcgaaatgaatacgcgccttcaggtggaacatccggttacggaagcgatcaccggcatcgatcttgtgcatgagcagattcgcgttgccgcaggccttggtctttcggtgaagcagaaggatatccgcttttccggccatgccatcgagtgccgtatcaatgcggaagatccgctgaccttcgcaccgtcaccgggcctcatcacgcattatcatacgccgggcgggcttggcgtacgcgtcgattccggcgtttattccggctatcgcattccaccctactatgacagcctgaccggcaagctcatcgtgcatggacgtaaccgcgtcgaatgcatgatgcgtctgcgccgcgcgctggatgagttcgtggtggatggggtaaagaccaccctgcccctgtttcaggatctgatttccaatcaggatatcgccaatggcgattatgacatccactggttggaaaagtacctggccaacaagagcaagaacgaaagcgcctga

SEQ ID NO: 9565 - protein, 459 aa, Brucella melitensis 16M
MDGQQSAMFQKILIANRGEIALRVLRACKELGIKTVAVHSTADADAMHVRLADESVCIGPPPSRDSYLNIHQIVAACEITGADAIHPGYGFLSENAKFAEILEAHDITFIGPTASHIRIMGDKIEAKRTAKRLGIPVVPGSDGGVTDEVEAARIAKEIGYPVIIKASAGGGGRGMKVARSAEELPIALATARSEAGAAFGDDAVYIEKYLEKPRHIEVQVMGDGAGNAVHLGERDCSLQRRHQKVWEEGNSPALNAEAREKIGMICANACAELGYRGAGTIEFLYEDGEFYFIEMNTRLQVEHPVTEAITGIDLVHEQIRVAAGLGLSVKQKDIRFSGHAIECRINAEDPLTFAPSPGLITHYHTPGGLGVRVDSGVYSGYRIPPYYDSLTGKLIVHGRNRVECMMRLRRALDEFVVDGVKTTLPLFQDLISNQDIANGDYDIHWLEKYLANKSKNESA

SEQ ID NO: 9566 - DNA, 2145 bp, Arabidopsis thaliana
  CDS (1)..(2145)
atgtcgatgatgacggtgtgggcacttcgacggaatgttcgtcggaaaaatcactcgatgctcgtgagatatatttccggctccgcatcgatgaagcctaaggagcaatgtattgagaagattttggtggcgaacagaggcgagattgcttgccggatcatgagaacggcgaagcgtttagggattcagaccgttgcggtttacagtgacgctgatagagattcgctccatgtgaaatctgcagacgaagcggtacggattggcccgccctcggctagacttagttacctcagcggtgtgactatcatggaggcagcggctcggactggtgcacaggcaatacaccctggctatgggttcttgtcagaaagttctgactttgcccaactctgtgaggattcgggtctaacattcattggacctccagcatctgctattagagacatgggtgataaaagtgcatccaagagaattatgggagctgctggagttcctctcgtgcctggatatcatggccatgagcaagatattgatcatatgaagtcagaagctgaaaagattggataccctataataatcaagccaacacatggaggtggggggaagggaatgaggatagtgcaaagtgggaaggattttgctgactcgtttttgggtgcccaacgtgaagctgctgcttcttttggcgttaacactattcttctcgagaaatacattactcgaccgaggcatatagaagtccagatatttggtgacaaacatggaaatgttcttcatctatacgaaagggattgcagtgtgcaaagaagacaccaaaagattattgaagaagctcctgcggcagttggatattataatgctgggacggtggaatttatagttgacaccgagtctgatcaattttattttatggaaatgaacacccgtctacaggtcgaacatcctgtaactgagatgattgttggtcaagatcttgtggaatggcaaattcgggttgccaatggggaacctctccccttaagccaatccgaggtgccaatgtcaggtcatgcctttgaggccaggatatatgctgaaaacgttccaaaaggatttcttcctgcaactggggtcctcaatcattatcgccctgttgcagtctcaccatcagttcgggttgaaactggagttgagcaaggagacactgttagcatgcactatgatcctatgattgcaaagcttgttgtctggggaggtaatcgtggcgaagctttagtgaaactgaaggattgcttgtctaactttcaggtagcaggtgtacctacgaacataaatttccttcaaaaacttgctagtcataaggagtttgcagtgggcaatgtagaaactcattttattgagcaccataaaagtgatctatttgctgacgaaagcaatccagctgcaacagaagtggcatacaaggcagtcaagcatagtgcagcattggtggctgcttgtatctccacaatcgagcattctacttggaatgaaagtaatcatgggaaagttccatcgatatggtattcgaatcctccttttagggtccatcatgaagccaaacaaaccattgagctagaatggaataatgaatgcgagggaactggctctaacctcatatcactcggtgtaagatatcaaccagatggaagctatctcattgaggaaggcaatgattctccaagtttagaactcagagtaacacgagcaggaaagtgcgattttagagttgaagcggccggattgagcatgaatgttagtctagctgcgtacttgaaggatggttataagcatatccatatatggcatggttcagaacaccatcagttcaagcagaaggtaggaatcgaattctctgaagatgaagaaggtgtccaacacagaaccagctccgaaacatcatcacaccctccaggaaccattgtggcccccatggctggtttggtagtcaaggtccttgtcgaaaacgaagccaaagtagatcaaggtcaacctatattagtcctagaggcaatgaagatggagcacgttgtgaaagcaccatcctctggaagcatacaggacctcaaagttaaagcaggccaacaggtttcagatggcagtgctctattcaggatcaaagggtaa

SEQ ID NO: 9567 - protein, 714 aa, Arabidopsis thaliana
MSMMTVWALRRNVRRKNHSMLVRYISGSASMKPKEQCIEKILVANRGEIACRIMRTAKRLGIQTVAVYSDADRDSLHVKSADEAVRIGPPSARLSYLSGVTIMEAAARTGAQAIHPGYGFLSESSDFAQLCEDSGLTFIGPPASAIRDMGDKSASKRIMGAAGVPLVPGYHGHEQDIDHMKSEAEKIGYPIIIKPTHGGGGKGMRIVQSGKDFADSFLGAQREAAASFGVNTILLEKYITRPRHIEVQIFGDKHGNVLHLYERDCSVQRRHQKIIEEAPAAVGYYNAGTVEFIVDTESDQFYFMEMNTRLQVEHPVTEMIVGQDLVEWQIRVANGEPLPLSQSEVPMSGHAFEARIYAENVPKGFLPATGVLNHYRPVAVSPSVRVETGVEQGDTVSMHYDPMIAKLVVWGGNRGEALVKLKDCLSNFQVAGVPTNINFLQKLASHKEFAVGNVETHFIEHHKSDLFADESNPAATEVAYKAVKHSAALVAACISTIEHSTWNESNHGKVPSIWYSNPPFRVHHEAKQTIELEWNNECEGTGSNLISLGVRYQPDGSYLIEEGNDSPSLELRVTRAGKCDFRVEAAGLSMNVSLAAYLKDGYKHIHIWHGSEHHQFKQKVGIEFSEDEEGVQHRTSSETSSHPPGTIVAPMAGLVVKVLVENEAKVDQGQPILVLEAMKMEHVVKAPSSGSIQDLKVKAGQQVSDGSALFRIKG

SEQ ID NO: 9568 - DNA, 3423 bp, Corynebacterium glutamicum ATCC 13032
  CDS (1)..(3423): transl_table=11
gtgtcgactcacacatcttcaacgcttccagcattcaaaaagatcttggtagcaaaccgcggcgaaatcgcggtccgtgctttccgtgcagcactcgaaaccggtgcagccacggtagctatttacccccgtgaagatcggggatcattccaccgctcttttgcttctgaagctgtccgcattggtaccgaaggctcaccagtcaaggcgtacctggacatcgatgaaattatcggtgcagctaaaaaagttaaagcagatgccatttacccgggatacggcttcctgtctgaaaatgcccagcttgcccgcgagtgtgcggaaaacggcattacttttattggcccaaccccagaggttcttgatctcaccggtgataagtctcgcgcggtaaccgccgcgaagaaggctggtctgccagttttggcggaatccaccccgagcaaaaacatcgatgagatcgttaaaagcgctgaaggccagacttaccccatctttgtgaaggcagttgccggtggtggcggacgcggtatgcgttttgttgcttcacctgatgagcttcgcaaattagcaacagaagcatctcgtgaagctgaagcggctttcggcgatggcgcggtatatgtcgaacgtgctgtgattaaccctcagcatattgaagtgcagatccttggcgatcacactggagaagttgtacacctttatgaacgtgactgctcactgcagcgtcgtcaccaaaaagttgtcgaaattgcgccagcacagcatttggatccagaactgcgtgatcgcatttgtgcggatgcagtaaagttctgccgctccattggttaccagggcgcgggaaccgtggaattcttggtcgatgaaaagggcaaccacgtcttcatcgaaatgaacccacgtatccaggttgagcacaccgtgactgaagaagtcaccgaggtggacctggtgaaggcgcagatgcgcttggctgctggtgcaaccttgaaggaattgggtctgacccaagataagatcaagacccacggtgcagcactgcagtgccgcatcaccacggaagatccaaacaacggcttccgcccagataccggaactatcaccgcgtaccgctcaccaggcggagctggcgttcgtcttgacggtgcagctcagctcggtggcgaaatcaccgcacactttgactccatgctggtgaaaatgacctgccgtggttccgactttgaaactgctgttgctcgtgcacagcgcgcgttggctgagttcaccgtgtctggtgttgcaaccaacattggtttcttgcgtgcgttgctgcgggaagaggacttcacttccaagcgcatcgccaccggattcattgccgatcacccgcacctccttcaggctccacctgctgatgatgagcagggacgcatcctggattacttggcagatgtcaccgtgaacaagcctcatggtgtgcgtccaaaggatgttgcagctcctatcgataagctgcctaacatcaaggatctgccactgccacgcggttcccgtgaccgcctgaagcagcttggcccagccgcgtttgctcgtgatctccgtgagcaggacgcactggcagttactgataccaccttccgcgatgcacaccagtctttgcttgcgacccgagtccgctcattcgcactgaagcctgcggcagaggccgtcgcaaagctgactcctgagcttttgtccgtggaggcctggggcggcgcgacctacgatgtggcgatgcgtttcctctttgaggatccgtgggacaggctcgacgagctgcgcgaggcgatgccgaatgtaaacattcagatgctgcttcgcggccgcaacaccgtgggatacaccccgtacccagactccgtctgccgcgcgtttgttaaggaagctgccagctccggcgtggacatcttccgcatcttcgacgcgcttaacgacgtctcccagatgcgtccagcaatcgacgcagtcctggagaccaacaccgcggtagccgaggtggctatggcttattctggtgatctctctgatccaaatgaaaagctctacaccctggattactacctaaagatggcagaggagatcgtcaagtctggcgctcacatcttggccattaaggatatggctggtctgcttcgcccagctgcggtaaccaagctggtcaccgcactgcgccgtgaattcgatctgccagtgcacgtgcacacccacgacactgcgggtggccagctggcaacctactttgctgcagctcaagctggtgcagatgctgttgacggtgcttccgcaccactgtctggcaccacctcccagccatccctgtctgccattgttgctgcattcgcgcacacccgtcgcgataccggtttgagcctcgaggctgtttctgacctcgagccgtactgggaagcagtgcgcggactgtacctgccatttgagtctggaaccccaggcccaaccggtcgcgtctaccgccacgaaatcccaggcggacagttgtccaacctgcgtgcacaggccaccgcactgggccttgcggatcgtttcgaactcatcgaagacaactacgcagccgttaatgagatgctgggacgcccaaccaaggtcaccccatcctccaaggttgttggcgacctcgcactccacctcgttggtgcgggtgtggatccagcagactttgctgccgatccacaaaagtacgacatcccagactctgtcatcgcgttcctgcgcggcgagcttggtaaccctccaggtggctggccagagccactgcgcacccgcgcactggaaggccgctccgaaggcaaggcacctctgacggaagttcctgaggaagagcaggcgcacctcgacgctgatgattccaaggaacgtcgcaatagcctcaaccgcctgctgttcccgaagccaaccgaagagttcctcgagcaccgtcgccgcttcggcaacacctctgcgctggatgatcgtgaattcttctacggcctggtcgaaggccgcgagactttgatccgcctgccagatgtgcgcaccccactgcttgttcgcctggatgcgatctctgagccagacgataagggtatgcgcaatgttgtggccaacgtcaacggccagatccgcccaatgcgtgtgcgtgaccgctccgttgagtctgtcaccgcaaccgcagaaaaggcagattcctccaacaagggccatgttgctgcaccattcgctggtgttgtcaccgtgactgttgctgaaggtgatgaggtcaaggctggagatgcagtcgcaatcatcgaggctatgaagatggaagcaacaatcactgcttctgttgacggcaaaatcgatcgcgttgtggttcctgctgcaacgaaggtggaaggtggcgacttgatcgtcgtcgtttcctaa

SEQ ID NO: 9569 - protein, 1140 aa, Corynebacterium glutamicum ATCC 13032
MSTHTSSTLPAFKKILVANRGEIAVRAFRAALETGAATVAIYPREDRGSFHRSFASEAVRIGTEGSPVKAYLDIDEIIGAAKKVKADAIYPGYGFLSENAQLARECAENGITFIGPTPEVLDLTGDKSRAVTAAKKAGLPVLAESTPSKNIDEIVKSAEGQTYPIFVKAVAGGGGRGMRFVASPDELRKLATEASREAEAAFGDGAVYVERAVINPQHIEVQILGDHTGEVVHLYERDCSLQRRHQKVVEIAPAQHLDPELRDRICADAVKFCRSIGYQGAGTVEFLVDEKGNHVFIEMNPRIQVEHTVTEEVTEVDLVKAQMRLAAGATLKELGLTQDKIKTHGAALQCRITTEDPNNGFRPDTGTITAYRSPGGAGVRLDGAAQLGGEITAHFDSMLVKMTCRGSDFETAVARAQRALAEFTVSGVATNIGFLRALLREEDFTSKRIATGFIADHPHLLQAPPADDEQGRILDYLADVTVNKPHGVRPKDVAAPIDKLPNIKDLPLPRGSRDRLKQLGPAAFARDLREQDALAVTDTTFRDAHQSLLATRVRSFALKPAAEAVAKLTPELLSVEAWGGATYDVAMRFLFEDPWDRLDELREAMPNVNIQMLLRGRNTVGYTPYPDSVCRAFVKEAASSGVDIFRIFDALNDVSQMRPAIDAVLETNTAVAEVAMAYSGDLSDPNEKLYTLDYYLKMAEEIVKSGAHILAIKDMAGLLRPAAVTKLVTALRREFDLPVHVHTHDTAGGQLATYFAAAQAGADAVDGASAPLSGTTSQPSLSAIVAAFAHTRRDTGLSLEAVSDLEPYWEAVRGLYLPFESGTPGPTGRVYRHEIPGGQLSNLRAQATALGLADRFELIEDNYAAVNEMLGRPTKVTPSSKVVGDLALHLVGAGVDPADFAADPQKYDIPDSVIAFLRGELGNPPGGWPEPLRTRALEGRSEGKAPLTEVPEEEQAHLDADDSKERRNSLNRLLFPKPTEEFLEHRRRFGNTSALDDREFFYGLVEGRETLIRLPDVRTPLLVRLDAISEPDDKGMRNVVANVNGQIRPMRVRDRSVESVTATAEKADSSNKGHVAAPFAGVVTVTVAEGDEVKAGDAVAIIEAMKMEATITASVDGKIDRVVVPAATKVEGGDLIVVVS

SEQ ID NO: 9570 - DNA, 1776 bp, Corynebacterium glutamicum ATCC 13032
  CDS (1)..(1776): transl_table=11
gtgtcagtcgagactaggaagatcaccaaggttcttgtcgctaaccgtggtgagattgcaatccgcgtgttccgtgcagctcgagatgaaggcatcggatctgtcgccgtctacgcagagccagatgcagatgcaccattcgtgtcatatgcagacgaggcttttgccctcggtggccaaacatccgctgagtcctaccttgtcattgacaagatcatcgatgcggcccgcaagtccggcgccgacgccatccaccccggctacggcttcctcgcagaaaacgctgacttcgcagaagcagtcatcaacgaaggcctgatctggattggaccttcacctgagtccatccgctccctcggcgacaaggtcaccgctcgccacatcgcagataccgccaaggctccaatggctcctggcaccaaggaaccagtaaaagacgcagcagaagttgtggctttcgctgaagaattcggtctcccaatcgccatcaaggcagctttcggtggcggcggacgtggcatgaaggttgcctacaagatggaagaagtcgctgacctcttcgagtccgcaacccgtgaagcaaccgcagcgttcggccgcggcgagtgcttcgtggagcgctacctggacaaggcacgccacgttgaggctcaggtcatcgccgataagcacggcaacgttgttgtcgccggaacccgtgactgctccctgcagcgccgtttccagaagctcgtcgaagaagcaccagcaccattcctcaccgatgaccagcgcgagcgtctccactcctccgcgaaggctatctgtaaggaagctggctactacggtgcaggcaccgttgagtacctcgttggctccgacggcctgatctccttcctcgaggtcaacacccgcctccaggtggaacacccagtcaccgaagagaccaccggcatcgacctggtccgcgaaatgttccgcatcgcagaaggccacgagctctccatcaaggaagatccagctccacgcggccacgcattcgagttccgcatcaacggcgaagacgctggctccaacttcatgcctgcaccaggcaagatcaccagctaccgcgagccacagggcccaggcgtccgcatggactccggtgtcgttgaaggttccgaaatctccggacagttcgactccatgctggcaaagctgatcgtttggggcgacacccgcgagcaggctctccagcgctcccgccgtgcacttgcagagtacgttgtcgagggcatgccaaccgttatcccattccaccagcacatcgtggaaaacccagcattcgtgggcaacgacgaaggcttcgagatctacaccaagtggatcgaagaggtttgggataacccaatcgcaccttacgttgacgcttccgagctcgacgaagatgaggacaagaccccagcacagaaggttgttgtggagatcaacggccgtcgcgttgaggttgcactcccaggcgatctggcactcggtggcaccgctggtcctaagaagaaggccaagaagcgtcgcgcaggtggtgcaaaggctggcgtatccggcgatgcagtggcagctccaatgcagggcactgtcatcaaggtcaacgtcgaagaaggcgctgaagtcaacgaaggcgacaccgttgttgtcctcgaggctatgaagatggaaaaccctgtgaaggctcataagtccggaaccgtaaccggccttactgtcgctgcaggcgagggtgtcaacaagggcgttgttctcctcgagatcaagtaa

SEQ ID NO: 9571 - protein, 591 aa, Corynebacterium glutamicum ATCC 13032
MSVETRKITKVLVANRGEIAIRVFRAARDEGIGSVAVYAEPDADAPFVSYADEAFALGGQTSAESYLVIDKIIDAARKSGADAIHPGYGFLAENADFAEAVINEGLIWIGPSPESIRSLGDKVTARHIADTAKAPMAPGTKEPVKDAAEVVAFAEEFGLPIAIKAAFGGGGRGMKVAYKMEEVADLFESATREATAAFGRGECFVERYLDKARHVEAQVIADKHGNVVVAGTRDCSLQRRFQKLVEEAPAPFLTDDQRERLHSSAKAICKEAGYYGAGTVEYLVGSDGLISFLEVNTRLQVEHPVTEETTGIDLVREMFRIAEGHELSIKEDPAPRGHAFEFRINGEDAGSNFMPAPGKITSYREPQGPGVRMDSGVVEGSEISGQFDSMLAKLIVWGDTREQALQRSRRALAEYVVEGMPTVIPFHQHIVENPAFVGNDEGFEIYTKWIEEVWDNPIAPYVDASELDEDEDKTPAQKVVVEINGRRVEVALPGDLALGGTAGPKKKAKKRRAGGAKAGVSGDAVAAPMQGTVIKVNVEEGAEVNEGDTVVVLEAMKMENPVKAHKSGTVTGLTVAAGEGVNKGVVLLEIK

SEQ ID NO: 9572 - DNA, 3375 bp, Streptomyces coelicolor A3(2)
  CDS (1)..(3375): transl_table=11
atgttccgcaaggtgctggtcgccaaccgcggtgagatcgcgatccgtgcgtttcgggcgggctacgagctcggcgcgcgcaccgtcgccgtcttcccgcacgaggaccgcaattcgctgcaccggctcaaggccgacgaggcctacgagatcggggagcaggggcatcccgtccgcgcgtacctctccgtggaggagatcgtgcgcgccgcccgccgtgcgggggccgacgccgtctacccgggctacggcttcctgtccgagaaccccgaactcgcccgcgcctgcgaggaggccgggatcaccttcgtcggtcccagcgcccggatcctggaactgaccggcaacaaggcacgggccgtggccgccgcccgcgaggccggagtacccgtgctcggctcctcggcgccctccaccgacgtggacgaactcgtacgcgccgccgacgacgtcggcttccccgtgttcgtcaaggcggtcgcgggcggcggcgggcgcggcatgcgccgcgtcgaggaacccgcccagctgcgcgaggccatcgaggccgcctcccgcgaggccgcgtccgccttcggcgactccaccgtcttcctggagaaggcggtcgtcgaaccccgccacatcgaggtgcagatcctcgccgacggcgagggcgacgtcatccacctcttcgagcgggactgctcggtgcagcgccgccaccagaaggtgatcgagctggcgcccgcgcccaacctcgacccggccctgcgggagcggatctgcgccgacgccgtgaacttcgcccggcagatcggctaccgcaacgcgggcaccgtcgagttcctcgtcgaccgggacggcaaccacgtcttcatcgagatgaacccgcgcatccaggtcgagcacacggtcaccgaggaggtcaccgacgtcgacctggtccagtcccagctgcgcatcgccgccggccagacgctggccgacctcggactcgcccaggagaacatcaccctgcgcggtgccgcactccagtgccgcatcaccaccgaggacccggccaacggcttccgcccggacaccgggcagatcagcgcctaccgttcgccgggcggctccggcatccggctcgacggcggtaccacccacgccggtacggagatcagcgcgcacttcgactcgatgctggtcaagctctcctgccggggacgggacttcaccaccgcggtgaaccgcgcccggcgtgcggtcgccgagttccgcatccgcggcgtcgccaccaacatccccttcctccaggcggtcctggacgaccccgacttccaggccggccgggtcaccacctcgttcatcgaacagcgcccgcacctgctgaccgcccggcactccgccgaccgcggcaccaagctgctgacctacctcgccgacgtcacggtgaacaagccgcacggcgagcgccccgagctggtcgacccgctgaccaagctgccgacggcgtccgccggtgaaccgcccgccgggtcccgccagttgctggccgagctggggccggaggggttcgcccgccgactgcgcgagtcgtccaccatcggcgtcaccgacaccaccttccgcgacgcccaccagtcgctgctcgccacccgggtgcgcaccaaggacatgctcgccgtggcgcccgtcgtcgcccgcaccctgccccagctgctgtccctggagtgctggggcggcgccacctacgacgtcgccctgcgcttcctcgccgaggacccctgggagcggctagccgcgctgcgcgaggcggtgcccaacctctgcctccagatgctgctgcgcggccgcaacaccgtgggctacaccccgtacccgaccgaggtgaccgacgccttcgtgcaggaggccgccgccaccggcatcgacatcttccgcatcttcgacgccctcaacgacgtcgagcagatgcggcccgccatcgaggccgtacggcagaccggcagcgccgtcgccgaggtcgcgctctgctacaccgccgacctgtccgacccctccgagcggctctacaccctcgactactacctgcggctcgccgagcagatcgtgaacgccggagcgcacgtgctggccgtcaaggacatggccgggctgctgcgcgcaccggccgccgcgaccctggtgtccgcgctgcgccgggagttcgacctgccggtgcacctgcacacccacgacaccaccggcggccagctcgccacctacctggccgcgatccaggcgggcgcggacgccgtcgacggtgcggtggcgtccatggcgggcaccacttcgcagccgtcgctgtcggcgatcgtggccgccaccgaccacaccgagcggcccaccggcctcgacctccaggccgtcggcgacctggagccgtactgggagagcgtccgcaaggtctacgccccgttcgaggccggcctggcctccccgaccggccgggtctaccaccacgagattcccggcggccagctctccaacctgcgcacccaggccgtcgcgctcggcctcggcgaccgcttcgaggacatcgaggccatgtacgccgccgccgaccggatgctgggccgcctggtgaaggtcaccccgtcctccaaggtggtcggcgacctggccctgcatctggtgggcgccggtgtctccccggcggacttcgagcaggaccccgaccggttcgacatcccggactccgtggtcggcttcctgcgcggcgagctgggcaccccgcccggcggctggcccgagccgttccgcagcaaggcgctgcgcggccgcgccgaggccaggccgctcgccgagctgtccgaggacgaccgcgacggcctcggcaaggaccgccgggcgacgctcaaccggctgctgttcccgggaccggcccgcgagttcgacacccaccgcgcctcgtacggcgacaccagcatcctcgacagcaaggacttcttctacgggctgcgcccgggcaaggagtacacggtcgacctcgaccccggcgtccggctgctcatcgaactccaggcggtcggcgacgccgacgagcgcggcatgcgcaccgtgatgtcctccctgaacggacagctccgccccatccaggtccgcgaccggtcggccgccaccgacgtcccggtgacggagaaggccgaccgggcgaaccccggccacgtcgcggcgccgttcgccggtgtggtgaccctcgccgtcgccgagggcgacgaggtggaggccggggccaccgtggccaccatcgaggcgatgaagatggaggcgtcgatcacggccccgaagtccggcacggtgaccaggctcgccatcaaccgcatccagcaggtcgagggcggcgatcttctcgtccaactcgcctga

SEQ ID NO: 9573 - protein, 1124 aa, Streptomyces coelicolor A3(2)
MFRKVLVANRGEIAIRAFRAGYELGARTVAVFPHEDRNSLHRLKADEAYEIGEQGHPVRAYLSVEEIVRAARRAGADAVYPGYGFLSENPELARACEEAGITFVGPSARILELTGNKARAVAAAREAGVPVLGSSAPSTDVDELVRAADDVGFPVFVKAVAGGGGRGMRRVEEPAQLREAIEAASREAASAFGDSTVFLEKAVVEPRHIEVQILADGEGDVIHLFERDCSVQRRHQKVIELAPAPNLDPALRERICADAVNFARQIGYRNAGTVEFLVDRDGNHVFIEMNPRIQVEHTVTEEVTDVDLVQSQLRIAAGQTLADLGLAQENITLRGAALQCRITTEDPANGFRPDTGQISAYRSPGGSGIRLDGGTTHAGTEISAHFDSMLVKLSCRGRDFTTAVNRARRAVAEFRIRGVATNIPFLQAVLDDPDFQAGRVTTSFIEQRPHLLTARHSADRGTKLLTYLADVTVNKPHGERPELVDPLTKLPTASAGEPPAGSRQLLAELGPEGFARRLRESSTIGVTDTTFRDAHQSLLATRVRTKDMLAVAPVVARTLPQLLSLECWGGATYDVALRFLAEDPWERLAALREAVPNLCLQMLLRGRNTVGYTPYPTEVTDAFVQEAAATGIDIFRIFDALNDVEQMRPAIEAVRQTGSAVAEVALCYTADLSDPSERLYTLDYYLRLAEQIVNAGAHVLAVKDMAGLLRAPAAATLVSALRREFDLPVHLHTHDTTGGQLATYLAAIQAGADAVDGAVASMAGTTSQPSLSAIVAATDHTERPTGLDLQAVGDLEPYWESVRKVYAPFEAGLASPTGRVYHHEIPGGQLSNLRTQAVALGLGDRFEDIEAMYAAADRMLGRLVKVTPSSKVVGDLALHLVGAGVSPADFEQDPDRFDIPDSVVGFLRGELGTPPGGWPEPFRSKALRGRAEARPLAELSEDDRDGLGKDRRATLNRLLFPGPAREFDTHRASYGDTSILDSKDFFYGLRPGKEYTVDLDPGVRLLIELQAVGDADERGMRTVMSSLNGQLRPIQVRDRSAATDVPVTEKADRANPGHVAAPFAGVVTLAVAEGDEVEAGATVATIEAMKMEASITAPKSGTVTRLAINRIQQVEGGDLLVQLA

SEQ ID NO: 9574 - DNA, 1941 bp, Streptomyces coelicolor A3(2)
  CDS (1)..(1941): transl_table=11
atgttcgacaccgtgctcgtcgccaaccgcggcgagatcgccgtccgcgtcatccggacgctgcgctcgatgggcgtgcgctcggtggcggtcttctccgacgccgacgcggacgcacggcacgtgcgggaggcggacgacgcggtacggatcggcccggcgcccgcgacggagagctatctgtccgtcgagcggctgctggcggcggcggcccggacgggggcgcaggccgtccacccgggatacggcttcctcgccgagaacgcgggtttcgcgcgggcctgcgaggaggcggggctggtcttcatcgggccgtccgccgacgcgatcgccctgatgggcgacaagatccgcgccaaggagacggtgcgggcggccggggtgccggtcgtccccggctccagcggcagcgggctcaccgacgagcagctcgccgacgccgcccgcgagatcggcaccccggtgctgctcaagccgtcggcgggcggtggcggcaagggcatgcggctggtgcgggacacggcggtgctggccgacgagatcgccgccgcgcgccgcgaggcccgcgcctccttcggcgacgacacgctgctggtggagcggtggatcgaccgtccccggcacatcgagatccaggtgctggccgacggccacgggggcgtggtgcacctgggcgagcgcgagtgctcgctccagcgccgccaccagaaggtgatcgaggaggcgcccagcgtcctgctggacgaggcgacccgggcggcgatgggcgaggcggccgtgcaggcggcccggtcctgcggctaccggggcgcgggcacggtggagttcatcgtgcccgggagcgacccctcccagtactacttcatggagatgaacacccgtctccaggtcgagcacccggtgacggagctggtgaccggcctggacctggtggagtggcagctgcgggtggcggcgggcgagccgctcgggttcgggcaggaggacgtacggctgaccgggcacgcgatcgaggcccggctgtgcgcggaggacccggcgcgcggcttcctgccctccggcggcacggtgctgcggctgcgcgagcccgagggcgacggcgtgcgcaccgactcggggctcagtgagggcaccgaggtcggcagcctctacgacccgatgctgtccaaggtgatcgcgtacggccccgaccgggagaccgcgctgcgcaggctccgggcggcgctggccgggacggtcaccctgggcgtgcagaccaacgccgggttcctgcggcggctgctcgcgcacccggcggtggtggcgggcgagctggacacggggctggtggagcgcgaggtcgacggcctggtcgccaccgacgtaccggaggaggtgtacgaggcggcggcggccgtacggctggaggcgctgcgcccgcgcggggacggctggacggacccgttctcggtgccgagcggctggcggatgggcggcgagccgaaggcggccgccttccacctccgggtcaccgacccggtggaacacaccccgcgcggaacccacaccgtcaccggggaccgggtcacggtcaccctggacggcgtccggcacaccttccaccgcgccgccgactggctgggccgcgacggcgacgcctggcaggtgcgcgaccacgacccggtggccgcctccctcaaccggtccgcccacgcgggcgccgactcgctgaccgcgccgatgccgggcacggtgacggtggtgaaggtcgccgtcggcgacgaggtgagcgccgggcagagcctgctggtggtggaggcgatgaagatggagcacgtcatctccgccccgcacgcgggcaccgtcgccgagctggacgtggcgccgggcacgacggtcgccatggaccaggtgctcgcggtcatcgcacccaccgacgacgcgacggaggagacggcatga

SEQ ID NO: 9575 - protein, 646 aa, Streptomyces coelicolor A3(2)
MFDTVLVANRGEIAVRVIRTLRSMGVRSVAVFSDADADARHVREADDAVRIGPAPATESYLSVERLLAAAARTGAQAVHPGYGFLAENAGFARACEEAGLVFIGPSADAIALMGDKIRAKETVRAAGVPVVPGSSGSGLTDEQLADAAREIGTPVLLKPSAGGGGKGMRLVRDTAVLADEIAAARREARASFGDDTLLVERWIDRPRHIEIQVLADGHGGVVHLGERECSLQRRHQKVIEEAPSVLLDEATRAAMGEAAVQAARSCGYRGAGTVEFIVPGSDPSQYYFMEMNTRLQVEHPVTELVTGLDLVEWQLRVAAGEPLGFGQEDVRLTGHAIEARLCAEDPARGFLPSGGTVLRLREPEGDGVRTDSGLSEGTEVGSLYDPMLSKVIAYGPDRETALRRLRAALAGTVTLGVQTNAGFLRRLLAHPAVVAGELDTGLVEREVDGLVATDVPEEVYEAAAAVRLEALRPRGDGWTDPFSVPSGWRMGGEPKAAAFHLRVTDPVEHTPRGTHTVTGDRVTVTLDGVRHTFHRAADWLGRDGDAWQVRDHDPVAASLNRSAHAGADSLTAPMPGTVTVVKVAVGDEVSAGQSLLVVEAMKMEHVISAPHAGTVAELDVAPGTTVAMDQVLAVIAPTDDATEETA

SEQ ID NO: 9576 - DNA, 1845 bp, Streptomyces coelicolor A3(2)
  CDS (1)..(1845): transl_table=11
gtgatcacttccgtcctcgtcgccaaccgcggcgagatcgcctgccgcgtcttcagcacctgccgcgagtcgggcatccgcaccgtcgccgtgcactcggacgccgacgcgaacgccctccacgcgcgcgtggccgacgccgccgtacgcctgccgggcgcggcccccgccgacacctatctgcgcggcgacctgatcgtgaaggccgccgtcgccgccggagccgacgccgtccaccccggctacggcttcctctccgagaacgccgacttcgcgcgcgccgtacgggacgcggggctggtgtggatcggaccgccgcccgaggccatcgaggcgatggcgtccaagacccgcgccaaggaactgatgggcatcgcgcccctcaccgacgtcaccgaggccgacctgccggtgctggtgaaggcggcggcgggcggcggcggacgcggcatgcgcgtcgtacgccgcctcgccgacctcgacgccgaactgaccgccgcccgcgcggaggccgcgagcgccttcggcgacggcgaggtcttcgtcgagccgtatgtggtcgacggccgccacgtcgaggtgcagatcctcgccgacacccacggcacggtgtgggtgctcggcacccgcgactgctccctccaacgccgccaccagaaggtgatcgaggaggccccggcgcccggcctgacccccgggctcaccgccgaactccacgacctcgccgtgcgcgccgcccgcgccgtcgactacgtcggcgcgggcaccgtcgagttcctcgtcgccgacggcacggcgcacttcctggagatgaacacccgcctccaggtcgaacacccggtcacggaggcggtcttcggcatcgacctcgtcgccctccagctccggatcgccgaaggccacgccctcgacgacgaccccccgcgcgcgcgtggccacgccgtcgaggcccgcctctacgccgaggacccggcgaacggctgggccccgcagaccggccgcctgcaccgcctcgccgtgccggacggcatccgcctggacaccggctacaccggcggcgacgacatcggcgtccactacgacccgatgctcgccaaggcggtcgcccacgcacccacgcgcgcggaggccgtccgccgactcgccggcgccctggaacgcgccgcgatccacggcccggtcaccaaccgcgacctcctcgtccgctccctgcgccacgaggagttcacctccggccgcatggacacgggcttctacgaccgccacctcgccgccctcaccgagccggcccccgaccccctcgccccgctggccgccgccctcgccgacgcgagcacccgtgcgggacgcttcggcggctggcgcaacctgccctcgcaaccgcaggtcaagcggtacgccgtggcgggcgaggaacacgaggtccgttacgggcacacccgcacgggcctcaccgccgagggcgtccgcgtcgtccacgcgggccccgaccgggtcgtcctcgaagcggacggcgtacaacgccccttcgacatcgcccgctacggcgaccacgtgcacgtcaacaccacgcgcctcaccgccctgccccgcttccccgaccccaccacccagcacgcccccggctccctcctggcccccatgccgggcacggtcgtccgcgtcgcggagggcctgaccgagggcaccaccgtccaggcgggccagccgttgctgtggctggaggccatgaagatggaacacaggatcaccgccccggtgacagggaggctgaccgcactcccggcgggcctcggacgacaagtagagatgggcgccctcttggcggtcgtcgagtccgactga

SEQ ID NO: 9577 - protein, 614 aa, Streptomyces coelicolor A3(2)
MITSVLVANRGEIACRVFSTCRESGIRTVAVHSDADANALHARVADAAVRLPGAAPADTYLRGDLIVKAAVAAGADAVHPGYGFLSENADFARAVRDAGLVWIGPPPEAIEAMASKTRAKELMGIAPLTDVTEADLPVLVKAAAGGGGRGMRVVRRLADLDAELTAARAEAASAFGDGEVFVEPYVVDGRHVEVQILADTHGTVWVLGTRDCSLQRRHQKVIEEAPAPGLTPGLTAELHDLAVRAARAVDYVGAGTVEFLVADGTAHFLEMNTRLQVEHPVTEAVFGIDLVALQLRIAEGHALDDDPPRARGHAVEARLYAEDPANGWAPQTGRLHRLAVPDGIRLDTGYTGGDDIGVHYDPMLAKAVAHAPTRAEAVRRLAGALERAAIHGPVTNRDLLVRSLRHEEFTSGRMDTGFYDRHLAALTEPAPDPLAPLAAALADASTRAGRFGGWRNLPSQPQVKRYAVAGEEHEVRYGHTRTGLTAEGVRVVHAGPDRVVLEADGVQRPFDIARYGDHVHVNTTRLTALPRFPDPTTQHAPGSLLAPMPGTVVRVAEGLTEGTTVQAGQPLLWLEAMKMEHRITAPVTGRLTALPAGLGRQVEMGALLAVVESD

SEQ ID NO: 9578 - DNA, 1773 bp, Streptomyces coelicolor A3(2)
  CDS (1)..(1773): transl_table=11
gtgcgcaaggtgctcatcgccaatcgtggcgaaatcgctgtccgcgtggcccgggcctgccgggacgccgggatcgcgagcgtggccgtctacgcggatccggaccgggacgcgttgcacgtccgtgccgctgatgaggcgttcgccctgggtggtgacacccccgcgaccagctatctggacatcgccaaggtcctcaaagccgcgcgcgagtcgggcgcggacgccatccaccccggctacgggttcctctcggagaacgccgagttcgcgcaggcggtcctggacgccggcctgatctggatcggcccgcccccgcacgccatccgcgacctgggcgacaaggtcgccgcccgccacatcgcccagcgggccggcgcccccctggtcgccggcacccccgaccccgtctccggcgcggacgaggtcgtcgccttcgccaaggagcacggcctgcccatcgccatcaaggccgccttcggcggcggcgggcgcggcctcaaggtcgcccgcaccctcgaagaggtgccggagctgtacgactccgccgtccgcgaggccgtggccgccttcggccgcggggagtgcttcgtcgagcgctacctcgacaagccccgccacgtggagacccagtgcctggccgacacccacggcaacgtggtcgtcgtctccacccgcgactgctccctccagcgccgccaccaaaagctcgtcgaggaggcccccgcgcccttcctctccgaggcccagacggagcagctgtactcatcctccaaggccatcctgaaggaggccggctacgtcggcgccggcaccgtggagttcctcgtcggcatggacggcacgatctccttcctggaggtcaacacccgcctccaggtcgagcacccggtcaccgaggaagtcgccggcatcgacctggtccgcgagatgttccgcatcgccgacggcgaggaactcggctacgacgaccccgccctgcgcggccactccttcgagttccgcatcaacggcgaggaccccggccgcggcttcctgcccgcccccggcaccgtcaccctcttcgacgcgcccaccggccccggcgtccgcctggacgccggcgtcgagtccggctccgtcatcggccccgcctgggactccctcctcgccaaactgatcgtcaccggccgcacccgcgccgaggcactccagcgcgcggcccgcgccctggacgagttcaccgtcgagggcatggccaccgccatccccttccaccgcacggtcgtccgcgacccggccttcgcccccgaactcaccggctccacggaccccttcaccgtccacacccggtggatcgagacggagttcgtcaacgagatcaagcccttcaccacgcccgccgacaccgagacggacgaggagtcgggccgggagacggtcgtcgtcgaggtcggcggcaagcgcctggaagtctccctcccctccagcctgggcatgtccctggcccgcaccggcctggccgccggggcccgccccaagcgccgcgcggccaagaagtccggccccgccgcctcgggcgacaccctcgcctccccgatgcagggcacgatcgtcaagatcgccgtcgaggagggccaggaagtccaggaaggcgacctcatcgtcgtactcgaggcgatgaagatggaacagcccctcaacgcccacaggtccggcaccatcaagggcctcaccgccgaggtcggcgcctccctcacctccggcgccgccatctgcgagatcaaggactga

SEQ ID NO: 9579 - protein, 590 aa, Streptomyces coelicolor A3(2)
MRKVLIANRGEIAVRVARACRDAGIASVAVYADPDRDALHVRAADEAFALGGDTPATSYLDIAKVLKAARESGADAIHPGYGFLSENAEFAQAVLDAGLIWIGPPPHAIRDLGDKVAARHIAQRAGAPLVAGTPDPVSGADEVVAFAKEHGLPIAIKAAFGGGGRGLKVARTLEEVPELYDSAVREAVAAFGRGECFVERYLDKPRHVETQCLADTHGNVVVVSTRDCSLQRRHQKLVEEAPAPFLSEAQTEQLYSSSKAILKEAGYVGAGTVEFLVGMDGTISFLEVNTRLQVEHPVTEEVAGIDLVREMFRIADGEELGYDDPALRGHSFEFRINGEDPGRGFLPAPGTVTLFDAPTGPGVRLDAGVESGSVIGPAWDSLLAKLIVTGRTRAEALQRAARALDEFTVEGMATAIPFHRTVVRDPAFAPELTGSTDPFTVHTRWIETEFVNEIKPFTTPADTETDEESGRETVVVEVGGKRLEVSLPSSLGMSLARTGLAAGARPKRRAAKKSGPAASGDTLASPMQGTIVKIAVEEGQEVQEGDLIVVLEAMKMEQPLNAHRSGTIKGLTAEVGASLTSGAAICEIKD

SEQ ID NO: 9580 - DNA, 1494 bp, Methanosarcina mazei Go1
  CDS (1)..(1494): transl_table=11
gtggaaggtatcatgttcaaaaaagtactcgttgcaaaccgcggtgaaatagcaatcagggttatgcgtgcctgcagggagctcgggatttcaacagttgctgtctgttccgaggctgacaaaagcgccctttttgccaagtatgctgatgaagcctatctgatagggcctgccccttcaagccagagctacctgaatatggaagctatcattgaggttgcaaaaaacaccggagctgaggcaatccaccccggctacggttttctttccgaaaaccctgcttttgcaaagcgctgtgaggaagaaggcattattttcataggccctccaagcaatgtaattgccgaaatgggaagcaaaatcagagcaaggcacctcatgatgaaagccggagtccctgtagttcccggaacaaaggacgcagttgaggaccctgaagaagccatggaaattgcagaaaagatcggctatcctgtccttatcaaagcgtctgccggaggcggtggaatagggatgaaggttgtccactccagggaagagcttgccacatccttaagctctacaaggcagatggcaggttccgctttcggggattcttccgtatttatcgaaaagtacgtggaagagccaaggcatatagagatccagatccttgctgactctcatggtaatatggtctacctctcagacagggaatgctcaatccagagaaggcaccagaagctgattgaagaagctccttcccctataatgactccggaactcaggaagcagatgggggaggctgccgtaaaggttgcaaaagcaattggttatgtaaacgcagggaccgtcgagttcctttactctaaagggaatttctatttccttgaagtcaatactcgccttcaggtggaacatggaattaccgaaatggtaaccggaattgatattgtcagggaacagatcaggatcgcctggggagacaaactcgattttgaacaggaagatatagttattgacgggcatgcaatcgaatgcagaataaatgccgaagatcccctgaatgattttgctccttcccctggaaagatccggaggtaccgttctgcaggagggcccggagtaagggtggacagcggagttcatacaggctatacaatctctccttattatgactccatgatttccaagctctgtgtctggtccagaaaaagagaagaggctatcgccaggatggacagggcactctacgagtatgtggtcgttggagtaaaaaccaatatccctttccataaagctgttatgaggaaccctgcattccgcagaggcgacatgacaaccagctttatcgaagaggagaatatccttgaggctgtggaacacgtcgttaaggctgacagtgagaaaggtgctactctggcttcggcccttgaggctaaggacaagaaagttgcagcaatcacggccgctgtacatgcctatgttaacatggcccagaaaacacagcggtga

SEQ ID NO: 9581 - protein, 497 aa, Methanosarcina mazei Go1
MEGIMFKKVLVANRGEIAIRVMRACRELGISTVAVCSEADKSALFAKYADEAYLIGPAPSSQSYLNMEAIIEVAKNTGAEAIHPGYGFLSENPAFAKRCEEEGIIFIGPPSNVIAEMGSKIRARHLMMKAGVPVVPGTKDAVEDPEEAMEIAEKIGYPVLIKASAGGGGIGMKVVHSREELATSLSSTRQMAGSAFGDSSVFIEKYVEEPRHIEIQILADSHGNMVYLSDRECSIQRRHQKLIEEAPSPIMTPELRKQMGEAAVKVAKAIGYVNAGTVEFLYSKGNFYFLEVNTRLQVEHGITEMVTGIDIVREQIRIAWGDKLDFEQEDIVIDGHAIECRINAEDPLNDFAPSPGKIRRYRSAGGPGVRVDSGVHTGYTISPYYDSMISKLCVWSRKREEAIARMDRALYEYVVVGVKTNIPFHKAVMRNPAFRRGDMTTSFIEEENILEAVEHVVKADSEKGATLASALEAKDKKVAAITAAVHAYVNMAQKTQR

SEQ ID NO: 9582 - DNA, 1368 bp, Xanthomonas campestris pv. campestris str. ATCC 33913
  CDS (1)..(1368): transl_table=11
atgctcgataaagtcgtcattgccaaccgaggtgaaatcgcgctgcgcatcctgcgcgcgtgccacacgctcggcatccgcacggtcgcggtgcactccacggtcgaccgtaacctcaagcacgtggccatggccgacgagtcggtgtgtatcggcccggccgcgtccagcgacagttacctcaacatcccggcgctgatcgccgcggccgaggtcaccgacgcgcaggccatccaccccggctacgggtttctctcggaaaacgccgattttgccgagcgggtggaagaatccggcttcatcttcatcggccccaaggccgacaccatccgcctgatgggcgacaaggtcgaggcgatccgcgcgatgaaggccgccggcgtaccgtgcgtgcccggctcgggcggcccgctgggcgatgacatcgtggccaacaccaagatcgcgcgcgaaatcggctacccggtgatcatcaaggccgccggtggcggcggtggacgcggcatgcgcgtggtgcattcggaggccgcgctgaaggcggcgatcgaaaccaccaagtccgaagcaaaggccgctttcagcaacgatcaggtctacatggagaagttcctggagaacccacgccatgtggaaatccaggtgcttgccgatggccagggcaacgccatccatctgggcgagcgcgattgctcgatgcagcgccgtcaccagaaagtggtggaagaagcgccggcaccgggcatcagcgaagaactgcgcgctgagatcggcaaggtctgcgtggatgcgtgcatccgcatcggttaccgcggcgcgggcaccttcgaattcctgttcgaaggcggccggttctacttcatcgaaatgaacacgcgtatccaggtggaacacccggtgaccgagcgcatcaccggcatcgacctggtgtgcgagcagctgcgcatcgccgccggccacaagctgagcatcaagcagagcgacatcgtgctgcgcgggcatgcgatcgagtgccgcatcaacgccgaagacccggaaaccttcatgcccaacccgggcctgatcaccgccttccatccgccgggtggcccgggcgtgcgcgtggatacgcacatctatgccggctacaaggtgccgccgaactacgactcgatgatcggcaagctgatcgtgcacggcccggaccgcgagaccgcgatcgcgcgcatgcgcgtggcgctgagcgagatggtggtggacggcatcaagaccaacatcccgctgcagcagcgcatcatgcgcgacaagggcttccaggccggtgggcagaacatccactacctggaaaagcgactggccgaacgcaagaacaagtcgatcgcgctggtctga

SEQ ID NO: 9583 - protein, 455 aa, Xanthomonas campestris pv. campestris str. ATCC 33913
MLDKVVIANRGEIALRILRACHTLGIRTVAVHSTVDRNLKHVAMADESVCIGPAASSDSYLNIPALIAAAEVTDAQAIHPGYGFLSENADFAERVEESGFIFIGPKADTIRLMGDKVEAIRAMKAAGVPCVPGSGGPLGDDIVANTKIAREIGYPVIIKAAGGGGGRGMRVVHSEAALKAAIETTKSEAKAAFSNDQVYMEKFLENPRHVEIQVLADGQGNAIHLGERDCSMQRRHQKVVEEAPAPGISEELRAEIGKVCVDACIRIGYRGAGTFEFLFEGGRFYFIEMNTRIQVEHPVTERITGIDLVCEQLRIAAGHKLSIKQSDIVLRGHAIECRINAEDPETFMPNPGLITAFHPPGGPGVRVDTHIYAGYKVPPNYDSMIGKLIVHGPDRETAIARMRVALSEMVVDGIKTNIPLQQRIMRDKGFQAGGQNIHYLEKRLAERKNKSIALV

SEQ ID NO: 9584 - DNA, 1368 bp, Xanthomonas axonopodis pv. citri str. 306
  CDS (1)..(1368): transl_table=11
atgctcgataaagtcgtcatcgccaaccgaggtgaaatcgcgctgcgcatcctgcgcgcgtgccacacgctcggcatccgcacggtcgcggtgcattccacggtcgaccgcaacctcaagcacgtggccatggccgatgagtcggtatgtatcggcccggccgcctccagcgacagttacctcaacatcccggcgttgatcgccgcggccgaggtgaccgatgcgcaggccatccaccccggctacggcttcctctcggaaaacgccgatttcgccgaacgcgtggagcaatccggcttcatcttcatcggccccaaggccgacaccattcgcctgatgggcgacaaggtggaagcgatccgcgccatgaaggctgccggcgtgccgtgcgtgcccggctcgggcggcccgctgggcgatgacatcgtcgccaacaccaaggtggcgcgcgaaatcggctacccggtgatcatcaaggccgccggcggcggcggtgggcgcggcatgcgcgtggtgcattcggaggcggcgctgaaggctgccatcgaaaccaccaagtccgaagccaaggccgctttcagcaacgatcaggtctacatggagaagttcctggaaaatccgcgccacgtggaaatccaggtccttgccgatggccagggcggtgcgatccatctgggcgaacgcgattgttcgatgcagcgtcgccaccagaaggtggtggaagaagcgccggcgccgggcatcaccgaagaactgcgcaacgagatcggcaaggtctgcgtggacgcctgcatccgcatcggctaccgcggcgccggcaccttcgagttcctgttcgagaacgggcgcttctacttcatcgaaatgaacacgcgcatccaggtggagcatccggtcaccgagcgcatcaccggcatcgacctggtgtgcgaacagctgcgcatcgccgccggccacaagctgagcatcaagcaaagcgacatcgtgctgcgcgggcatgcgatcgaatgccgcatcaatgccgaggacccggaaaccttcatgcccaacccgggcctgatcaccgccttccatccgccaggcggccctggcgtgcgcgtggatacccacatctacgcaggctacaaggtgccgccgaactacgattcgatgatcggcaagctgatcgtgcacggcccggatcgcgaaaccgcgattgcgcgcatgcgcgtggcgctgagcgagatggtggtggacggcatcaagaccaacatcccgctgcagcagcgcatcatgcgcgacaagggcttccaggccggtgggcagaacatccattacctggaaaagcgcctggccgagcgcaagaacaagtcgatcgtcctgacctga

SEQ ID NO: 9585 - protein, 455 aa, Xanthomonas axonopodis pv. citri str. 306
MLDKVVIANRGEIALRILRACHTLGIRTVAVHSTVDRNLKHVAMADESVCIGPAASSDSYLNIPALIAAAEVTDAQAIHPGYGFLSENADFAERVEQSGFIFIGPKADTIRLMGDKVEAIRAMKAAGVPCVPGSGGPLGDDIVANTKVAREIGYPVIIKAAGGGGGRGMRVVHSEAALKAAIETTKSEAKAAFSNDQVYMEKFLENPRHVEIQVLADGQGGAIHLGERDCSMQRRHQKVVEEAPAPGITEELRNEIGKVCVDACIRIGYRGAGTFEFLFENGRFYFIEMNTRIQVEHPVTERITGIDLVCEQLRIAAGHKLSIKQSDIVLRGHAIECRINAEDPETFMPNPGLITAFHPPGGPGVRVDTHIYAGYKVPPNYDSMIGKLIVHGPDRETAIARMRVALSEMVVDGIKTNIPLQQRIMRDKGFQAGGQNIHYLEKRLAERKNKSIVLT

SEQ ID NO: 9586 - DNA, 1362 bp, Staphylococcus aureus subsp. aureus MW2
  CDS (1)..(1362): transl_table=11
atgcttcgttgtttaattgcgaatagaggtgaaattgctgtaaggattataagagcttgcagagaatatgggattgaaactgtagcagtttatgcaaaaggggacgagcaaagcttgcatgtacatttagcagatcaagctatatgtattggggaagctaatgctttaggtagttatttaaatattgaccgcatcatatctgctgcacaaatcactggtgctaatgcaattcacccaggatatggctttttatcagaatcaacaaaatttgctcaaaccgttgaggaacaaggcatagcgtttatagggcctactaaaaaaacgatggaaatgatgggggataaaataacagcaagacaaacagttcatcatgcaggtgttcctgtgattccaggatcaaatggtgctgtgaaccatgtgtctgaaattgagaagcttgccaaagacatcggttatccagttgttatcaaagctgccagtggcggtggtggtaaaggtatacgtattgtaaagaaagctgaagatttagaaaaggcatttaaagaagctaaaagtgaaggaaaaaaatactttgatgatgatcgtgtttatgttgaggcttttatacctgttgcaaaacatgttgaagttcaagttatgggagatgggcaggataattttgtacatttaggggaacgtgattgttctgtacaacgtaaaaatcaaaaattaatcgaagaatctccttgtgcagcattaactgaagaaagacgacaacaaatatgtaacgatgctgttaaagttgcacgtgcagcaaattatagaagtgcaggtacgattgaatttttagtaactgataccgcacattactttattgaaatgaatgctcgaatacaagttgaacatactgttacagagatgcgagcagaacgtgatttggttgcagcacaattgtatttattggaacataatcatttacctttttcacaaagcgatattcaatttaatggtcatgtgatagaagcgagaataaatgccgaaaatcctgaaaagaaatttcaaccaacaccaggtaaagtgacagcgttacatttacctcaaggctttaatgtgcgagtcgattctttactatatcacggttatcaagtttcaccatattatgattctttagtagctaaagtaattgtaaaatctcatgatagagcttcagcaattgataagttgaaagccaccttagatgaaatggtgatagatggattttctacaactgccgattttttatatgcagttttaaattatccactatatcgtgatggagatgcaaaagatgttgatattaaatttttagaaaaacatcaaattgttaaaggggtggaattataa

SEQ ID NO: 9587 - protein, 453 aa, Staphylococcus aureus subsp. aureus MW2
MLRCLIANRGEIAVRIIRACREYGIETVAVYAKGDEQSLHVHLADQAICIGEANALGSYLNIDRIISAAQITGANAIHPGYGFLSESTKFAQTVEEQGIAFIGPTKKTMEMMGDKITARQTVHHAGVPVIPGSNGAVNHVSEIEKLAKDIGYPVVIKAASGGGGKGIRIVKKAEDLEKAFKEAKSEGKKYFDDDRVYVEAFIPVAKHVEVQVMGDGQDNFVHLGERDCSVQRKNQKLIEESPCAALTEERRQQICNDAVKVARAANYRSAGTIEFLVTDTAHYFIEMNARIQVEHTVTEMRAERDLVAAQLYLLEHNHLPFSQSDIQFNGHVIEARINAENPEKKFQPTPGKVTALHLPQGFNVRVDSLLYHGYQVSPYYDSLVAKVIVKSHDRASAIDKLKATLDEMVIDGFSTTADFLYAVLNYPLYRDGDAKDVDIKFLEKHQIVKGVEL

SEQ ID NO: 9588 - DNA, 2097 bp, Drosophila melanogaster
  CDS (1)..(2097)
atgtacgccagactgctgcgaaacttcggcgcaaacgccaggtgctttgcaacagaagccagcccaaaagttcggcctatcagcaagatccttatttcaaatcgtggtgagatcgcatgcagggtgattcgaaccgcacgcaagctgggagttcgtaccgtggccgtgttctcggatccggacgagaagagcatgcacacgcagttggcagacgagtcgtaccgcgtgggggaagctgcctcctcggcttcctatcttcgcggtgaacgcatcctggacatagccaagcgttcgggcgcccaggccatccacccaggctacggcttcctctccgagtccgtcgagtttgccgagttgtgccagcgtgagggcatcatcttcatgggtccgcccagttccgccatccgggacatggggattaagagcaccagcaaggccataatggccgctgctggggtgccgatcatcaatggataccatggcgatgatcagtcagatgagtgtttgcagcgagaagccgacaaaattggctttcccttgatgattaaagccgtccgcggcggcggaggcaaaggcatgagaatcgcagaaaaaccggacgacttcctcaccgctctgaactcagctcgcaccgagtccgagaagtcgtttggcgacagctctgtgcttctggagcggtacgtccgatctccacgccacgtagaggttcaagtatttgcggatcagtatggtgatgctgtctatctgtgggaaagagattgctccgtgcaaagacgtcatcaaaagattattgaagaggcgccagctccaggtttgtcggaagatttgcgtcgtgagctgggcgaggctgctgttcgtgcagcgaaagctgtgggctacgtaggagctggcaccgtggagttcattctagacaaagaagatctctctttccacttcatggaaatgaatacccgcctgcaggtggagcatcctataacggaaatgattacgggcaccgatttggttgaatggcagattcgcattgccgccggtgagccattacccctgaagcaatctgagattacgcggcgtggccacgcatttgaagctcgcatttatgcagaaaatcctcgcggaggctttctgcccggagccggacccctgcgatatttgtctactccccaaccatcaaacaacgttcgcgtggagacgggtgtccgagaaggagatgaggtgtctgtgcactacgaccccatgattgccaagctagtcgtttggggcgaaaaccgcacacaagcgcttaactcattggttgcccgcctgggtgaatatcatatatctggtctggacactaacattaatttcctcatcgaccttgcgtcgcatcctgagtttcagctggccaatgtgcacactggctttatcgatgagcagttcgatactctatttccgccaattatcatcagtccgcagcaagtcagccaagctgctttggcgctagtcttaaacgagttgcaggcagcctttaggaacggaaacaaagatcaggatccatttgttgccacccctaacgctcgtctgaattactctttggttcgcagatatgacttgaaagccaatgagaaggtctattctgtggctgtcaagtttgatggcgaggatatgcaaattcaggtggataatggcgactggcaggatgcaaaggtcgaaagagttcaggatggaagtcgtctaaaaattcgtgccaatatcaatagcaacgtcaccacatataatgctagtattgatggcactagtgtctctttgttttcggaaagtggcaaggtcgattttgaggtgggacagccgaaattcttaagtgcccagggcgatcaattgggtgcagttgggtctcgcatagtggctcccatgcccgggattttagagaaggtgctggtaaagcccggtgacaaggtcaagaagggcgaaaacttggcagtgcttattgccatgaaaatggaacacattctaaaagctccaaaggacgccaccattaagtctattggaggagccgcgggcgataacgttgctaagggagcggccgtgattacattcgtcgacgaggaagtagaaaagtaa

SEQ ID NO: 9589 - protein, 698 aa, Drosophila melanogaster
MYARLLRNFGANARCFATEASPKVRPISKILISNRGEIACRVIRTARKLGVRTVAVFSDPDEKSMHTQLADESYRVGEAASSASYLRGERILDIAKRSGAQAIHPGYGFLSESVEFAELCQREGIIFMGPPSSAIRDMGIKSTSKAIMAAAGVPIINGYHGDDQSDECLQREADKIGFPLMIKAVRGGGGKGMRIAEKPDDFLTALNSARTESEKSFGDSSVLLERYVRSPRHVEVQVFADQYGDAVYLWERDCSVQRRHQKIIEEAPAPGLSEDLRRELGEAAVRAAKAVGYVGAGTVEFILDKEDLSFHFMEMNTRLQVEHPITEMITGTDLVEWQIRIAAGEPLPLKQSEITRRGHAFEARIYAENPRGGFLPGAGPLRYLSTPQPSNNVRVETGVREGDEVSVHYDPMIAKLVVWGENRTQALNSLVARLGEYHISGLDTNINFLIDLASHPEFQLANVHTGFIDEQFDTLFPPIIISPQQVSQAALALVLNELQAAFRNGNKDQDPFVATPNARLNYSLVRRYDLKANEKVYSVAVKFDGEDMQIQVDNGDWQDAKVERVQDGSRLKIRANINSNVTTYNASIDGTSVSLFSESGKVDFEVGQPKFLSAQGDQLGAVGSRIVAPMPGILEKVLVKPGDKVKKGENLAVLIAMKMEHILKAPKDATIKSIGGAAGDNVAKGAAVITFVDEEVEK

SEQ ID NO: 9590 - DNA, 1350 bp, Yersinia pestis KIM
  CDS (1)..(1350): transl_table=11
atgcttgataaaatcgtaatcgctaaccgcggtgagattgcgctgcggatcctacgggcttgtaaggagctggggatcaagactgtcgccgttcactctgttgcggatcgtgacctgaaacacgtattactggctgacgagactgtttgtatcggtcctgcgccttcagttaaaagctatctgaacatcccggcaatcatttcggctgctgagatcaccggcgcagtggctgttcaccccggctatggtttcctgtctgaaaatgctgattttgccgaacaggtagagcgttccggtttcattttcattggcccacgagccgaaaccattcgcctgatgggcgataaagtttccgctattagcgcaatgaaaaaagccggtgtgccatgcgtacccggttctgatggcccattaagcgacgataccaccaagaacaaagcctttgccaaacgtatcggttatccggtcattatcaaggcatctggcggcggcggtggccgtggtatgcgtgtggttcgtcacgacaaagatctggaagaatccattaacatgacccgtgcggaagcgaaagctgctttcaataacgacatggtttatatggagaaataccttgagaacccgcgccatatcgaggttcagattttggctgatggtcagggtaatgctatctatctggccgaacgcgattgctctatgcagcgccgccaccagaaagtggttgaagaagcacctgcaccaggtatcaccagcgaaatgcgccgttatatcggtgagcgctgcgcgaaagcctgtatggaaatcggttatcgcggtgcaggtacctttgagttcttgtatgaaaacggtgagttctatttcattgaaatgaacacccgtattcaagttgaacacacggttaccgaaatgatcaccggtattgatttgatcaaagagcagctccgtatcgcggctggccaacctctctccatcaaacaagatgaagtgaaagtgcatggccacgctgttgaatgccgtattaacgccgaagatccaaataccttcctgccaagtccgggtaaaattacccgcttccatgcaccgggcggtttcggtgttcgttgggaatctcatatttacgcaggctatactgtgcctccgtattatgattccatgattggtaagctgatcacttacggtgaaaaccgtgacgtggcgattgctcgtatgaaaaatgccttggcagagctcattatcgatggcatcaaaaccaacgttgagttacagcaacgcattatgaatgacgaaaacttccagcacggtgggactaatatccactatctggagaaaaaactcgggttgcaagaaacctga

SEQ ID NO: 9591 - protein, 449 aa, Yersinia pestis KIM
MLDKIVIANRGEIALRILRACKELGIKTVAVHSVADRDLKHVLLADETVCIGPAPSVKSYLNIPAIISAAEITGAVAVHPGYGFLSENADFAEQVERSGFIFIGPRAETIRLMGDKVSAISAMKKAGVPCVPGSDGPLSDDTTKNKAFAKRIGYPVIIKASGGGGGRGMRVVRHDKDLEESINMTRAEAKAAFNNDMVYMEKYLENPRHIEVQILADGQGNAIYLAERDCSMQRRHQKVVEEAPAPGITSEMRRYIGERCAKACMEIGYRGAGTFEFLYENGEFYFIEMNTRIQVEHTVTEMITGIDLIKEQLRIAAGQPLSIKQDEVKVHGHAVECRINAEDPNTFLPSPGKITRFHAPGGFGVRWESHIYAGYTVPPYYDSMIGKLITYGENRDVAIARMKNALAELIIDGIKTNVELQQRIMNDENFQHGGTNIHYLEKKLGLQET

SEQ ID NO: 9592 - DNA, 1362 bp, Thermosynechococcus elongatus BP-1
  CDS (1)..(1362): transl_table=11
atggcctttaggaaaattttgattgccaatcgtggcgaaattgccctgcggattctgcgcacctgtgaggaactgggcattgcaacggttgctgtctattccacggtggatcgccatgcgctacacgtgcaattggccgatgaggcggtgtgcattggcgaagcccccagtagccgcagctatctcaatatccctaacattattgctgctgccctcacccgccatgtctcagcaattcaccctggctatggctttttggcggaaaatgcccgctttgccgagatctgcgccgatcacaaaattacatttattggtccgagtcccgctgccatgcgtgccatgggggataaatccaccgccaaagcaacaatgcaacgggtgggggtgccgacaattcccggcagtgatggactggtgcaggatgaggaaacggcgcgggcgatcgctcgtcaaattggctatcccctgatgatcaaagcgaccgctgggggagggggtcgcgggatgcgcttggtgcgttctgaggaggagctggggcgctcgttaagtgctgcccagggcgaagcggaagctgcctttggcaatgccggcgtctatctggagcgatttattgaaaatccccgccacattgaattccaaattctcgcggatagctatggcaatgtcattcacttaggggagcgcgattgctccgtccaaaggcgtcaccaaaagctccttgaggaagcccctagccctgccctcaccccggaactgcgcgccaagatgggggaagctgctgtcaccgctgccaaagccattaactatgtcggtgcgggcacaattgaatttctcctcgacggccaaaacaacttctactttatggagatgaatacccgcattcaggtggagcacacggtcacggaaatgattacgggtctcgatctgattgcggagcagattcgcattgctcagggggaacccctccgcttgacccaagagcaggttcagttgcagggacacgccattgagtgccgcatcaatgccgaagatccagagcgtaatttccgtccccatcccggtcgcattagtggctacttgcccccgggaggaccgggggtacgtatggattcccatgtctatactgactatgaaatccccccctactatgattccctcattgggaaattagttgtgtgggggagcgatcgccccgctgccattgcccgcatgaagcgtgccctccgggaatgtgcgattatgggggtgcccaccaccatccccttccatcagcaggtaatggacacaccggagttccgcagcggtattgtctataccaactttgtggataagctcatgactaccttgggctggaatgcttaa

SEQ ID NO: 9593 - protein, 453 aa, Thermosynechococcus elongatus BP-1
MAFRKILIANRGEIALRILRTCEELGIATVAVYSTVDRHALHVQLADEAVCIGEAPSSRSYLNIPNIIAAALTRHVSAIHPGYGFLAENARFAEICADHKITFIGPSPAAMRAMGDKSTAKATMQRVGVPTIPGSDGLVQDEETARAIARQIGYPLMIKATAGGGGRGMRLVRSEEELGRSLSAAQGEAEAAFGNAGVYLERFIENPRHIEFQILADSYGNVIHLGERDCSVQRRHQKLLEEAPSPALTPELRAKMGEAAVTAAKAINYVGAGTIEFLLDGQNNFYFMEMNTRIQVEHTVTEMITGLDLIAEQIRIAQGEPLRLTQEQVQLQGHAIECRINAEDPERNFRPHPGRISGYLPPGGPGVRMDSHVYTDYEIPPYYDSLIGKLVVWGSDRPAAIARMKRALRECAIMGVPTTIPFHQQVMDTPEFRSGIVYTNFVDKLMTTLGWNA

SEQ ID NO: 9594 - DNA, 1368 bp, Oceanobacillus iheyensis HTE831
  CDS (1)..(1368): transl_table=11
ttgattaagaagctattaatagctaatagaggggaaattgcggttcgtattattcgtgcttgtaaagaaatgaatatcgaaacggttgccatttactcagaagccgatagcgaatcccttcatgtacaattagccgatgaagcatactgtattgggcccaaattaagtaaagacagctacttaaacataacgaatataatgagtcttgccacactaaccgaagttgatgctatccatccagggtatggttttttagctgagaatgctgattttgctgagatatgcagagcttgtaatatcaccttcgttggccctactccaaaagcaattcaacaaatgggaataaaagatgttgcaaaagaaacaatgaaaaatgctaatgtacctgttgttccaggttctgaaggtattgtcgatacaactgaagatgctatcgaagtagctaatagtatcggttatcctgttatcatcaaagctactgctggtggcggcgggaaaggtattcgcgttgctcgcagcgaagaagagcttattaaaggaatggaaataactcaaaaagaagcagaaacagcttttggaaatccaggtgtatacctagagaaattcattgaggattttcgtcatgttgaaattcaaatacttgctgacactcacgggaatgtaatccatcttggagagagagattgctcgattcagcgtagactacagaaattgattgaagaatcaccttctcctgcacttaatgaatccattcgtgctaaaatgggagaagcctctgtaaaagcggctaaagccgtagaatatgttggtgctggtaccattgagtatattttcgatcgaaaaacgaatgagttctatttcatggaaatgaatactagaatacaagtagagcaccctgtaacagaaatggtaactggtgtagatttaattaaagaacaaattaatgttgcaaatggcgaaaagctatcagttaatcagtcagatataacgatggacgggtgggcaattgaatgtcggattaatgccgaaaatccataccaaaattttatgccatctgcgggtgagattgaaatgtatttaccacctggtggattaggagttcgtattgattctggtgcatatactggatatcgaattccaccatattatgattcgatgattgctaagctaataacatatgctccaacgagagaagaagcaattagcaagatgaagcgagcattagatgagtttgttgttgaaggagtctttacaacaattccttttcactaccaaattatgaatcaccaagtatttcaagaaggtgattttaatactaatttccttactgaatatccgattttgcaggacacagatgattccgaataa

SEQ ID NO: 9595 - protein, 455 aa, Oceanobacillus iheyensis HTE831
MIKKLLIANRGEIAVRIIRACKEMNIETVAIYSEADSESLHVQLADEAYCIGPKLSKDSYLNITNIMSLATLTEVDAIHPGYGFLAENADFAEICRACNITFVGPTPKAIQQMGIKDVAKETMKNANVPVVPGSEGIVDTTEDAIEVANSIGYPVIIKATAGGGGKGIRVARSEEELIKGMEITQKEAETAFGNPGVYLEKFIEDFRHVEIQILADTHGNVIHLGERDCSIQRRLQKLIEESPSPALNESIRAKMGEASVKAAKAVEYVGAGTIEYIFDRKTNEFYFMEMNTRIQVEHPVTEMVTGVDLIKEQINVANGEKLSVNQSDITMDGWAIECRINAENPYQNFMPSAGEIEMYLPPGGLGVRIDSGAYTGYRIPPYYDSMIAKLITYAPTREEAISKMKRALDEFVVEGVFTTIPFHYQIMNHQVFQEGDFNTNFLTEYPILQDTDDSE

SEQ ID NO: 9596 - DNA, 2022 bp, Brucella suis 1330
  CDS (1)..(2022): transl_table=11
atgaggaaaagtgtgaagcggttttccgcccgcatcccgcgaggaaaaaatgcgatgtttcagaaaatactgattgccaatcgcggagaaatcgcctgccgggtcattcgcacggcgcgcaagcttggcattgccacggtggcgatttattccgatgcggatgcacgggcgttgcatgtggaaatggccgacgaggcggtgcgtgtcggcccggctgcatccgcgcaaagctatctgaacgtcgatgcgatcatcaaagccgcgaaggaaacaggcgcggaggcgatccatccgggctatggcttcctttcggaaaacccggctttcgtggatgcggtcgaagaagcgggcctcatcttcatcggcccatcggccaaggccatccgcgccatggggctgaaggatgccgccaaggcgctgatggaaaaggcaggcgtgccggtcgtgccgggctatcacggcgacaatcaggatggcgcctttctcaaaagcgaggcggaccggatcacctatcccgtcctcatcaaggcgcgggctggcggcggcggcaagggcatgcgccgggtcgatagcgctgccgattttgctgcggcgctggaaagtgcccggcgcgaggcggaagcctcgttcggcgatggcgcggtgctggtcgaaaaatatatggcgaaaccgcgccatatcgaagtgcaggtctttggcgataatcacggcaatgccgtgcatctgttcgagcgcgattgctcactgcaacgccgccaccagaaggtgatcgaagaagcgccagcgcccggcatgacggaagaaatgcgcgccgccatgggcgaagcggcggtgaaggcggccttgaccattggctattccggcgcgggcacggtggaattcatcgccgatgtgtcggagggcctcaggcccgaccgcttcttcttcatggaaatgaacacgcgcttgcaggtggaacatccggtgacggaagcaatcaccggccgcgaccttgtcgaatggcaattgcgtgtggcctccggcgaagcgctgccgaagcgtcaggacgaactgtccataaacggctgggctttcgaggcgcggctttatgcggaagacccggcgcgcgatttcctgcccgcgaccggcaagcttgcgctctttgtcccgcctgaaaatgcgcgtgtcgattccggcgtgcgcaccggcgatacgatcacgccgttctacgatcccatgatcgccaagatcatcacgcatggagccacgcgcgacgaggcgctgaaccggctggacgcggccctgaacaagacccgcattgccgggcttgtcaccaatcgtcagttcctgtcggcgctctgtaatctcgaagctttccgcaccggcgatgtcgataccgggctgatcgggcgcgagacggcggcgcttttcaccgatgcacagccttcggacatcgcctttgcgctggccgcacttggcgcactcgatcttctggatgcgccagaaaaaagcgatccatggtcgggcctgcgtgggttccgcctgtggggcgaggcatcgcgctcggttctcatcgagcatcatggcgagcgccgcacggtcagcttcacggccaggggcgacaggcatttcggctttgctttcggcaccatggacattcgcgcgcacaagaacggactggttcgctttgccattgatggtcgcgtgtcggaagcatcggtctcacgcatcgggcatgacgtgacggtgcaaatcgaagggcacgacaccatattccatcatgtgctggcgacaggcgcggaggaggatgcctccagcgaaagccgcatcctgtcgccgatgccggggctggtgcggctggtttccgtcgtggaaggtgcgagcgtcgccaagggcgatccgctggtgacgatggaagccatgaagatggaactgtcactgaccgcgccgcgcgatggcaaggttgcctccgtgacagttgcggcaggcgatcaggtcaatgaaggcgcattgctagtcgagctggaggagcaacatggctga

SEQ ID NO: 9597 - protein, 673 aa, Brucella suis 1330
MRKSVKRFSARIPRGKNAMFQKILIANRGEIACRVIRTARKLGIATVAIYSDADARALHVEMADEAVRVGPAASAQSYLNVDAIIKAAKETGAEAIHPGYGFLSENPAFVDAVEEAGLIFIGPSAKAIRAMGLKDAAKALMEKAGVPVVPGYHGDNQDGAFLKSEADRITYPVLIKARAGGGGKGMRRVDSAADFAAALESARREAEASFGDGAVLVEKYMAKPRHIEVQVFGDNHGNAVHLFERDCSLQRRHQKVIEEAPAPGMTEEMRAAMGEAAVKAALTIGYSGAGTVEFIADVSEGLRPDRFFFMEMNTRLQVEHPVTEAITGRDLVEWQLRVASGEALPKRQDELSINGWAFEARLYAEDPARDFLPATGKLALFVPPENARVDSGVRTGDTITPFYDPMIAKIITHGATRDEALNRLDAALNKTRIAGLVTNRQFLSALCNLEAFRTGDVDTGLIGRETAALFTDAQPSDIAFALAALGALDLLDAPEKSDPWSGLRGFRLWGEASRSVLIEHHGERRTVSFTARGDRHFGFAFGTMDIRAHKNGLVRFAIDGRVSEASVSRIGHDVTVQIEGHDTIFHHVLATGAEEDASSESRILSPMPGLVRLVSVVEGASVAKGDPLVTMEAMKMELSLTAPRDGKVASVTVAAGDQVNEGALLVELEEQHG

SEQ ID NO: 9598 - DNA, 1350 bp, Shigella flexneri 2a str. 301
  CDS (1)..(1350): transl_table=11
atgctggataaaattgttattgccaaccgcggcgagattgcattgcgtattcttcgtgcctgtaaagaactgggcatcaagactgtcgctgtgcactccagcacggatcgcgatctaaaacacgtattactggcagatgaaacggtctgtattggccctgctccgtcagtaaaaagttatctgaacatcccggcaatcatcagcgccgctgaaatcaccggcgcagtagcaatccatccgggttacggcttcctctccgagaacgccaactttgccgagcaggttgaacgctccggctttatcttcatcggcccgaaagcagaaaccattcgcctgatgggcgacaaagtatccgcaatcgcggcgatgaaaaaagcgggcgttccttgcgtacctggttctgacggcccgctgggcgacgatatggataaaaaccgcgccattgctaaacgcattggttatccggtgattatcaaagcctccggcggcggcggttgtcgcggtatgcgcgtagtgcgcggcgacgctgaactggcacaatccatctccatgacccgtgcggaagcgaaagctgctttcagcaacgatatggtttacatggagaaatacctggagaatcctcgccacgtcgagattcaggtactggctgacggtcagggcaacgctatctatctggcggaacgtgactgctccatgcagcgccgccaccagaaagtggtcgaagaagcaccagcaccgggcattaccccggaactgcgtcgctacatcggcgaacgttgcgctaaagcgtgtgttgatatcggctatcgcggtgcaggtactttcgagttcctgttcgaaaacggcgagttctatttcatcgaaatgaacacccgtattcaggtagaacacccggttacagaaatgatcaccggcgttgacctgatcaaagaacagctgcgtatcgctgccggtcaaccgctgtcgatcaagcaagaagaagttcacgttcgcggccatgcggtggaatgtcgtatcaacgccgaagatccgaacaccttcctgccaagcccaggcaaaatcacccgtttccacgcacctggcggttttggcgtacgttgggagtctcatatctacgcgggctacaccgtaccgccgtactatgactcaatgatcggtaagctgatttgctacggtgaaaaccgtgacgtggcgattgcccgcatgaagaatgcgctgcaggagctgatcatcgacggtatcaaaaccaacgttgatctgcagatccgcatcatgaatgacgagaacttccagcatggtggcactaacatccactatctggagaaaaaactcggtcttcaggaaaaataa

SEQ ID NO: 9599 - protein, 449 aa, Shigella flexneri 2a str. 301
MLDKIVIANRGEIALRILRACKELGIKTVAVHSSTDRDLKHVLLADETVCIGPAPSVKSYLNIPAIISAAEITGAVAIHPGYGFLSENANFAEQVERSGFIFIGPKAETIRLMGDKVSAIAAMKKAGVPCVPGSDGPLGDDMDKNRAIAKRIGYPVIIKASGGGGCRGMRVVRGDAELAQSISMTRAEAKAAFSNDMVYMEKYLENPRHVEIQVLADGQGNAIYLAERDCSMQRRHQKVVEEAPAPGITPELRRYIGERCAKACVDIGYRGAGTFEFLFENGEFYFIEMNTRIQVEHPVTEMITGVDLIKEQLRIAAGQPLSIKQEEVHVRGHAVECRINAEDPNTFLPSPGKITRFHAPGGFGVRWESHIYAGYTVPPYYDSMIGKLICYGENRDVAIARMKNALQELIIDGIKTNVDLQIRIMNDENFQHGGTNIHYLEKKLGLQEK

SEQ ID NO: 9600 - DNA, 1464 bp, Leptospira interrogans serovar Lai str. 56601
  CDS (1)..(1464): transl_table=11
ttgatttctaaacttctgattgcgaaccgtggagaaattgcggttcgagtgatccgtacttgtaaaaagctgggaatcaaaaccgttgcgatttattcggatgcggatagagattctccacacgtaaaacttgcggacgaatcagtatatgtaggagagcctagtcctgcttcttcttatttaaatatttctaatattctcgaagcgattaaaaagacaaagacggatgcggttcatccaggttatggatttttatcggaaaaaagtgaatttgcaaaagcattagaaaaagagaatgtgttatttttaggtcctagtccggaatcgatggaactcatgggggataagatcaattccaggattaaaatggaagcgtctggagttccggttgttccaggttacaacggacaaaatcaggatcctaaaatacttcaaaaggaagccgagaaaatcggttatcctttgatgattaaggcgaccgccggaggaggtggaaagggaatgaaacgggtttataaatccgaagaatttcttttcgcacttgaatcggcgcaaagagaagcgcaaaaagcttttggagatgggaccgtttttttagaaaaatacgtagaaactcctaggcatattgaagtgcaggtttttggagataaacacggaaacgttatgcatctttttgaacgagaatgttcgattcaaagaagacaccaaaaggtaattgaagaatctcctgctccaaatttgccaatttctcttcgggatgaaatttgtagggtagctgttaaagccgcacagtctattggttatgtgggagcaggaaccgtagaatttattttaggaaaagataataagttttattttctagaaatgaacacaaggcttcaagtggaacatccggtaacggaatatattaccggtcaggatcttgtagaatggcagatccaagtggcggaaggcaaaaaactttccgaactcacaaaaggaaaaaccgtcattcaaaatggacatgcaattgaagctcgtatctatgcggaagatcctgaaaataactttttaccttctacgggtatattagaatatattgaatttccggatcgtgagtttttacgtgtagatactggggtggaaactggttctgagattacagtttattacgatcctatgatcgctaagatgatcgcttggggaaaaaccagagaagagtgtactgctcgtcttaaagaatctatagattcgacagtgatcttcggacctgtaaccaataccttttatttatctggaattctttctcatgaagaatttaaaaaagggaatacccatactcattttttggaagaacaaacgattttatttactcctgaaaaggacgttcaagcagatgcgttttcctttgcggcagctgcactttctgaaaagaaaaaatcccagggaatttgggaggcggtaggtccgggaggtttctggtga

SEQ ID NO: 9601 - protein, 487 aa, Leptospira interrogans serovar Lai str. 56601
MISKLLIANRGEIAVRVIRTCKKLGIKTVAIYSDADRDSPHVKLADESVYVGEPSPASSYLNISNILEAIKKTKTDAVHPGYGFLSEKSEFAKALEKENVLFLGPSPESMELMGDKINSRIKMEASGVPVVPGYNGQNQDPKILQKEAEKIGYPLMIKATAGGGGKGMKRVYKSEEFLFALESAQREAQKAFGDGTVFLEKYVETPRHIEVQVFGDKHGNVMHLFERECSIQRRHQKVIEESPAPNLPISLRDEICRVAVKAAQSIGYVGAGTVEFILGKDNKFYFLEMNTRLQVEHPVTEYITGQDLVEWQIQVAEGKKLSELTKGKTVIQNGHAIEARIYAEDPENNFLPSTGILEYIEFPDREFLRVDTGVETGSEITVYYDPMIAKMIAWGKTREECTARLKESIDSTVIFGPVTNTFYLSGILSHEEFKKGNTHTHFLEEQTILFTPEKDVQADAFSFAAAALSEKKKSQGIWEAVGPGGFW

SEQ ID NO: 9602 - DNA, 2085 bp, Shewanella oneidensis MR-1
  CDS (1)..(2085): transl_table=11
atgttgaccaagcagatgttgactaacagcatgttcactaagcttttaattgctaaccgtggtgaaattgcctgccgcattatcaaaaccgcgcaggccatgggcgttcgcaccgttgctttatattccgatgccgataaaaacgcgcgccatgttgccatggctgacgaatcgttttacttaggtggcagcgccccagcagattcttacctcaagggcgacttgattattgcaatcgccaaaaaagctcaggcgcaagccattcacccaggttatggcttcttatcggaaaacgccgactttgcccgcaagtgtgaggcggccggaatcgtgtttgttggcccgggcagcgatgccatcgatgccatgggcagcaagagcgcggccaaagccattatgacggcggcgcaagtgcctttagtgccaggttaccatggtgacgatcaaaccgatgccaccctcaaggccgaagccttaaaaatcggtttcccgatgctgattaaagccgcctacggtggcggtggcaaaggtatgcgtatcgttgagcatgaaggcgaaatcatggacgccatcaactctgcgcgccgtgaagcggcctcctccttcggtaacgataagttattgatggagcgttatttacgccagcctcgccatgtcgaagtccaagtgtttgccgatacctttggcaatgcaatttacttatcggatcgcgactgctcgattcaacgccgccatcaaaaagtggtcgaagaagcgccagccccaggtttaagtgatgagctgcgcgcccaaatgggtgaagctgccgtagccgccgccaaggctatcgattatgttggcgcgggaaccattgaattcctgttagataccgacaatagcttctactttatggagatgaatactcgtctgcaggtagaacacccagtgaccgaaatggtgactggccaagacttagtcaaatggcagttgatggtcgccagtggtcagcctttaccgctcaaacaggacgaagtgcgtatccacggccacgcctttgaggtacgtatttatgccgaagatccgcaaaatgagtttttacccgccagcggtaagctcaatttcctgcgcgagcccgagcaaagcaaatacgtgcgtattgattccggcatccgtgaaaacgatgtgatcagtaacttttatgatccgatgatcgccaaactgattgtgtgggatgagtcgcgtccacgtgcgctgcaacgcctagtgcatgccctcgagtcctatcaaatcagtgggcttaaacacaatattgaatttttggccaatattgccgagcatcccgcctttgccaaggccgactttagcaccgactttatcaaccgttacggcgatgcgctgattggcagtgcttcgagcgaagccgacactgcgcttgcctttgccgcgctgtatcaagtgcttgcccgtaaagaagccgccaaggcacaggcgattaatagcgccgatccagactcgccttggggccaagtcagtggctttagactcaacagtgtcagccagcattctattgctctgctcgacgatgcccacgagttacaacaattggtattgttagactttggcgatcactatcaactatcacataatcgatcgtcacagcatcaattatcccaatccgcagccgatggccaagtgagtaaatccctaagtggtgagcttaagcaggatttactgttagccgaaatcaacggccataagagtaaagtgcctgtcagcgctcagggcgatgattttacgctgtttttaccatcaggcagttatcacttcagggcggttaaaacccaagtggttgaggcagaatcgagcaatgaagataagctcaaggcaccgatgaacggcactgtcgtgactcacttggtcgatgttggtgcagaggttaaggcgggacaagggctactggtgatggaagcgatgaagatggaatacaccattgaagcccccttcgacggtatcgttaccgagttctactttaaggcaggtgagcttgtgagtgatggcgccgtgctgctccatgttgagcccaaagcccagagcgaggaagcctaa

SEQ ID NO: 9603 - protein, 694 aa, Shewanella oneidensis MR-1
MLTKQMLTNSMFTKLLIANRGEIACRIIKTAQAMGVRTVALYSDADKNARHVAMADESFYLGGSAPADSYLKGDLIIAIAKKAQAQAIHPGYGFLSENADFARKCEAAGIVFVGPGSDAIDAMGSKSAAKAIMTAAQVPLVPGYHGDDQTDATLKAEALKIGFPMLIKAAYGGGGKGMRIVEHEGEIMDAINSARREAASSFGNDKLLMERYLRQPRHVEVQVFADTFGNAIYLSDRDCSIQRRHQKVVEEAPAPGLSDELRAQMGEAAVAAAKAIDYVGAGTIEFLLDTDNSFYFMEMNTRLQVEHPVTEMVTGQDLVKWQLMVASGQPLPLKQDEVRIHGHAFEVRIYAEDPQNEFLPASGKLNFLREPEQSKYVRIDSGIRENDVISNFYDPMIAKLIVWDESRPRALQRLVHALESYQISGLKHNIEFLANIAEHPAFAKADFSTDFINRYGDALIGSASSEADTALAFAALYQVLARKEAAKAQAINSADPDSPWGQVSGFRLNSVSQHSIALLDDAHELQQLVLLDFGDHYQLSHNRSSQHQLSQSAADGQVSKSLSGELKQDLLLAEINGHKSKVPVSAQGDDFTLFLPSGSYHFRAVKTQVVEAESSNEDKLKAPMNGTVVTHLVDVGAEVKAGQGLLVMEAMKMEYTIEAPFDGIVTEFYFKAGELVSDGAVLLHVEPKAQSEEA

SEQ ID NO: 9604 - DNA, 1953 bp, Pseudomonas putida KT2440
  CDS (1)..(1953): transl_table=11
atgagccgccccgctttgaccaccctgctggtcgccaaccgcggcgaaatcgcctgccgggtgatgcgcaccgccaaggccatgggcctgaccactgtcgccgtgcacagcgccaccgaccgtgacgcccgtcacagccgcgaagccgacatccgcgtcgacctgggcggcaccaaggctgccgaaagctacctgctggtcgacaagctgctggccgcagccaaggccagcggcgcccaggccattcacccaggttatggctttctgtctgagaacgcaggtttcgcccgcgccatcgagcaggccgggctgatcttcctcggcccaccggccagcgccatcgacgccatgggcagcaaatcggcagccaaggcgctgatggaagcggccggcgtgccgttggtgccgggctaccacggcgaggcccaggacctggacaccttccgcgctgcggccgaacgcatcggctacccggtgctgctcaaggccagcgcgggaggcggtggcaagggcatgaaagtggtcgaggaagaaagccaactggccgacgccctggcctcggcccagcgtgaggcacagtcgtcgttcggcgatgcgcgcatgctggtggaaaagtacgtgctcaagccacgccacgtggagattcaggtgttcgccgatcagcacggcaactgcctgtacctcaacgaacgcgactgttccattcagcgccgccatcagaaggtggtggaagaggcccctgcccccggcctgtcgcccgaactgcgccgggccatgggcgaagcggcggtgcgtgccgcccaggctatcggttacgtgggtgccggcacggtggagtttctgcttgatgcccgcggcgaattcttcttcatggagatgaacactcgcctgcaagtggaacacccggtcaccgaggccataaccggcctggaccttgttgcctggcaaattcgcgtggcctgcggcgaagccctgccgatcacacaggaacaggtaccgctgatcggccatgccatcgaagtacgcctgtatgccgaagacccggccaacgattttttacccgcgaccggcaaattagcgctgtaccgtgaatcggcacctggcgaaggccggcgggtggacagtggggtcagcgaaggcgatgtggtgtcgccgttctacgacccgatgctgggcaagctgatcgcctggggcgaagaccgcgagcaggcgcgtttgcgcttgctggccatgctcgatgagttcgccattggcgggctgaaaaccaacattgccttcctgcggcgcattctcgcccacccggcatttgctgcagcggagttggatactggcttcattccccgccaccaggatgtgctgctgccggcgccacgtgcgctgccggctgccttttgggaggcggcagccgaagcctggctgcagggccaggcggggcatcagcgcgaagacgatcgccattcgccgtggagcgggagtaatggcctgcgcttgggcctaccggcacgcagcagcttgcatctggtgagcgctgggcaagatcaggcagtggccctggaacgcagcgctgcttctacctggcagctgcaaggtgagcagttggtgcatgaccagaacggcgtgcgtcgccagcatctggcaatccgtcgcggtggcacgctgtacctgcactgggagggcgaaatgcatgccatcgaagctttcgacccgattgccgaggccgaagccagccacagccatcagggtgggctgggtgcgcccatgaacggcagtatcgtgcgggtgctggtcgaacctggccaggtggtggaagccggtactgcgctgttggtactggaggccatgaagatggagcacagcattcgtgcgccgcatgccggcacggtgaaggcgctgttttgcctggagggggatatggtcagcgaagggactgtgctggtcgaactggtggaataa

SEQ ID NO: 9605 - protein, 650 aa, Pseudomonas putida KT2440
MSRPALTTLLVANRGEIACRVMRTAKAMGLTTVAVHSATDRDARHSREADIRVDLGGTKAAESYLLVDKLLAAAKASGAQAIHPGYGFLSENAGFARAIEQAGLIFLGPPASAIDAMGSKSAAKALMEAAGVPLVPGYHGEAQDLDTFRAAAERIGYPVLLKASAGGGGKGMKVVEEESQLADALASAQREAQSSFGDARMLVEKYVLKPRHVEIQVFADQHGNCLYLNERDCSIQRRHQKVVEEAPAPGLSPELRRAMGEAAVRAAQAIGYVGAGTVEFLLDARGEFFFMEMNTRLQVEHPVTEAITGLDLVAWQIRVACGEALPITQEQVPLIGHAIEVRLYAEDPANDFLPATGKLALYRESAPGEGRRVDSGVSEGDVVSPFYDPMLGKLIAWGEDREQARLRLLAMLDEFAIGGLKTNIAFLRRILAHPAFAAAELDTGFIPRHQDVLLPAPRALPAAFWEAAAEAWLQGQAGHQREDDRHSPWSGSNGLRLGLPARSSLHLVSAGQDQAVALERSAASTWQLQGEQLVHDQNGVRRQHLAIRRGGTLYLHWEGEMHAIEAFDPIAEAEASHSHQGGLGAPMNGSIVRVLVEPGQVVEAGTALLVLEAMKMEHSIRAPHAGTVKALFCLEGDMVSEGTVLVELVE

SEQ ID NO: 9606 - DNA, 1359 bp, Staphylococcus epidermidis ATCC 12228
  CDS (1)..(1359): transl_table=11
atgtatcgatgtttgattgcaaatagaggcgaaatagcagtaagaattataagagcttgtagagagcttaacatagagacagttgccatttatgcaaaaggtgatgaaaatagcttacatgtaagtttagccgatcaagcaatatgcataggtgaagcaaatccattagacagttatttaaatattgatcgtattatatctgctgcaaaagttacagaatcaaacgtaattcaccctggctatggtttcttatcggaatctacgaattttgcgaaagccgttgaagacaatcatatacattttattggacctagtaagacaactatggaaatgatgggggataaaattactgccagacaaactgttaaacaagcaggagtacctgttataccaggttctaatgatgctgttcaaagtgtagatgaaattaaattattatccaaagaaataggatttccagttgtactaaaagcagctagtggtggtggtgggaaaggcatcagaattgttaaagaagcatctcatttggatcaggctttgaaagaagctaaaagtgaaggacaaaaatattttaatgatgatcgagtgtatgtagaggcgttcataccagtagcaaaacatgtagaagtgcagattatcggagacggtaaaaataactatgttcacttaggtgaacgcgattgttctgttcaacgaaagaatcaaaaattaatagaagaagcgccttgtgctgcattaactgaagaaagaagaacaagaatatgtggcgacgcagttaaagtagctcaagcttcaagatatcgtagtgctggaacaatagaatttttagttacagaagatgcacattattttattgaaatgaatgctcgtattcaagttgaacatacagttacagaaatgcgtgctgatagagacctattacaagctcagttatatttattaacacacggtgaattaccattcactcagaaagatattttatttaatggtcatgtaattgaggcgcgtataaatgctgaaaatcctgaaaaaaactttttacccactccaggaaaagttaataaattacacttaccacaaggatttaatatacgtgtagattctttactttacacaggttatcaggtttctccttattatgattcacttgtagctaaagtgattgtaaaggattctaatagacaaactgctattaataaattaaaagttgcgttagatgaaatggtcatcgaaggttttactactacagctgactttttatatgcggttttaaattatccaatatatgcaaaaggcgatgccagtaaagtagatataaaatttcttgaaaaacatcaaatcattaaagaggtgaaatga

SEQ ID NO: 9607 - protein, 452 aa, Staphylococcus epidermidis ATCC 12228
MYRCLIANRGEIAVRIIRACRELNIETVAIYAKGDENSLHVSLADQAICIGEANPLDSYLNIDRIISAAKVTESNVIHPGYGFLSESTNFAKAVEDNHIHFIGPSKTTMEMMGDKITARQTVKQAGVPVIPGSNDAVQSVDEIKLLSKEIGFPVVLKAASGGGGKGIRIVKEASHLDQALKEAKSEGQKYFNDDRVYVEAFIPVAKHVEVQIIGDGKNNYVHLGERDCSVQRKNQKLIEEAPCAALTEERRTRICGDAVKVAQASRYRSAGTIEFLVTEDAHYFIEMNARIQVEHTVTEMRADRDLLQAQLYLLTHGELPFTQKDILFNGHVIEARINAENPEKNFLPTPGKVNKLHLPQGFNIRVDSLLYTGYQVSPYYDSLVAKVIVKDSNRQTAINKLKVALDEMVIEGFTTTADFLYAVLNYPIYAKGDASKVDIKFLEKHQIIKEVK

SEQ ID NO: 9608 - DNA, 1368 bp, Xylella fastidiosa Temecula1
  CDS (1)..(1368): transl_table=11
atgttagacaaagtcgttattgccaaccgtggtgagatcgcgttgcgtattcttcgcgcatgccacacgttgggtatccgcacggttgcggtgcactctaccgttgatcgtaatctgaagcatgtcgcgatggctgatgagtcggtgtgtattggtcctgcaccatcggcggagagttatctcaatattccggcgctgattgccgccgctgaggtcacggatgctcaggccatccaccctggctatggttttttgtcggaaaacgctagttttgctgaacgtgtggaacagtcgggcttcattttcattgggccacgggcagagacgattcgtttaatgggcgacaaggtgcaggctatccatgcgatgaaagcggctggtgtgccgtgtgtccctggttcggatggtccattgggtgatgacattgtcgctaacgtcaaaattgcacgtgagatcggttatccggtcatcattaaggcttccggcggaggcggtggacgcgggatgcgtgtggtacataccgaggccggtttagaggcggctatcgagaccacgcagtgtgaagctaaagccgcttttggcaatggccaggtgtatatggaaaagtttctggagaatccgcgtcacgtggagattcaggtgctcgccgatggtcaggggaacgcgatccatttgggggagcgggattgttcgatgcaacgccgccatcagaaggtggtggaggaagcccccgcacccggtatcactgaggcgctgcgcaatgaaatcggtcaggtgtgtgtagatgcctgtattcgtatcggttaccgcggtgctgggacgtttgaatttctgttcgagaatggtcgtttttacttcatcgagatgaatacgcgcatccaggtagagcatccggtgacggagcgtatcactggtattgacttggtatgcgagcagttgcgtattgccgctggtcagccattgagtatcaagcagagcgatgtggtgttgcgtggccatgcgatcgaatgccgtatcaatgctgaggatgcggagacgttcttgcccaatccgggtttgattactgcgttccatccaccaggtggtccgggtgtgcgtatggatacgcatatctacagtggttacaaggtgccgccgaactatgattcgatgatcggcaagcttatcgtgcatggtccggaccgtgagacggcgattgcgcgcatgcatttggcgctgagcgaaatggtcgtggatgggatcaagaccaatatcccattgcagcagcgcattatgtgcgataagggtttccagtccggtggacagaacatccattatttggagaagtgtttggcggagcgtaagaaccaaacgatcgggcggacctga

SEQ ID NO: 9609 - protein, 455 aa, Xylella fastidiosa Temecula1
MLDKVVIANRGEIALRILRACHTLGIRTVAVHSTVDRNLKHVAMADESVCIGPAPSAESYLNIPALIAAAEVTDAQAIHPGYGFLSENASFAERVEQSGFIFIGPRAETIRLMGDKVQAIHAMKAAGVPCVPGSDGPLGDDIVANVKIAREIGYPVIIKASGGGGGRGMRVVHTEAGLEAAIETTQCEAKAAFGNGQVYMEKFLENPRHVEIQVLADGQGNAIHLGERDCSMQRRHQKVVEEAPAPGITEALRNEIGQVCVDACIRIGYRGAGTFEFLFENGRFYFIEMNTRIQVEHPVTERITGIDLVCEQLRIAAGQPLSIKQSDVVLRGHAIECRINAEDAETFLPNPGLITAFHPPGGPGVRMDTHIYSGYKVPPNYDSMIGKLIVHGPDRETAIARMHLALSEMVVDGIKTNIPLQQRIMCDKGFQSGGQNIHYLEKCLAERKNQTIGRT

SEQ ID NO: 9610 - DNA, 1341 bp, Clostridium tetani E88
  CDS (1)..(1341): transl_table=11
atgtttaaaaaaatattaatagccaatagaggagaaatagcggtacgaattataagagcatgtagagaaatggggatagaaactgtagctgtatattctgaaatggatagggaaagtcttcatgttgagatggcagatgaagctatatgtataggaccagcttcttcaaaagatagttatttaaatataaaaaatatattaagtgctacagttttaactggtgcagaagctatacatccaggctttgggtttctatctgaaaatagtaaatttgctaatatgtgtagagaatgcaatatagtatttataggacctgactcagaaataatagagaaaatgggtaataagtctaatgccagaagaattatggaggaagcaggagtagctgttgtgtcaggatcaaaaaagccaatagagagaagtgaagaggctttagaattagcagaaaagataggatatccagttataataaaagcttcagctggtggaggaggaaggggaatccgaatagttaaagagaatgaagagcttatagaagctatagatacagcgaaaaaggaagcactttcggcttttggagatgacagtatgtatatggaaaaatatattgaatgtccaaagcatgtagaaatacaaatattaggagataactatggaaatatagtgtatttaggagaacgggattgttctatacaaagaagaaatcaaaaaattttagaagaagctccatgtacggtaataacacaggaactaagagaaaaaatgggagatgctgcagtaagagcagctaagtatgtaggatataagaatgctggaaccattgaatttctattggataagagtaataatttttatttcatggaaatgaatacaaggattcaggtggagcatcctataacagagtttattactggagtagatttaataaaagagcaaataaaaattgcagctggaatgaaattaagtttttctcagaaagatataaaaatacaaggacactctattgagtgtagaattaatgcagaagatactttaaataattttatgccttgtcctggtaggataagtggattatttgtaccaggaggattaggagttagagtagatagtaatatatatgatggatatactattccacctacttatgattctatgatagcaaaattaatagttcatggtagagataggcaagaagctataaataaaatgaaaagagctttaggagagtttttaatagatggtataaaaaccaatatagattaccatatgggtatattgaataatgagaaatttatatctggtgattatgatacaggatttataggtagaggccataaatag

SEQ ID NO: 9611 - protein, 446 aa, Clostridium tetani E88
MFKKILIANRGEIAVRIIRACREMGIETVAVYSEMDRESLHVEMADEAICIGPASSKDSYLNIKNILSATVLTGAEAIHPGFGFLSENSKFANMCRECNIVFIGPDSEIIEKMGNKSNARRIMEEAGVAVVSGSKKPIERSEEALELAEKIGYPVIIKASAGGGGRGIRIVKENEELIEAIDTAKKEALSAFGDDSMYMEKYIECPKHVEIQILGDNYGNIVYLGERDCSIQRRNQKILEEAPCTVITQELREKMGDAAVRAAKYVGYKNAGTIEFLLDKSNNFYFMEMNTRIQVEHPITEFITGVDLIKEQIKIAAGMKLSFSQKDIKIQGHSIECRINAEDTLNNFMPCPGRISGLFVPGGLGVRVDSNIYDGYTIPPTYDSMIAKLIVHGRDRQEAINKMKRALGEFLIDGIKTNIDYHMGILNNEKFISGDYDTGFIGRGHK

SEQ ID NO: 9612 - DNA, 1389 bp, Lactobacillus plantarum WCFS1
  CDS (1)..(1389): transl_table=11
ttgtttaaaaaagtcttagtcgcgaaccgtggtgaaattgcggtccaagttattcgcgcgcttcatgagatggggattaaagcggtcgctgtctattcagtggctgatcaggagagcttatttgtacatctggctgatgaggcggtctgtattggggcgagtcccgtcaaccagtcatatttgaatatgcaagcaattattagcgctgctaatttgaccgggtgtcaggcgattcatccaggctacggctttttatctgagaatgcggaatttgccaaaatgtgtgcggattgtcagttaacgtttattggaccgcgtcctgaggtgattgaccagatgggtgacaaagaaaatgcccggcagaccatgcaacgattaggcgtacccgtgattcccggcagtccatcggtgcttaaggatgttgaggcggctatgcaagctgcccataccttaggttacccagttatgatcaaagccgctgctgggggtggcggtaaggggattcgcgcggttagtaatgatcaagatttagcgaaggcttttcgaaccgctcagcaggaagctcaagcttcatacgatgatcatcggttgtacttagaaaaaatcattgccccggcgaagcatatcgaagtgcaggtcttagccgatcaacaggggcatgttatttatctaccagagcgcgattgttcgctacaacggaatcatcaaaaagtgttagaggaaagtccatgtgcggtcatcacgactgctgaacggaccgaattgggacaattagtggctgacgcaaccaaaaagttgggttatacaaatacgggtacctatgagtttttaatggatcagcagcatcatttttattttttggaaatgaatacgcggttgcaagttgaacatacggttactgaaatggtaacgggtattgaattgattaaagcgcaagtacaaattgcagctggtataccattaaaaattaaacaggcggatgtgaaaattcatggtgttgccatggagtgtcgcttgaatgcggaggatccgtaccacgattttcgaccgcaacctggaaaaatcacccggttgatctacccaatggggacactgggagtccggattgatgctggtgtggtgactggtagcatgattgcaccgttttacgactcgatgattgcaaaaatcattgttcacggtattaatcggaagatggtcagtcgcaagatgcatcgttgtttattggaattgaccatcgatggggttcaaacgaaccggaccttcttagcaggattagttgcagattcgactgttagccgtggtacctataccacagcttatatcgaacaagactttttgaaaggatggttaagtgatgcccaagcgcaagtttcaagcacccactga

SEQ ID NO: 9613 - protein, 462 aa, Lactobacillus plantarum WCFS1
MFKKVLVANRGEIAVQVIRALHEMGIKAVAVYSVADQESLFVHLADEAVCIGASPVNQSYLNMQAIISAANLTGCQAIHPGYGFLSENAEFAKMCADCQLTFIGPRPEVIDQMGDKENARQTMQRLGVPVIPGSPSVLKDVEAAMQAAHTLGYPVMIKAAAGGGGKGIRAVSNDQDLAKAFRTAQQEAQASYDDHRLYLEKIIAPAKHIEVQVLADQQGHVIYLPERDCSLQRNHQKVLEESPCAVITTAERTELGQLVADATKKLGYTNTGTYEFLMDQQHHFYFLEMNTRLQVEHTVTEMVTGIELIKAQVQIAAGIPLKIKQADVKIHGVAMECRLNAEDPYHDFRPQPGKITRLIYPMGTLGVRIDAGVVTGSMIAPFYDSMIAKIIVHGINRKMVSRKMHRCLLELTIDGVQTNRTFLAGLVADSTVSRGTYTTAYIEQDFLKGWLSDAQAQVSSTH

SEQ ID NO: 9614 - DNA, 1344 bp, Pseudomonas syringae pv. tomato str. DC3000
  CDS (1)..(1344): transl_table=11
atgttggaaaaagttctgatcgccaaccgcggcgaaattgccttgcgcatcttgcgtgcctgtaaagaactgggcatcaagaccgtcgctgtacactccacggcagatcgcgagttgatgcacctgggcctggcggacgaaaccgtctgcatcggtccggccccggccaacctgtcctacctgaacattccggcgatcatctcggccgctgaagtgaccggtgccacggccattcacccaggctacggtttccttgcggaaaacgccgatttcgctgaacaggttgaaaaatccggctttgccttcattggcccgaaagcagacaccatccgcctgatgggcgacaaggtttctgccaaggacgccatgaagctggccaacgtgccaaccgttccgggctccgacggcccgctgccggaagacgaggcaatcgctctgcgcatcggtcgcgaagtcggttacccggtgatcatcaaggccgccggtggcggtggtggtcgcggcatgcgtgtggtgcatcgcgaagaagacctgatcgaagccgctgcacagacccgtgcagaagctgcggcctggttcagcaacccgatggtctatctggaaaaatacctgaccaacccacgccacgtggaagtccaggtcatttccgatggccagggccaggcgattcatctgggcgaccgcgactgctcgctgcagcgccgtcaccagaaggttctcgaagaagcgccggcaccgttcatcgacgaacaggcgcgtgccgatgtactggcagcctgcgtcaaggcgtgtatcgatatcggctatcgcggtgcgggtactttcgagttcctgtacgagaatggccgtttctacttcatcgaaatgaacacccgtgttcaggtggagcacccggtgtccgagatggtcactggtatcgacatcgtcaaagagatgctcagcatcgccgccggtaacaaactgtcgtacacccaggatgacgtggtcatcaccgggcatgcgctggagtgccggatcaacgccgaagacccgaaaaccttcgtgccaagcccaggcctggtcaagcacttccatgcaccgggcggcaacggcgtacgggtcgattcgcacctgtacagcgggtacaaggttccgtcgaactacgactcgctgatcggcaaagtgatcacctggggcgcaacccgcgaagaagccatggcacgcatgcgtaatgccctggacgaaatcgtggttgacgggatcaagaccaacatcccgttgcaccgtgatctgacccgtgatgaaggcttctgcgaaggcggcgtcaacatccactacctggaacacaaactggccaatcaataa

SEQ ID NO: 9615 - protein, 447 aa, Pseudomonas syringae pv. tomato str. DC3000
MLEKVLIANRGEIALRILRACKELGIKTVAVHSTADRELMHLGLADETVCIGPAPANLSYLNIPAIISAAEVTGATAIHPGYGFLAENADFAEQVEKSGFAFIGPKADTIRLMGDKVSAKDAMKLANVPTVPGSDGPLPEDEAIALRIGREVGYPVIIKAAGGGGGRGMRVVHREEDLIEAAAQTRAEAAAWFSNPMVYLEKYLTNPRHVEVQVISDGQGQAIHLGDRDCSLQRRHQKVLEEAPAPFIDEQARADVLAACVKACIDIGYRGAGTFEFLYENGRFYFIEMNTRVQVEHPVSEMVTGIDIVKEMLSIAAGNKLSYTQDDVVITGHALECRINAEDPKTFVPSPGLVKHFHAPGGNGVRVDSHLYSGYKVPSNYDSLIGKVITWGATREEAMARMRNALDEIVVDGIKTNIPLHRDLTRDEGFCEGGVNIHYLEHKLANQ

SEQ ID NO: 9616 - DNA, 1344 bp, Vibrio parahaemolyticus RIMD 2210633
  CDS (1)..(1344): transl_table=11
atgctagacaaagtagtcatcgcgaaccgaggtgaaattgcacttcgtattcttcgcgcttgtaaagaattaggtattaagaccgttgctgttcactcaacagctgaccgcgatcttaagcacgtactacttgcagatgaaaccgtgtgtatcggccctgctcgtggtatcgacagctacctaaacatcccacgcatcatttctgcagcagaagtaactggcgcggtagctatccacccaggttacggcttcttgtcagaaaacgctgacttcgcagagcaagttgagcgcagtggtttcatcttcgttggtccaaaagcggacactatccgcatgatgggcgacaaagtatcagcgatcaccgcaatgaaaaaagcgggcgttccatgtgtacctggctcagacggtccactagataacgacgaagacaagaacaaagctcacgctaagcgtatcggctaccctgttatcatcaaagcatctggcggcggcggcggtcgtggtatgcgcgtagttcgtgcagaaaaagacctcgttcaagctattgctatgactcgtgcagaagcaaaagcagcattcaacaacgacatagtttacatggagaaattcctagaaaacccacgtcacgttgaagtacaagttattgctgatggtcaaggcggtgcaatccacctaggtgaacgtgactgttctatgcagcgtcgtcaccaaaaagtagtggaagaagctccagctcctggcatcactgaagagatgcgtaagtacatcggcgaacgttgtactcgtgcatgtgttgaaatcggttaccgcggcgcaggtacattcgaattcctatacgagaacggtgaattctacttcatcgaaatgaacactcgtattcaggtagaacacccagtaacagaaatggttaccggtatcgacctaatcaaagaacagcttcgcgtagcagcaggtcaaccactgtcattcactcaagatgacatcaagatccgcggccatgcgattgagtgtcgtatcaacgcagaagacccagagcgcttcctaccgtctccaggtaagattcaacgcttccacgcgccaggcggcatgggtgttcgttgggaatcgcacatctactctggttacacagtgccacctcactacgattcaatgatcggtaagctgatcacttacggtgaaaaccgtgacgtagcgattgcacgtatgaaaaatgcattgggtgagatgatcatcgaaggcattaaaactaacgtgccactgcaagtgtcaatcatgaatgatgaaaacttccaacacggcggtgcgaacattcactacctagagaagaaactaggcctacaataa

SEQ ID NO: 9617 - protein, 447 aa, Vibrio parahaemolyticus RIMD 2210633
MLDKVVIANRGEIALRILRACKELGIKTVAVHSTADRDLKHVLLADETVCIGPARGIDSYLNIPRIISAAEVTGAVAIHPGYGFLSENADFAEQVERSGFIFVGPKADTIRMMGDKVSAITAMKKAGVPCVPGSDGPLDNDEDKNKAHAKRIGYPVIIKASGGGGGRGMRVVRAEKDLVQAIAMTRAEAKAAFNNDIVYMEKFLENPRHVEVQVIADGQGGAIHLGERDCSMQRRHQKVVEEAPAPGITEEMRKYIGERCTRACVEIGYRGAGTFEFLYENGEFYFIEMNTRIQVEHPVTEMVTGIDLIKEQLRVAAGQPLSFTQDDIKIRGHAIECRINAEDPERFLPSPGKIQRFHAPGGMGVRWESHIYSGYTVPPHYDSMIGKLITYGENRDVAIARMKNALGEMIIEGIKTNVPLQVSIMNDENFQHGGANIHYLEKKLGLQ

SEQ ID NO: 9618 - DNA, 1371 bp, Enterococcus faecalis V583
  CDS (1)..(1371): transl_table=11
atgttttcgaaagtattaatcgcaaaccgcggagaaatcgctgttcgtattattcgtgcctgtcgcgaattaggcgttcaaacagttgctgtttactctgaagcggatcaagaagcgttacacacacagttagcagatgaagccatttgtattggaccggcgaaagcaactgattcttatttaaatgttcaagctgttttaagtgcagcgattgttaccaatgctgaagcgattcatccagggtttggtttcttatctgaaaatagtcaatttgcttcaatgtgcgaagaatgtaacattacttttatcggtcctaaagcagaaacgattgatgcaatgggcaataaaataaacgcacgtcaactgatgcaaaaagccaaggtacctgttattcctgggagtgatggcgtcattgattctgtcgaagaagcgttgacgattgctgaagaaattggttacccagtgatgttaaaggcagctgctggtggtggcggaaaaggaatccgaaaagttctttcaaaagaagagttaccgaaacactttacttcagcgcagcaagaagccaaagccgcatttggtaatgatgatatgtatttagaaaaaattatttatccagcacgtcatatcgaagtgcaaattttaggtgatcaatatgggcatgtgattcacttaggggaacgtgattgctcactacaaagaaataatcaaaaagtgttagaagaatcaccatcgattgctatttctgaagaaaagcgtcagatgttaggcgaaacggccgttcgagcggcacaagctgtgcattatgaaaatgccggaaccattgaatttttgatggatccagctggcgacttttatttcatggaaatgaatacccgcatccaagtcgaacatccagttacggaaatggtaacagggattgatttagtcaaagcacaattagaaattgcttcaggtgaacctttaggctatacccaagaggatgttatcatgagtgggcatgcgattgagtgccgaattaacgctgaaaatcctgcctttaattttgctccttcaccaggtaaaattcaaaatctcttgttgcctagtggtggaatgggcttgcgtgtagacagcgctatgtattcagggtattcaattccgccttattatgattcaatgattgcaaaagtcatcgtacatggtgaaaatcgttttgatgccttgatgaaaatgcaaagggctttaaatgaaattgtaacagaaggtattattacgaatgccgaattccaattagatttaattacacatgacaatgttttgacaggtgactatgacacaagctttttacaagaaacatttctaccaaattgggagccagaaagcaatcattaa

SEQ ID NO: 9619 - protein, 456 aa, Enterococcus faecalis V583
MFSKVLIANRGEIAVRIIRACRELGVQTVAVYSEADQEALHTQLADEAICIGPAKATDSYLNVQAVLSAAIVTNAEAIHPGFGFLSENSQFASMCEECNITFIGPKAETIDAMGNKINARQLMQKAKVPVIPGSDGVIDSVEEALTIAEEIGYPVMLKAAAGGGGKGIRKVLSKEELPKHFTSAQQEAKAAFGNDDMYLEKIIYPARHIEVQILGDQYGHVIHLGERDCSLQRNNQKVLEESPSIAISEEKRQMLGETAVRAAQAVHYENAGTIEFLMDPAGDFYFMEMNTRIQVEHPVTEMVTGIDLVKAQLEIASGEPLGYTQEDVIMSGHAIECRINAENPAFNFAPSPGKIQNLLLPSGGMGLRVDSAMYSGYSIPPYYDSMIAKVIVHGENRFDALMKMQRALNEIVTEGIITNAEFQLDLITHDNVLTGDYDTSFLQETFLPNWEPESNH

SEQ ID NO: 9620 - DNA, 1347 bp, Coxiella burnetii RSA 493
  CDS (1)..(1347): transl_table=11
atgtttaaaaaagtattaatcgctaaccgcggtgagattgctcttcgcatccatcgcgcttgtaaagaaatgggtattaaaaccgtagcggcttattcaatcgcggatcgcgatttaatgcatgtgcgcttagccgatgaagcggtgtgtattggcccttcaaacagcacgcacagttacctcagcgttccggcggttatttccgctgctgaaattacggatgttgaggccattcaccccgggtatggttttttggcggaaaatcctaatttttgcgaacaagtggaaaaaagtggattcgtttttattggaccttcacacgaagccattcatttaatgggaaacaaagtttcagcgattaaagcgatgaaagaagcagggctcccttgtatccctggctccgatggcgctttagggaaagatggggatgctaatctgcttattgccgagcaaattggttaccccattttaattaaagcggccggtgggggcggtgggcgaggaatgcgcgtcgtgcatagagaggccgagcttttaaatgcgatcgccatgacacgaacggaagcggcagcggcttttggtacggataaagtgtatatggaaaaattcctcgaaaatccgcgccatattgaaattcaagttctgggcgacggccaaggccatgctattcacttaggggaacgggattgttccatgcaacgccggcatcaaaaagtaattgaagaagcaccggctcccggcattacgcccaaacaacgggccaccattggcgaacgttgcgtacaggcttgtattgcgatgaattataggggagcgggaacatttgaattcctgtatgaaaacggcgagttttatttcattgaaatgaacacgcgcattcaggtggaacatcccgttacggaaatgattaccggtattgatcttgttaaagaacaaattcgagtggcggctggcttgccgctgagttatcgtcaaagcgatgtccaaattaagggtcacgccattgaatgccgcattaatgccgaagatcccaaaaatttcatgccttgcccaggccgagtgactgcctatcacgctcccggcggattcggcgtgcgcatggactcccatttatacgcgggttataacgtccccccgtattacgattctttaattggtaaattgattgtctacgacgaaaatcgcgaggaggctatcgcgcgcatgaaaaattctttagaagaacttgtgattgaaggaatcaagaccaatacaccgctccatttgacgatgatgacagatgagaaatttaaaaaaggcgctcagaatattcattatttagaaaagaaattgggacttaaaaactag

SEQ ID NO: 9621 - protein, 448 aa, Coxiella burnetii RSA 493
MFKKVLIANRGEIALRIHRACKEMGIKTVAAYSIADRDLMHVRLADEAVCIGPSNSTHSYLSVPAVISAAEITDVEAIHPGYGFLAENPNFCEQVEKSGFVFIGPSHEAIHLMGNKVSAIKAMKEAGLPCIPGSDGALGKDGDANLLIAEQIGYPILIKAAGGGGGRGMRVVHREAELLNAIAMTRTEAAAAFGTDKVYMEKFLENPRHIEIQVLGDGQGHAIHLGERDCSMQRRHQKVIEEAPAPGITPKQRATIGERCVQACIAMNYRGAGTFEFLYENGEFYFIEMNTRIQVEHPVTEMITGIDLVKEQIRVAAGLPLSYRQSDVQIKGHAIECRINAEDPKNFMPCPGRVTAYHAPGGFGVRMDSHLYAGYNVPPYYDSLIGKLIVYDENREEAIARMKNSLEELVIEGIKTNTPLHLTMMTDEKFKKGAQNIHYLEKKLGLKN

SEQ ID NO: 9622 - DNA, 2103 bp, Streptomyces avermitilis MA-4680
  CDS (1)..(2103): transl_table=11
atgttcgacaccgttcttgtggccaaccggggtgagatcgccgtccgcgtcatccgtaccctgcgcgcgctgggcgtgcgctcggtggccgtcttctccgacgccgacgcggacgcacggcacgtccgcgaggccgacacggccgtacggatcggtccgccgccggccgccgagagctatctgtccgtggagcggctgctggaggcggccgcccggaccggcgcgcaggcggtgcacccggggtacggcttcctcgcggagaacgccggcttcgcgcgtgcgtgcgccgacgcggggctcgtgttcatcgggccgcccgcggacgcgatctccttgatgggcgacaagatccgcgccaaggagacggtgcaggcggtcggcgtcccggtggtccccggctcctcgggcagcggcctgacggacgcccagctggtcgacgcggcacgggagatcggcatgcccgtactcctgaagcccagcgcgggcggcggcggcaagggcatgcggctggtgcgcgacgagaggctgctcgccgacgagatcgccgccgcccgccgcgaggcccgcgcctccttcggcgacgacacgctcctcgtggagcgttgggtggaccgcccccggcacatcgagatccaggtcctggcggacggccacggcaacgtggtgcacctgggcgagcgcgagtgctcgctccagcgccgccaccagaaggtcatcgaggaggcgcccagcgtgctcctcgacgaggcgacccgcgccgcgatgggcgaggcggcggtccaggcggcccgctcctgcggctacgagggcgcgggcaccgtcgagttcatcgtccccggcggggacccctcctcgtactacttcatggagatgaacacccgccttcaggtcgagcacccggtcaccgagctggtcaccggcctcgacctggtggagtggcagctccgggtggccgcgggcgagcgccttccgtacgggcagcgggacatcgaactcaccgggcacgcggtcgaggcccgcatctgcgccgaggaccccgcgcgcggcttccttccctccggggggacggtgctcgcgctgcacgagccacagagcgacgtggtgcgcaccgactcgggcctctccgagggcaccgaggtcggcagcctgtacgacccgatgctctccaaggtcatcgcgtacggccccgaccgcccgaccgcgctgcgcaggctccgggcggcgctcgcggagacggtcacactcggcgtgcagaccaacgccgggttcctgcggcggctgctggcccacccggcggtcgtggcgggggacttggacacgggcctggtggagcgggaggtggacgggctcgtcgcgcaggcggtcccgccggaggtgtacgcggcggcggcgctgctgcgccacgccgccctcggcccccaggcttcagggacctcggattcctccgggtccttcgggacatccgggtcccccgggacctcaggggcctccggctcgtccggggcctccgcctgggtcgatccgttctccgtgcccgacggctggcgtctgggcggcgagcgtgcctggacggctcaccacatgcggccggcggggcaggatcccgtgaccgtccgcgtgcgcgccacggcggacggcggcgtcgagctgctactcgacgacggactgccgcccctgcggggcacgctccccgtagcggtggccgcccgcgggggcgccgcgtcccggttcgccttccggctcgacggcgtcacccacaccttcgccgccctgccggacggcacctggctgggccgcgacggcgactcctggcacctgcgcgaccacgacccggtcgcggcgtccctcaccggcgccgcccactccggcgtcgactccctcaccgcccccatgcccggcacggtgaccgtcgtgaaggtcgccgtcggggacgaagtggccgccgggcagagcctgctggtggtcgaggcgatgaagatggagcacgtcatctccgccccgcacgccggcaccgtcagcgagctggacgtcacaccgggcacgaccgtcgccatggatcaggtgctggcggtcatcacccccgcagaggaggagacggcatga

SEQ ID NO: 9623 - protein, 700 aa, Streptomyces avermitilis MA-4680
MFDTVLVANRGEIAVRVIRTLRALGVRSVAVFSDADADARHVREADTAVRIGPPPAAESYLSVERLLEAAARTGAQAVHPGYGFLAENAGFARACADAGLVFIGPPADAISLMGDKIRAKETVQAVGVPVVPGSSGSGLTDAQLVDAAREIGMPVLLKPSAGGGGKGMRLVRDERLLADEIAAARREARASFGDDTLLVERWVDRPRHIEIQVLADGHGNVVHLGERECSLQRRHQKVIEEAPSVLLDEATRAAMGEAAVQAARSCGYEGAGTVEFIVPGGDPSSYYFMEMNTRLQVEHPVTELVTGLDLVEWQLRVAAGERLPYGQRDIELTGHAVEARICAEDPARGFLPSGGTVLALHEPQSDVVRTDSGLSEGTEVGSLYDPMLSKVIAYGPDRPTALRRLRAALAETVTLGVQTNAGFLRRLLAHPAVVAGDLDTGLVEREVDGLVAQAVPPEVYAAAALLRHAALGPQASGTSDSSGSFGTSGSPGTSGASGSSGASAWVDPFSVPDGWRLGGERAWTAHHMRPAGQDPVTVRVRATADGGVELLLDDGLPPLRGTLPVAVAARGGAASRFAFRLDGVTHTFAALPDGTWLGRDGDSWHLRDHDPVAASLTGAAHSGVDSLTAPMPGTVTVVKVAVGDEVAAGQSLLVVEAMKMEHVISAPHAGTVSELDVTPGTTVAMDQVLAVITPAEEETA

SEQ ID NO: 9624 - DNA, 1356 bp, Chlamydophila caviae GPIC
  CDS (1)..(1356): transl_table=11
atgaaaaaagtcttaatagctaatcgtggggaaattgcggtacgtattatacgtgcgtgtcatgatcttggcttatccacagtcgcagtatattccctagcagatcaagaagctttgcacgtgctattagcagacgaagctgtttgtataggagaacctcaagctgggaaatcctatttaaaaatatctaatattttagctgcttgtgagattacaggtgcagatgctgttcatcccggttatggttttttaagtgagaatccgaattttgcttctatttgtgaaagttgtggattgactttcattggccctagctcagagtctatagcgacaatgggagataaaatagcggcaaaacagctggctaaaaagattaaatgtcctgtgattccaggttctgagggcattatcaaagacgaagctgagggattaaaaatcgctgaaaaaataggcttccctatagtgattaaggctgttgctggtggtggtggccggggtatccgcatcgttagagagaaagatgaatttttccgtgctttctcagcggcgaaagcagaagcagaagcaggatttaataatcctgatgtttatattgaaaagttcattgaaaacccaaggcacttagaagtccaggtccttggagataagcatggcaattatgtccatcttggagaaagagactgtacggtacaaagacgtcggcaaaaactgattgaagagactcctagtcctatactcactccagaattacgtaccaaggtagggaaggttgctgtagatctagcgagaagtgccaactaccactctgtagggactgtagagttcttgttagataaagataagaagttctacttcatggaaatgaacacgcgtattcaggtagagcatacgattacggaagaagttacagggattgatcttcttaaagagcagatttatgtagcgatggggaaaaagcttgcttggaaacagaaaaacattgttttcacggggcatgttatccagtgtcgtattaatgctgaggatccgagcaataactttgccccatctccgggtcgtttagattactatcttcctcctgcggggccttcaatacgtgtggatggagcttgctatagcggctacgctattcctccttactatgattctatgattgctaaggtgatttctaagggaaagaaccgtgaagaggctatagccattatgaagcgtgctttaaaagagtttcatattggaggggtgcattctactatacctttccatcaattcatgttggacaatccacaattcatcaattcagactatgatatcaactacgttgatcatcttctctctcaggggaataccctattttaa

SEQ ID NO: 9625 - protein, 451 aa, Chlamydophila caviae GPIC
MKKVLIANRGEIAVRIIRACHDLGLSTVAVYSLADQEALHVLLADEAVCIGEPQAGKSYLKISNILAACEITGADAVHPGYGFLSENPNFASICESCGLTFIGPSSESIATMGDKIAAKQLAKKIKCPVIPGSEGIIKDEAEGLKIAEKIGFPIVIKAVAGGGGRGIRIVREKDEFFRAFSAAKAEAEAGFNNPDVYIEKFIENPRHLEVQVLGDKHGNYVHLGERDCTVQRRRQKLIEETPSPILTPELRTKVGKVAVDLARSANYHSVGTVEFLLDKDKKFYFMEMNTRIQVEHTITEEVTGIDLLKEQIYVAMGKKLAWKQKNIVFTGHVIQCRINAEDPSNNFAPSPGRLDYYLPPAGPSIRVDGACYSGYAIPPYYDSMIAKVISKGKNREEAIAIMKRALKEFHIGGVHSTIPFHQFMLDNPQFINSDYDINYVDHLLSQGNTLF

SEQ ID NO: 9626 - DNA, 1350 bp, Shigella flexneri 2a str. 2457T
  CDS (1)..(1350): transl_table=11
atgctggataaaattgttattgccaaccgcggcgagattgcattgcgtattcttcgtgcctgtaaagaactgggcatcaagactgtcgctgtgcactccagcacggatcgcgatctaaaacacgtattactggcagatgaaacggtctgtattggccctgctccgtcagtaaaaagttatctgaacatcccggcaatcatcagcgccgctgaaatcaccggcgcagtagcaatccatccgggttacggcttcctctccgagaacgccaactttgccgagcaggttgaacgctccggctttatcttcatcggcccgaaagcagaaaccattcgcctgatgggcgacaaagtatccgcaatcgcggcgatgaaaaaagcgggcgttccttgcgtacctggttctgacggcccgctgggcgacgatatggataaaaaccgcgccattgctaaacgcattggttatccggtgattatcaaagcctccggcggcggcggcggtcgcggtatgcgcgtagtgcgcggcgacgctgaactggcacaatccatctccatgacccgtgcggaagcgaaagctgctttcagcaacgatatggtttacatggagaaatacctggagaatcctcgccacgtcgagattcaggtactggctgacggtcagggcaacgctatctatctggcggaacgtgactgctccatgcagcgccgccaccagaaagtggtcgaagaagcaccagcaccgggcattaccccggaactgcgtcgctacatcggcgaacgttgcgctaaagcgtgtgttgatatcggctatcgcggtgcaggtactttcgagttcctgttcgaaaacggcgagttctatttcatcgaaatgaacacccgtattcaggtagaacacccggttacagaaatgatcaccggcgttgacctgatcaaagaacagctgcgtatcgctgccggtcaaccgctgtcgatcaagcaagaagaagttcacgttcgcggccatgcggtggaatgtcgtatcaacgccgaagatccgaacaccttcctgccaagcccaggcaaaatcacccgtttccacgcacctggcggttttggcgtacgttgggagtctcatatctacgcgggctacaccgtaccgccgtactatgactcaatgatcggtaagctgatttgctacggtgaaaaccgtgacgtggcgattgcccgcatgaagaatgcgctgcaggagctgatcatcgacggtatcaaaaccaacgttgatctgcagatccgcatcatgaatgacgagaacttccagcatggtggcactaacatccactatctggagaaaaaactcggtcttcaggaaaaataa

SEQ ID NO: 9627 - protein, 449 aa, Shigella flexneri 2a str. 2457T
MLDKIVIANRGEIALRILRACKELGIKTVAVHSSTDRDLKHVLLADETVCIGPAPSVKSYLNIPAIISAAEITGAVAIHPGYGFLSENANFAEQVERSGFIFIGPKAETIRLMGDKVSAIAAMKKAGVPCVPGSDGPLGDDMDKNRAIAKRIGYPVIIKASGGGGGRGMRVVRGDAELAQSISMTRAEAKAAFSNDMVYMEKYLENPRHVEIQVLADGQGNAIYLAERDCSMQRRHQKVVEEAPAPGITPELRRYIGERCAKACVDIGYRGAGTFEFLFENGEFYFIEMNTRIQVEHPVTEMITGVDLIKEQLRIAAGQPLSIKQEEVHVRGHAVECRINAEDPNTFLPSPGKITRFHAPGGFGVRWESHIYAGYTVPPYYDSMIGKLICYGENRDVAIARMKNALQELIIDGIKTNVDLQIRIMNDENFQHGGTNIHYLEKKLGLQEK

SEQ ID NO: 9628 - DNA, 1359 bp, Nitrosomonas europaea ATCC 19718
  CDS (1)..(1359): transl_table=11
atgtttgaaaaaatattgatcgcaaatcgtggtgagatcgcgctgcgcatccagcgggcatgtcgcaccatgggtattaaaacagtagccgttcattctgaagcagatgctgaggccaagtacgtcaaactggccgatgagtcggtgtgtatcggcccggcagcctctgcacagagttatctgaacattcctgccattatcagtgcggctgaagtcaccgatgctgaagccattcacccgggttacggttttctatccgagaatgcggattttgccgagagagtggaaaaaagcggctttttctttattggaccccggccggatacgatccggttgatgggggataaagtcagtgccaaaaatgccatgcgacaggcgggggtaccttgtgtaccgggttccggtggtgcattaccggaatctctcgatgaggtaaagaagatcgttaaagaaataggctatccggtcatcattaaagcggccggaggcggtggagggcgcggtatgcgtgtggtgcataccgaagcagcgctttcaaacgcggtgattacgacacgtaacgaggcgcagactgcattcggcaatccggttgtttatgcagaaaaatacctggaaaaccctcgtcatatcgaatttcaggtactggccgacgagtacggcaatgtcgttcatctgggggagcgggattgctctatgcaacgtcgccatcagaagatcattgaagaagcacctgcccgcggtatttctgtacagttgcgtgacaaaatcggggagctgtgtgtcgaggcttgcaagcgtatcaattatcgcggtgtcgggacttttgaatttctttacgagaacaatgaattttatttcattgagatgaatacccggttgcaggtcgaacatccggtaacggaggcgatcaccgggatcgatctggttcaggcgcaaattcgtgtggcagccggagaaaagctgtctttgcagcagaaggatatcgtgttcaagggccatgccatagaatgccgtatcaatgcggaagatccctataaactgaccccatcggccgggcgcatcactcaataccatgctccgggcggcccgggaatcagggttgattcacatatctatcacaactatcgtgtaccaccttactacgattccatgattgccaaggtaattgcctatggcgatgatcgcgacctggctattgcccgtatgcgtatagcattgacggaaatgatcgttgaaggcatcaaaaccaatataccgttgcatctcgaccttctgacagattgcaatttcctgtccggccccgtttccattcatcatcttgaaggtaaactcgcgttgtataacaaaaaatcgacctga

SEQ ID NO: 9629 - protein, 452 aa, Nitrosomonas europaea ATCC 19718
MFEKILIANRGEIALRIQRACRTMGIKTVAVHSEADAEAKYVKLADESVCIGPAASAQSYLNIPAIISAAEVTDAEAIHPGYGFLSENADFAERVEKSGFFFIGPRPDTIRLMGDKVSAKNAMRQAGVPCVPGSGGALPESLDEVKKIVKEIGYPVIIKAAGGGGGRGMRVVHTEAALSNAVITTRNEAQTAFGNPVVYAEKYLENPRHIEFQVLADEYGNVVHLGERDCSMQRRHQKIIEEAPARGISVQLRDKIGELCVEACKRINYRGVGTFEFLYENNEFYFIEMNTRLQVEHPVTEAITGIDLVQAQIRVAAGEKLSLQQKDIVFKGHAIECRINAEDPYKLTPSAGRITQYHAPGGPGIRVDSHIYHNYRVPPYYDSMIAKVIAYGDDRDLAIARMRIALTEMIVEGIKTNIPLHLDLLTDCNFLSGPVSIHHLEGKLALYNKKST

SEQ ID NO: 9630 - DNA, 1425 bp, Helicobacter hepaticus ATCC 51449
  CDS (1)..(1425): transl_table=11
atgtttcagaagattctcattgctaatcgtggcgaaattgcagtgcgtattatccgcgcttgtagggatttacatattaaaagtatagccatatatgcaagagctgatagagattgtttgcacgtaaaaatggctgatgaatcttatgaaatcagtgatgacccattgcaaggctatcttgatgcggatttgattattgaggtagcattacgcgctgaagctgatgcaattcaccccggctatggttttttaagtgagaatgccacatttgctaaaaaagtgcaagaagcgggaattacttggataggacctgatgctctaacaattgcaaaaatgggcgataaaaatgcagcaagagctattatggaaaaaaatggaatccccattgtgccaggcactcaaccacttaataagcactctataagtgatattgctaaatatgcgcaaaaaattggctatcctgtgatacttaaagcaagtagtggtggaggtgggcgtggcatacgcgtagtagaaaaagaagaggatttaatagaatcttttgaggcgtgtaaacgcgaagctatggcatttttcaaaaatgatgatgtttttatggaaaaatatatcgttaatcctagacatatagagtttcaaatcttagcggataattatggtaatgtgattcatctgcttgagcgtgattgttccatacaaagacgacatcaaaagcttgttgaaatcgctcctagtccccttattagcgatgatttacgccgaagaatgggagctgctgccgtggctgccgctaaagctgcacaatacacaaatgcaggcacggttgaatttttgcttgatgagaacaatactttttattttatggaaatgaatacacgcatacaggttgagcacggcgttacagaggaaattactggttatgaccttatagggagacaaatccgcattgcgcaaggagaaattttagaccttacacaacacgatatacgcgcacaaggctttgctattgaagtgagaattaatgctgaagatgtggctaatgattttgtgccaaatccgggcaaaattaccacttattaccctgctttaggaccttttgtgcgagtagatagttgtatttataaagattatgtgattccacccttttatgattctatggtagcaaagctcattgtgaaagcttcaagctataatcttgcggtaaataaactctcgcgagctttgaatgaatttaccattaaaggcgtgaaaacaacaattccttttttgataaacatttgcaatgataaagactttaggcgaggatattttgatacttcttatattgaaagtaaaattaaagagcttatgccccccccacaatctaagcctgaagatgatatggtaagcgtcattgtcgcggccttaagcgcacgctatggagcataa

SEQ ID NO: 9631 - protein, 474 aa, Helicobacter hepaticus ATCC 51449
MFQKILIANRGEIAVRIIRACRDLHIKSIAIYARADRDCLHVKMADESYEISDDPLQGYLDADLIIEVALRAEADAIHPGYGFLSENATFAKKVQEAGITWIGPDALTIAKMGDKNAARAIMEKNGIPIVPGTQPLNKHSISDIAKYAQKIGYPVILKASSGGGGRGIRVVEKEEDLIESFEACKREAMAFFKNDDVFMEKYIVNPRHIEFQILADNYGNVIHLLERDCSIQRRHQKLVEIAPSPLISDDLRRRMGAAAVAAAKAAQYTNAGTVEFLLDENNTFYFMEMNTRIQVEHGVTEEITGYDLIGRQIRIAQGEILDLTQHDIRAQGFAIEVRINAEDVANDFVPNPGKITTYYPALGPFVRVDSCIYKDYVIPPFYDSMVAKLIVKASSYNLAVNKLSRALNEFTIKGVKTTIPFLINICNDKDFRRGYFDTSYIESKIKELMPPPQSKPEDDMVSVIVAALSARYGA

SEQ ID NO: 9632 - DNA, 1353 bp, Rhodopirellula baltica SH 1
  CDS (1)..(1353): transl_table=11
atgttcgaacgtattttgatcgccaaccgaggcgagattgcgctgcgtgtgattcgcgcctgccgtgaaatgggcatcgagtcggtcgccgtctacagcgaagccgacaaagattccatgcacgtcaaactggcggaccatgcctactgcgtcggaaccaatcgcagtgcggacagctatctgaaaatcgatcgcatcatcgccacggcagaagttgccggcgtcgatgccatccaccccggatacggcttcctggcggaaaacgctcaattcaacgagcaatgccgaagcagcgggtttgagttcatcgggccgtcgccaacagcgatggacaaattgggcgacaaaaacaccgctcgttccatggccatcgctcaaaacgtcccggtcgttcccggcagtgacggattgattgcggacttcgatcgagccatcgacacagccaaagaaattggctttcccgttttgatcaaagccaccgccggtggtggcggcaaaggcatgcgggtcgccgagaccgaggatgtcctcaagagccaactcgaagcagctcgcaacgaagccatcgcggccttcggcaacggcggcgtgtacctggaaaaattcatccagcaacctcgtcacatcgaagtgcaagtcattgcggacacgcacggcaatgtctgccacctttttgaacgcgattgcagcgtccaacgacgtcaccaaaaactcgtcgaagaagcccccagcccggacttgcccgccgatcgtcgtgaagcaatctgcgacgccgccgtgcgaatgatcgccggtgccgactactccggtgcgggcacggtcgagttcatcgtcgacaaggactacaacttctacttcatcgaagtcaacgctcggatccaagtcgaacatccagtctccgaaatggtggccggagtcgacttgatccaagaacaaattcgagttgccgcgggattgccactgtcgttccgtcaagacgaattgacatgcaccggtcacgcgatcgaatgtcgactcaacgccgaagatcccaccaagaacttccaaccgtgtcccggcaaaattgaatcgatgtttgtgcccggcggcatgggcgttcgctttgattcacacgtgaagtccggctacgtggttcctccgtactacgattcgatgatcggcaaactgatcgtccatcgtcccacgcgagaacaagccatcgcgacgatgctacgagccttgaaagaactgcagatcgaagggatcaccacaacggtcggattccataactggatcctgcagaacgaagcgtttgtgaacggcaccgtcgacaccaagttcgtcgaccggaactacaaaggccaaacgtcttag

SEQ ID NO: 9633 - protein, 450 aa, Rhodopirellula baltica SH 1
MFERILIANRGEIALRVIRACREMGIESVAVYSEADKDSMHVKLADHAYCVGTNRSADSYLKIDRIIATAEVAGVDAIHPGYGFLAENAQFNEQCRSSGFEFIGPSPTAMDKLGDKNTARSMAIAQNVPVVPGSDGLIADFDRAIDTAKEIGFPVLIKATAGGGGKGMRVAETEDVLKSQLEAARNEAIAAFGNGGVYLEKFIQQPRHIEVQVIADTHGNVCHLFERDCSVQRRHQKLVEEAPSPDLPADRREAICDAAVRMIAGADYSGAGTVEFIVDKDYNFYFIEVNARIQVEHPVSEMVAGVDLIQEQIRVAAGLPLSFRQDELTCTGHAIECRLNAEDPTKNFQPCPGKIESMFVPGGMGVRFDSHVKSGYVVPPYYDSMIGKLIVHRPTREQAIATMLRALKELQIEGITTTVGFHNWILQNEAFVNGTVDTKFVDRNYKGQTS

SEQ ID NO: 9634 - DNA, 1338 bp, Wigglesworthia glossinidia endosymbiont of Glossina brevipalpis
  CDS (1)..(1338): transl_table=11
atgtttaataaagtattgattgctaacagaggagaaatagctttaagagttttgcgagcttgtaaagaattaaatataaaaacagtagctgtgtattctacttcggatagatttctaaagcatgttttattagcagatgaaactatttgtataggtccagcaaactctttagaaagttatttaaatattccatctattatatcagcagcagaaatcactggatctgatgcaatacatcccggatatggatttttatccgaaaattataattttgcagaacaagtagagaaatctggatttatatttataggtccaaattcaaatactttaaaacttatgggtgataaaatatctgctatttcagttatgaaaaaaataggaatgccatgcttgcctacatcttttaatatatctaaaaataatatcaaaaagaatacttttattgctaataaaataggatatcctattgtaataaaagcttcaaaaggaggtggcgggagagctatgaaaatagtttataaaaattccgaattggaagattctatttgcatatcaaaatcagaatctaaaatcgcatttaatgatgatagtttgtattttgaaaaatatattgaaaatgctaaacatatagagattcaggttttatctgatggacatggaaatgcagaatatttagtagaaagagattgttcaatacagcgtcgttatcaaaaaattttagaagaatcaccttctgtttatttgaataaaaaaattagaaattatttaggaaaattttgcataaaagcttgtttgcttattaattataaaggagtaggtacttttgagttcttatataaagataaaaatttttactttatagagatgaatacaagaattcaagtagaacatccagttacagaaatggtaacaggaatagatatagttaaagagcaattaaaaattgcttatggagaaaagcttaatttaaaaaacaaaattaatttttctggacatgctatagaatgcagaataaatgcagaagatcctaaaacttttttacccaattatggaaaaattagtagatttcatgcaccaggcggtcttggtgttagatgggagtctcatatatattcaggttataatgttcctgctttttatgatactttaatcggaaaacttatttgttttggagaaaatagaaaaatagcaatctcgaaaatgaaaaatgctttagaagaaattattgtagatgggataaaaactaatattaatttacatttaaaaataataaataacaaagattttttagatggagataaaattaatattaattttttatctaattttaatttttaa

SEQ ID NO: 9635 - protein, 445 aa, Wigglesworthia glossinidia endosymbiont of Glossina brevipalpis
MFNKVLIANRGEIALRVLRACKELNIKTVAVYSTSDRFLKHVLLADETICIGPANSLESYLNIPSIISAAEITGSDAIHPGYGFLSENYNFAEQVEKSGFIFIGPNSNTLKLMGDKISAISVMKKIGMPCLPTSFNISKNNIKKNTFIANKIGYPIVIKASKGGGGRAMKIVYKNSELEDSICISKSESKIAFNDDSLYFEKYIENAKHIEIQVLSDGHGNAEYLVERDCSIQRRYQKILEESPSVYLNKKIRNYLGKFCIKACLLINYKGVGTFEFLYKDKNFYFIEMNTRIQVEHPVTEMVTGIDIVKEQLKIAYGEKLNLKNKINFSGHAIECRINAEDPKTFLPNYGKISRFHAPGGLGVRWESHIYSGYNVPAFYDTLIGKLICFGENRKIAISKMKNALEEIIVDGIKTNINLHLKIINNKDFLDGDKININFLSNFNF

SEQ ID NO: 9636 - DNA, 1344 bp, Haemophilus ducreyi 35000HP
  CDS (1)..(1344): transl_table=11
atgttagaaaaagttgtcatagcaaatcgtggcgagattgcgttacgtgttttgcgtgcctgtaaagaactaggcattaaaactgttgcagttcattcaaccgcggaccgagaattaaagcacgttttacttgcagatgaaaccgtctgtattggtcccgctccttctgtgaaaagttatttaaatattcctatgattattgctgcggcagaaattactaacgcagatgcaattcaccccggttatgggttcttatctgaaaatgctgattttgcagagcaagttgaaaaatcaggttttacgtttattggcccaacggcagatgtgattcgactaatgggcgataaagtttctgctattgaagccatgaaaaaagcaggggtgccttgtgtgccgggttcagatgggcctattggtaatgatcctgttaaaaataaagagattgctaaccgcattggttatcctgtgattatcaaagcatctggtggtggcggtggtcgtggtatgcgcgtggtttatcaagcaaaagatttagaagcatctattgctatgacgaaagcagaggcgaaagcagcctttaataatgatatggtgtatatggaaaaatatttagaaaatccgcgccatattgagattcaagtgctagcagatacacacggtaatgctgtttatttagctgaacgtgattgctcaatgcaacgtcgccatcagaaagttgttgaagaagcgcctgcgccggggattacacctgaattacgtaagtttattggtgagcgctgtgcgaaggcttgtcgtgaaattggttatcgtggtgcgggcacttttgagttcttatttgagaacggtgaattttactttattgagatgaacacgcgtttgcaagtagaacatccggttactgaaatgattacaggagtcgatttagttaaagaacagttacgtgttgcggcaggtttaccgatttcaattaagcaagaagatatcaaggtaaaaggtcatgctatggaatgccgtattaatgcggaggatccaaatactttcttaccatcaccgggtaagatcacgcgtttacatgttccaggtggattaggtgtgcgttgggattcacatatttattctggttatactgtgccgcctcactatgattcaatgattggtaagttgattacgtttgctgaaaatcgtgaaattgctattcgtcgtatgcaaaatgcgctatctgaaacgattttagaaggcattaaaacgaatattccattgcataatttaattatggaagatgagaatttctgccaaggtgggactaatattcattatcttgaaaagaaattaggtctcaaataa

SEQ ID NO: 9637 - protein, 447 aa, Haemophilus ducreyi 35000HP
MLEKVVIANRGEIALRVLRACKELGIKTVAVHSTADRELKHVLLADETVCIGPAPSVKSYLNIPMIIAAAEITNADAIHPGYGFLSENADFAEQVEKSGFTFIGPTADVIRLMGDKVSAIEAMKKAGVPCVPGSDGPIGNDPVKNKEIANRIGYPVIIKASGGGGGRGMRVVYQAKDLEASIAMTKAEAKAAFNNDMVYMEKYLENPRHIEIQVLADTHGNAVYLAERDCSMQRRHQKVVEEAPAPGITPELRKFIGERCAKACREIGYRGAGTFEFLFENGEFYFIEMNTRLQVEHPVTEMITGVDLVKEQLRVAAGLPISIKQEDIKVKGHAMECRINAEDPNTFLPSPGKITRLHVPGGLGVRWDSHIYSGYTVPPHYDSMIGKLITFAENREIAIRRMQNALSETILEGIKTNIPLHNLIMEDENFCQGGTNIHYLEKKLGLK

SEQ ID NO: 9638 - DNA, 1353 bp, Candidatus Blochmannia floridanus
  CDS (1)..(1353): transl_table=11
atgttaagtaaaattgttattgcaaatagaggagaaatagcattacgaattttacgtgcttgtaaagaattgggaattaaaacagtagctatacactctactatagatcgcgatctaaaacatgttcttttatctgatgaaactatttgcataggattaccgccaatcataaatagttatctgaatattccatctatcatttcttctgcagaaattactggagcttcaggaattcatcctggatatggatttttatctgaaaatgctgattttgcagaacaagttgaacgttctggttttatatttatcggtccaagtcctgaaactattcgtctcatgggtaataaaatttctgctatttccgtaatgaaaaaatcaggagtaaaacctattcctggatggaattatgaaaataataaaaaaataaataacattgatttttgcaataatcacaacataaatattaactatccagttattattaaatcagcttatggaggaggtggtcatggaatgcgtattgtaacaaacaaatcagatctaaaaaatgctatacaaacaactcaaatagaatcaaaaaaaatatttaataatgataccatttatatagaacaatatttaacacaatcaagacatatagaaatacaaattttatctgatggaaaaggcaatgccatttatttaacagaacgagattgttctatacaaagaagacatcaaaaaataatcgaagaaacacctgcatggggaattacaccagaaatgcgaacttttataggagaatgttgtgttaaagtttgtcaagaaataaattacagaggagtaggtacatttgaatttttgtatgaaaatggaaattttttctttattgaaatgaatacacgtatccaagtagaacatccaatcactgaaatgattactggaatcgatttggtacgaaaacaattaaaaattgcttcaggatatccattaaacattaaacaacatgaaatttccacactaggacattctatagaatgtcgtatcaatgcagaagatccgtacacttttatacccaatgcaggtcgtattactcgttttcattctcccggtggatttggagtacgctgggaatctcatatttattctggttatacggtacctgcatattatgactcaatgatagggaaattaatttctttcggaaaaacacgtaaaattgctatagcacgtatgaaaaatgcattatcagaattaattattcaaggaattaaaactaacatcgaattacatctaaaaattatgaatgatatagaatttatacaaggaaataatatcaatactcattatttaaaaaacagatttaacatataa

SEQ ID NO: 9639 - protein, 450 aa, Candidatus Blochmannia floridanus
MLSKIVIANRGEIALRILRACKELGIKTVAIHSTIDRDLKHVLLSDETICIGLPPIINSYLNIPSIISSAEITGASGIHPGYGFLSENADFAEQVERSGFIFIGPSPETIRLMGNKISAISVMKKSGVKPIPGWNYENNKKINNIDFCNNHNININYPVIIKSAYGGGGHGMRIVTNKSDLKNAIQTTQIESKKIFNNDTIYIEQYLTQSRHIEIQILSDGKGNAIYLTERDCSIQRRHQKIIEETPAWGITPEMRTFIGECCVKVCQEINYRGVGTFEFLYENGNFFFIEMNTRIQVEHPITEMITGIDLVRKQLKIASGYPLNIKQHEISTLGHSIECRINAEDPYTFIPNAGRITRFHSPGGFGVRWESHIYSGYTVPAYYDSMIGKLISFGKTRKIAIARMKNALSELIIQGIKTNIELHLKIMNDIEFIQGNNINTHYLKNRFNI

SEQ ID NO: 9640 - DNA, 1371 bp, Bordetella parapertussis 12822
  CDS (1)..(1371): transl_table=11
atgagactgaaaaaggtattgattgcgaacaggggagagatcgccctgcgtatcgtccgcgcgtgccgggagatggacatacggaccgtccaggtctactccagcgcggatgaggattcattgcctgtcaggttggccgatgaagcggtccccatcggcggccccgagccgtcggcaagctacctgaacatcgcggcgctgatcgccgccgcgcgcgagcatggctgcgacgccatccatcccggctacggcttcctgtccgagaacgaagacttcgcccaggcctgcatcgacgccggcatcgtcttcatcggcccggaccccggcgcgatccgcatgatgggcgacaaggcgcaggcccgcaagatcgccaaggaggcgggcgtgcccattgtgccgggcgcgcccgagccggtcagcgacgtcgaggaggccatcaaggtggcccgcgaggtcggctatcccttgctggtcaaggcggcggcgggcggcgacgggcgcggcatgcgcgtgatccagggcgaggcgcagctgcgcgaggggctggagcgcgcgtcgatggaggccaagtcggccttcggcgacggctccgtctatatcgaacgctatatctcgcccgtgcgtcacgtcgagatccaggtgttcggcgatggcgaggacgtcatccacctgggcgagcgggaatgctcgatccagcgccgccaccagaagctgctggaggaaagcccgtcgccggtgctgtccgaagaaacgcggcagcgcatgggcgaggcggcctgcgcgctggcgcgcgcggtcaagtatcgcggcgcgggcacgctggaattcgtcatggacggcaagagcggcgaattcttcttcatcgaaatgaatacgcgcatccaggtcgagcatccggtcacggaagccgtcaccggcgtggacctggtcaggctccagctggcggtggccgctggcggcaggctgggcctgcgccagcaggacatcgtcatgaaggggcacgcgatcgaatgccgcatcaacgcggaggacccgcagaaggcgttcatgcccagcccgggcacggtcaacgatatccggctgccttcggggccgggcgtgcgcatggattcgcacgtgtaccgcggctacaagctgccgccgtactacgactcgctgctgggcaagctgatcgtctgggacgagtcgcgcgagaaagccatcgcccgcatgctgcgcgcgctgggcgagctggagatcgtcggcgtgaagacgaccaaggaattccacgaacggctcatgcgagacgaggatttcatcgccgccaatgtcagcacccagttcgtcaaggaaaagctgtacgccgaccaccccatgcgccatttgctctga

SEQ ID NO: 9641 - protein, 456 aa, Bordetella parapertussis 12822
MRLKKVLIANRGEIALRIVRACREMDIRTVQVYSSADEDSLPVRLADEAVPIGGPEPSASYLNIAALIAAAREHGCDAIHPGYGFLSENEDFAQACIDAGIVFIGPDPGAIRMMGDKAQARKIAKEAGVPIVPGAPEPVSDVEEAIKVAREVGYPLLVKAAAGGDGRGMRVIQGEAQLREGLERASMEAKSAFGDGSVYIERYISPVRHVEIQVFGDGEDVIHLGERECSIQRRHQKLLEESPSPVLSEETRQRMGEAACALARAVKYRGAGTLEFVMDGKSGEFFFIEMNTRIQVEHPVTEAVTGVDLVRLQLAVAAGGRLGLRQQDIVMKGHAIECRINAEDPQKAFMPSPGTVNDIRLPSGPGVRMDSHVYRGYKLPPYYDSLLGKLIVWDESREKAIARMLRALGELEIVGVKTTKEFHERLMRDEDFIAANVSTQFVKEKLYADHPMRHLL

SEQ ID NO: 9642 - DNA, 1371 bp, Bordetella bronchiseptica RB50
  CDS (1)..(1371): transl_table=11
atgagactgaaaaaggtattgattgcgaacaggggagagatcgccctgcgtatcgtccgcgcgtgccgggagatggacatacggaccgtccaggtctactccagcgcggatgaggattcattgcctgtcaggttggccgatgaagcggtccccatcggcggccccgagccgtcggcaagctacctgaacatcgcggcgctgatcgccgccgcgcgcgagcatggctgcgacgccatccatcccggctacggcttcctgtccgagaacgaagacttcgcccaggcctgcatcgacgccggcatcgtcttcatcggcccggaccccggcgcgatccgcatgatgggcgacaaggcgcaggcccgcaagatcgccaaggaggcgggcgtgcccattgtgccgggctcgcccgagccggtcagcgacgtcgaggaggccatcaaggtggcccgcgaggtcggctatccgttgctggtcaaggcggcggcgggcggcggcgggcgcggcatgcgcgtgatccagggcgaggcgcagctgcgcgaggggctggagcgcgcgtcgatggaggccaagtcggccttcggcgacggctccgtctatatcgaacgctatatctcgcccgtgcgtcacgtcgagatccaggtgttcggcgatggcgaggacgtcatccacctgggcgagcgggaatgctcgatccagcgccgccaccagaagctgctggaggaaagcccgtcgccggtgctgtccgaagaaacgcggcagcgcatgggcgaggcggcctgcgcgctggcgcgcgcggtcaagtatcgcggcgcgggcacgctggaattcgtcatggacggcaagagcggcgaattcttcttcatcgaaatgaatacgcgcatccaggtcgagcatccggtcacggaagccgtcaccggcgtggacctggtcaggctccagctggcggtggccgctggcggcaggctgggcctgcgccagcaggacatcgtcatgaaggggcacgcgatcgaatgccgcatcaacgcggaggatccgcagaaggcgttcatgcccagcccgggcacggtcaacgatatccggctgccttcggggccgggcgtgcgcatggattcgcacgtgtaccgcggctacaagctgccgccgtactacgactcgctgctgggcaagctgatcgtctgggacgagtcgcgcgagaaagccatcgcccgcatgctgcgcgcgctgggcgagctggagatcgtcggcgtgaagacgaccaaggaattccacgaacggctcatgcgagacgaggatttcatcgccgccaatgtcaacacccagttcgtcaaggaaaagctgtacgccgaccaccccatgcgccatttgctctga

SEQ ID NO: 9643 - protein, 456 aa, Bordetella bronchiseptica RB50
MRLKKVLIANRGEIALRIVRACREMDIRTVQVYSSADEDSLPVRLADEAVPIGGPEPSASYLNIAALIAAAREHGCDAIHPGYGFLSENEDFAQACIDAGIVFIGPDPGAIRMMGDKAQARKIAKEAGVPIVPGSPEPVSDVEEAIKVAREVGYPLLVKAAAGGGGRGMRVIQGEAQLREGLERASMEAKSAFGDGSVYIERYISPVRHVEIQVFGDGEDVIHLGERECSIQRRHQKLLEESPSPVLSEETRQRMGEAACALARAVKYRGAGTLEFVMDGKSGEFFFIEMNTRIQVEHPVTEAVTGVDLVRLQLAVAAGGRLGLRQQDIVMKGHAIECRINAEDPQKAFMPSPGTVNDIRLPSGPGVRMDSHVYRGYKLPPYYDSLLGKLIVWDESREKAIARMLRALGELEIVGVKTTKEFHERLMRDEDFIAANVNTQFVKEKLYADHPMRHLL

SEQ ID NO: 9644 - DNA, 1365 bp, Bordetella bronchiseptica RB50
  CDS (1)..(1365): transl_table=11
gtgaacaagatcctgatcgccaatcgcggcgcggtcgccgcgcgggtggcgcgcgccgtgcacgagatgggcctgcgctcggtcgtggtctactccgaggccgaccgcgacctgccctatgtgcagatggccgacgaagcctattgcatcgggcccgcgccggccgcgcagagctacctcgaccaggccgccctgctcgacgtgctggcgcgcaccggcgccgacgcggtgcatccgggctatggcttcctgtccgagaacgccgggttcgcccgcgccgtggacgcggccggcgccgtcttcatcggtccggcggcgcgctggatcgaagccatgggccacaagacccgcgcccgcgaactgatggcgcgccacggcatgcccatgtgcaagtcgtcggcggtgctgggcgaggacgaggccggcgtgctggcggcggcgcgcgaagtcggctatccggtgatggtcaagccggccggcggcggcggcggcatcggcatgatcgccgccgcgggcgaagccgagctgctggccgcggtggcgcgcgcgcgctcgctggccgcgcgcagcttcggcaacggcgatatctacctggagcagctgttcgagcagccgcgccacatcgaattccagatcctggccgaccgccacggcaacgcgcgccacctgtacgagcgcgactgctcggtgcagcgccgccaccagaaggtcatcgaagaggcgcgcgcgccgcgcgtgcccacggccgagacgcaggcgctgggcgagcgcatcgccgcgctgctggccgagctgggctacgacgtgatcggcacggtggaaatgctgcgcgaccagcagggccgctacagcttcctcgaaatgaacacccggctgcaggtcgagcacgccgtcaccgaggccattaccggcctggacctggtgcaggcgcagatccgcctggccgccggcgagcggctggaccgcgtggtgccggcagacctgcagccctcgggccacgccatcgagctgcgcgtgtacgccgaagacccggtgcgcttcatcccgtcgccgggcacgctggccgtgttcgagctgccgcaagggcccggggtgcgcaccgagactggctaccgcgccggcaacgcggtaagcccgcactacgaccccatgatcgccaagatcatcgtgcacggcgccgatcgcgcccaggccatcgcgcgcgccgagcaggccctggccgacaccgagatcgccggcgtcaagaccaacctgcccttcctggcgcgcgcgctggccttcgaaccctggcgccagggccgcctgcacaccggcatcgtggcccggaccctggccgagcccgcgccggccgcgctcactgcttga

SEQ ID NO: 9645 - protein, 454 aa, Bordetella bronchiseptica RB50
MNKILIANRGAVAARVARAVHEMGLRSVVVYSEADRDLPYVQMADEAYCIGPAPAAQSYLDQAALLDVLARTGADAVHPGYGFLSENAGFARAVDAAGAVFIGPAARWIEAMGHKTRARELMARHGMPMCKSSAVLGEDEAGVLAAAREVGYPVMVKPAGGGGGIGMIAAAGEAELLAAVARARSLAARSFGNGDIYLEQLFEQPRHIEFQILADRHGNARHLYERDCSVQRRHQKVIEEARAPRVPTAETQALGERIAALLAELGYDVIGTVEMLRDQQGRYSFLEMNTRLQVEHAVTEAITGLDLVQAQIRLAAGERLDRVVPADLQPSGHAIELRVYAEDPVRFIPSPGTLAVFELPQGPGVRTETGYRAGNAVSPHYDPMIAKIIVHGADRAQAIARAEQALADTEIAGVKTNLPFLARALAFEPWRQGRLHTGIVARTLAEPAPAALTA

SEQ ID NO: 9646 - DNA, 1347 bp, Bordetella bronchiseptica RB50
  CDS (1)..(1347): transl_table=11
atgtttgaaaagatcctgatcgccaatcgcggcgagatcgccctgcggatccagcgcgcctgccgcgagctgggcatcaaaaccgtcgtcgtgcactccgaggccgaccgcaccgccaagtatgtgcgcctggccgacgagtcggtctgcatcggcccggcgccgtcgcgcgagagctacctcaacatgccggccctgatctcggcggccgaggtgaccgacgccgaggcgatccacccgggctacggctttctggccgagaacgccgattttgccgagcgcgtcgaaaagagcggcttcgtcttcatcggcccgcgtcccgaaaccatccgccagatgggcgacaaggtcagcgccaagcgcgccatgatcgaggccggcgtgccggtcgtgccggggtcggagggcgccttgccggacgatccgcaggagatcctgcgcatcgcgcgcgaagtgggctatccggtcatcatcaaggcttccggcggcggcggcgggcgcggcatgcgcgtggtgtacaccgaagctgcgctgctgaacgcggtcaacatgacgcgctcggaagccggcgcggcgttcaacaatcccgaagtctatctggagaagttcctggagaatccgcgccacgtggagatccaggtgctggccgacggcggccgcaacgccgtgtggctgggcgagcgcgactgctcgatgcagcgccgccaccagaaagtcatcgaagaggcgccggcgcccggcattccgcgccggctgatcgaacgcatcggcgatcgttgcgccgacgcatgccgcaagatgggctaccgcggcgcgggcacgttcgagttcctgtacgagaacggcgagttctatttcatcgaaatgaacacccgtatccaggtcgagcacccggtcaccgaactgatcaccggcgtggacgtggtccagcagcagatcctgatcgccgccggcgagaagttcacgctgcgccagcgcgacatccagttcaagggccatgccctggaatgccggatcaacgccgaggatccgttccgtttcgtgcccagcccgggccgcatcaccaactggcatgtgccgggcggccccggcgtgcgcatcgattcgcacgccttcaacggctactttgttccgcccaactacgattcgatgatcgccaaggtcatcacctatggcgacacgcgcgaacaggcgctggcgcgcatgcgcatcgccctgtccgagatggtggtcgagggcatttccaccaacatcccgctgcatcgcgaactgctgcaggatgcgcgcttcatcgagggcggcaccagcatccattatctggagcacaaactggcgcagcggccctga

SEQ ID NO: 9647 - protein, 448 aa, Bordetella bronchiseptica RB50
MFEKILIANRGEIALRIQRACRELGIKTVVVHSEADRTAKYVRLADESVCIGPAPSRESYLNMPALISAAEVTDAEAIHPGYGFLAENADFAERVEKSGFVFIGPRPETIRQMGDKVSAKRAMIEAGVPVVPGSEGALPDDPQEILRIAREVGYPVIIKASGGGGGRGMRVVYTEAALLNAVNMTRSEAGAAFNNPEVYLEKFLENPRHVEIQVLADGGRNAVWLGERDCSMQRRHQKVIEEAPAPGIPRRLIERIGDRCADACRKMGYRGAGTFEFLYENGEFYFIEMNTRIQVEHPVTELITGVDVVQQQILIAAGEKFTLRQRDIQFKGHALECRINAEDPFRFVPSPGRITNWHVPGGPGVRIDSHAFNGYFVPPNYDSMIAKVITYGDTREQALARMRIALSEMVVEGISTNIPLHRELLQDARFIEGGTSIHYLEHKLAQRP

SEQ ID NO: 9648 - DNA, 1365 bp, Bordetella bronchiseptica RB50
  CDS (1)..(1365): transl_table=11
atgttccgtaaagtcctgatcagcaaccgcggcgagatcgcccagcgcatccagcgcgcctgccatcagctcggcatccagaccgtggtggtgtactccgaggccgaccgcgatgccgcctatgtgcgccacgccgacgacgcgctgtgcatcgggccggcgccgtcggcgcgcagctacctgcaggcgccggccatcatcggcgccgcgcgcctgaccggcgccgacgccatccatcccggctacggcttcctgagcgagaacgccggcttcgccgaggcggtgcaggccgccgggctggccttcatcggcccgacgccggccgccatccgcaccatgggcgacaaggtccaggccaagcgggccatgcagcagtccggcgtgccctgcgtgccgggctcgcaaggcgtgctgcccgacgaccccggcgccatcgccgaacaggcgcgcgccatcggctttccgttgatcgtgaaggcggccggcggcggcggcggacgcggcatgcgggtggtcgagcacgaagccgcgctgcacggcgcggtgcagaccacgcgcgccgaggcgctggccgccttcggcaatcccgatctctacatggagcgctttctgcagcgtccgcgccacatcgagatccaggtgctggccgaccatcacggcaacgccgtctggctgggcgagcgcgattgctcgatgcagcgccgccaccagaagatcctcgaagaatcgcccgcgccggggctggaccccgccgccgtcgaggcgatcggacagcgctgcgcccacgcctgccgcgcaatcggctatcgtggtgcgggcactttcgaattcctctacgaggacggccagttctatttcatcgagatgaatacgcggctgcaagtggaacaccccatcaccgagctgaccaccggcatcgacatcgtgcaggcgcagatccgcatcgccgccggcgagccgctgccctggacccaggagcaggtgcgccgccgcggccacgccatcgaatgccgcatcaatgccgagaaccccgccaccttcatgccgtcgccgggccgcatcgcccaatggctgccgcccggcggaccgggcgtgcgcgtcgactcgcacgcctacgccggctacgtggtgcccgcgcactacgactcgatgataggcaagttcatcgccttcggcgacgatcgcgaacaggccctggcgcgcatgcgcgtggcgctgcgcgaggcggtcgtcgaaggcatagacaccaatattcccctgcaccgggacttgctggccgacccggtgttctgcgagggcggcgccggcatccactaccttgaagactggatcgccggccggcaacggcaatgcgacacggtctga

SEQ ID NO: 9649 - protein, 454 aa, Bordetella bronchiseptica RB50
MFRKVLISNRGEIAQRIQRACHQLGIQTVVVYSEADRDAAYVRHADDALCIGPAPSARSYLQAPAIIGAARLTGADAIHPGYGFLSENAGFAEAVQAAGLAFIGPTPAAIRTMGDKVQAKRAMQQSGVPCVPGSQGVLPDDPGAIAEQARAIGFPLIVKAAGGGGGRGMRVVEHEAALHGAVQTTRAEALAAFGNPDLYMERFLQRPRHIEIQVLADHHGNAVWLGERDCSMQRRHQKILEESPAPGLDPAAVEAIGQRCAHACRAIGYRGAGTFEFLYEDGQFYFIEMNTRLQVEHPITELTTGIDIVQAQIRIAAGEPLPWTQEQVRRRGHAIECRINAENPATFMPSPGRIAQWLPPGGPGVRVDSHAYAGYVVPAHYDSMIGKFIAFGDDREQALARMRVALREAVVEGIDTNIPLHRDLLADPVFCEGGAGIHYLEDWIAGRQRQCDTV

SEQ ID NO: 9650 - DNA, 2022 bp, Bordetella bronchiseptica RB50
  CDS (1)..(2022): transl_table=11
gtgttctccaccctgctgattgccaaccgcggcgaaatcgcctgccgcgtcgccgccaccgcccgccgcatgggccttcgcaccgtcgccgtctattcggatgccgacgccaacgcgcgccatgtggccgcctgcgatgtcgccgtgcatatcggcggcgccgagccgcgcgccagctacctgcgcgccgatgccatcctgcaggccgcgcgcgacaccggcgcgcaagccatccaccccggctacggcttcctgtccgaaaacgaaggctttgccgaagccgtggcgcaggccggcatggtgttcgtcggcccgccggccggcgcgatcgccgccatgggcagcaaatcggccgccaaggcgctgatggagcgcgccggcgtgccgctggtgcccggctaccatggcgaggaccaggatccgcagttcctccggcagcaggccgacgccatcggctacccggtactgatcaaggccagcgccggcggcggcggcaagggcatgcgcgtggtcgaggagagcgccgccttcgccgacgcgctggcctcgtgccagcgtgaagccagcgccagcttcggcgatgaccgcgtgctcatcgagcgctacctgcagaagcctcgccacatcgaaatccaggtgttcgccgacagccacggcaattgcgtctacctgttcgaacgcgactgttccgtgcagcggcgccaccagaaagtcatcgaggaagcgcccgcgccgggcatgacgccggaacgccgccgcgccatgggcgaggcggcggtggcggcggcgcgcgcggtgggctacgtaggcgcgggcaccgtcgagttcatcgccgaacccgacggccgcttctacttcatggaaatgaatacacggctgcaggtggagcacccggtcaccgaaatgatcaccggccatgacctggtcgaatggcaattgcgcgtggccgccggccagccgctgccggccgcccaggacgaactgcgcctggacggccacgccatcgaggcgcgcatctacgccgagaacccggaaaagggcttcctgccgtcgatcggcacgctggcctacctgggcctgcccgcgcacacggccttcgccaacggcgaggtgcgcgtcgacggcggcgtgcgcatgggcgacacgatcacgccctattacgaccccatgatcgccaagctgatcgtccatggcgccgaccgcgagcaggcgcgcgcgcgcatgatccaggcgctggcgcacacccaggccgtcggcgtgcagacaaacgccgccttcctgggccgcctgatgcgcgacgaggccttcgccacggccgacctcgataccggcctgatcgaacgccgccgcgccacgctgctgcccgaaccgcaatcggccggcgccgacgtgctggccctggccagcgccgccgtgctggtgcgccagggcctggcccagccgcaaggcgaggccggcaaggcggccgacccctgggacgcgcgcgacggctggcggctgggcggccgctaccggcagaccctgtgctgggtcgacaacggcgaacggcgcgacatcgagatcacgcgcgagggcgggcaatggcgcatcggcgccgcgcccgcggccggccaggccttctcctggcgtgcccagcccagcgccaacccccagctcagctacggcctgcgcatcacgctggatggccgggaaagcgccggcaccgtggtcctgcatgccggcaaggcctatgtgttccacgacggcgccacccatatcctggacctgtacgatgccctggcgcatgcccaggacgatgccgagggccatggcggcggcctgaccgcacccatgcccggcaagatcatctcgatcgcgatcgccgtgggcgacaaggtcgagaagggccaggcgctgctggtgatggaggccatgaaaatggagcacaccatcacggcgccggccgccggcgaagtcgccggcctgttctatgccgtgggcgaccaggtcggcgaaggcgccgcgctgatcgaagtgaagtga

SEQ ID NO: 9651 - protein, 673 aa, Bordetella bronchiseptica RB50
MFSTLLIANRGEIACRVAATARRMGLRTVAVYSDADANARHVAACDVAVHIGGAEPRASYLRADAILQAARDTGAQAIHPGYGFLSENEGFAEAVAQAGMVFVGPPAGAIAAMGSKSAAKALMERAGVPLVPGYHGEDQDPQFLRQQADAIGYPVLIKASAGGGGKGMRVVEESAAFADALASCQREASASFGDDRVLIERYLQKPRHIEIQVFADSHGNCVYLFERDCSVQRRHQKVIEEAPAPGMTPERRRAMGEAAVAAARAVGYVGAGTVEFIAEPDGRFYFMEMNTRLQVEHPVTEMITGHDLVEWQLRVAAGQPLPAAQDELRLDGHAIEARIYAENPEKGFLPSIGTLAYLGLPAHTAFANGEVRVDGGVRMGDTITPYYDPMIAKLIVHGADREQARARMIQALAHTQAVGVQTNAAFLGRLMRDEAFATADLDTGLIERRRATLLPEPQSAGADVLALASAAVLVRQGLAQPQGEAGKAADPWDARDGWRLGGRYRQTLCWVDNGERRDIEITREGGQWRIGAAPAAGQAFSWRAQPSANPQLSYGLRITLDGRESAGTVVLHAGKAYVFHDGATHILDLYDALAHAQDDAEGHGGGLTAPMPGKIISIAIAVGDKVEKGQALLVMEAMKMEHTITAPAAGEVAGLFYAVGDQVGEGAALIEVK

SEQ ID NO: 9652 - DNA, 1965 bp, Chromobacterium violaceum ATCC 12472
  CDS (1)..(1965): transl_table=11
atgttcaaacgaattttgatcgccaaccgcggcgagatcgcccgccgcatcgcccgcagctgccagcggctgggcatagagtttgtcgccgtccactcctgcgccgacgccggagccgagcatctgcggggcgccgtcgcgcgcgaatggataggcgaggccccggccagcgccagctatctgaacggccaggccatcatagacgccgcgctgcgcagcggctgcgaggccatccaccccggctacggcttcctgtcggaaaaccccggcttcgccagcgcggtggccgaggccggcctggtcttcatcggcccggacgcggacaccatcgtccagatgggcgacaaggcccgcgcgcggcaattgatggaggccgccggcgtgccggtgctgcccggctcgcccgaggccaccgaatcctacggcttgatcctggagacctgcgccgagatcggctatccggtgatactcaagccgtctgccggcggcggcggcaagggtatgcaggtggtgtggagcgaggcggaactgcgcgaggcggtggacgccgccgtgcgcatcggccgctccagcttcggcgatggccggctgctggtggagcgctacgtctcccagccgcgccacctggaagtgcagatcttcggcgacgggcgcggcgcggccgtgcacctgttcgaacgcgagtgctcgctgcagcgccgccatcagaaaatcgtcgaggaagcgcccgcctgcggcctgccggccgacacccgcgaggccctgctggcggccgccgtgcgcggcgcccaggcgataggctaccgcaacgccggcaccttcgagttcatcctggcgccggacggccgcttctacttcctggaagtgaacacccggctgcaggtggagcatccggtgaccgaggccatcaccggccaggacctggtggaatggcagctgcgcatcgccgccggcgagggcctgccgctggcccaggccgacatctgcgccgacggccacgccatcgaatgccgcgtgtacgccgaagacccgctgcgcgaattcgcgcccatgcccggtaccgcgctgcacgcgcgctggccggcgcagctgcgcgtggatgccgctttcgaccacggcggcgcggtgcctgccttctacgaccccatgctggccaagctgatcgcgcacggcgccggccgcgccgcggcgctggcgcagttgcagaccggcctgcgcgacaccgagctcctgggcctgaccagcaatctgggctttctgcagcggctgctgcgcgagccgcgggtgcaggccggccagctgcacacccatctggtggacgagctggcggcggcgccggaggccaatcgcctcacgtgcgccgtggcctgcgccgccgccatccgcctggcgctggcctgcgccgaatccgcctcgccctggcagggcggcgtcggcgcctacgaccgcgccgcactggacccggacgcgccgttgggccggatggcctatcgcggcggcgccgagcgctgccaggcctggctgctggagcgcgacgcggagcggaccctggtgcaagtggacgggcggcgccatgccgtcagcctgtccggcgccggcgagcattggcagggcgaggtggacggctggcgctggtacgcgctgctgcgcggcgacgatgtcgagctgagcgtcggcggccagcgcgtcgccctgcgcgccgagctggcggaacaggccgagcaggaggctggcggcggcctgcaggtgcgcacgccgatgcccggcaccgtggtggccttgccgctggcggcgggcagccgggtggaagcccagcaggtggtggccatcgtggaggcgatgaagatggaaaaccgcctgtacgccccctgcgccggcatcgtggccgagctgcactgccaggtcggcgacatcgtcaatgccgatgcgctgctggtcagcctgggccaggcggaggccgagtag

SEQ ID NO: 9653 - protein, 654 aa, Chromobacterium violaceum ATCC 12472
MFKRILIANRGEIARRIARSCQRLGIEFVAVHSCADAGAEHLRGAVAREWIGEAPASASYLNGQAIIDAALRSGCEAIHPGYGFLSENPGFASAVAEAGLVFIGPDADTIVQMGDKARARQLMEAAGVPVLPGSPEATESYGLILETCAEIGYPVILKPSAGGGGKGMQVVWSEAELREAVDAAVRIGRSSFGDGRLLVERYVSQPRHLEVQIFGDGRGAAVHLFERECSLQRRHQKIVEEAPACGLPADTREALLAAAVRGAQAIGYRNAGTFEFILAPDGRFYFLEVNTRLQVEHPVTEAITGQDLVEWQLRIAAGEGLPLAQADICADGHAIECRVYAEDPLREFAPMPGTALHARWPAQLRVDAAFDHGGAVPAFYDPMLAKLIAHGAGRAAALAQLQTGLRDTELLGLTSNLGFLQRLLREPRVQAGQLHTHLVDELAAAPEANRLTCAVACAAAIRLALACAESASPWQGGVGAYDRAALDPDAPLGRMAYRGGAERCQAWLLERDAERTLVQVDGRRHAVSLSGAGEHWQGEVDGWRWYALLRGDDVELSVGGQRVALRAELAEQAEQEAGGGLQVRTPMPGTVVALPLAAGSRVEAQQVVAIVEAMKMENRLYAPCAGIVAELHCQVGDIVNADALLVSLGQAEAE

SEQ ID NO: 9654 - DNA, 1356 bp, Chromobacterium violaceum ATCC 12472
  CDS (1)..(1356): transl_table=11
atgttcgaaaaaattctgatcgccaaccgtggtgaaatcgcgctgcgcattcaacgcgcctgccgtgaaatgggcatcaagaccgtggtcgtgcactccgaagccgaccgcgaagccaaatacgtgaagctggccgacgaatcggtctgcatcggccccgcgccgtcggccaagagctacctcaacgtgccggcgctgatcgccgccgccgaggtcaccgacgcccaggccatccaccccggctacggcttcctgtcggaaaacgccgacttcgccgagcgcgtcgagcagtccggcttcgtgttcatcggcccgcgccccgacaccatccgcatgatgggcgacaaggtgtcggccaagcacgcgatgatcgaggccggcgtgccctgcgtgcctggctccgacggcgcgctgccggacgacccggccgaaatcgtcaagatcgccaagaagatcggcttcccggtcatcatcaaggcggctggcggcggcggcggccgcggcatgcgcgtggtccacaccgagggcgcgctgatcaactcggtgcagatgacccgcaccgaagccggcgccgcgttcggcaatcccaccgtgtacatggaaaaattcctggagttgccgcgccacatcgaaatccagatcctggccgacgaatacggcaacgccatctacctgggcgagcgcgactgctcgatgcagcgccgccaccagaagatcatcgaggaggcgccggcgcccggcatcaccgacaagcaacgccagaagatcggcgaagcctgcgccgaagcctgccgccgcatcggctaccgcggcgccggcaccttcgaattcctgtacgagaacggcgagttctacttcatcgaaatgaacacccgcgtgcaggtggagcacccggtgaccgaaatgatcaccggcgtggacatcgtgcaggagcagatccgcatcgctgcgggcgagaaactgcgctataagcaaaaggacatcgtgctcgccggccacgcgatggaatgccgcatcaatgccgaggacccgttcaccttcgtgccgtccccgggcaagatcgagagctaccacccggccggcggccccggcatccgcatcgattcgcacatctaccagggctacaccgtgccctcgcactacgattcgatggtgggcaagctgatcgcctacggcgacacccgcgaccaggcgatggcgcggatgcgcgtggcgctgtcggagatggcgatctccggcatcaagaccaacatcccgctgcaccaggagctgttcctggatgcggccttccagcgcggcggcaccagcatccattacctggagcaccggctgcagcagaagaaaggggaagcctga

SEQ ID NO: 9655 - protein, 451 aa, Chromobacterium violaceum ATCC 12472
MFEKILIANRGEIALRIQRACREMGIKTVVVHSEADREAKYVKLADESVCIGPAPSAKSYLNVPALIAAAEVTDAQAIHPGYGFLSENADFAERVEQSGFVFIGPRPDTIRMMGDKVSAKHAMIEAGVPCVPGSDGALPDDPAEIVKIAKKIGFPVIIKAAGGGGGRGMRVVHTEGALINSVQMTRTEAGAAFGNPTVYMEKFLELPRHIEIQILADEYGNAIYLGERDCSMQRRHQKIIEEAPAPGITDKQRQKIGEACAEACRRIGYRGAGTFEFLYENGEFYFIEMNTRVQVEHPVTEMITGVDIVQEQIRIAAGEKLRYKQKDIVLAGHAMECRINAEDPFTFVPSPGKIESYHPAGGPGIRIDSHIYQGYTVPSHYDSMVGKLIAYGDTRDQAMARMRVALSEMAISGIKTNIPLHQELFLDAAFQRGGTSIHYLEHRLQQKKGEA

SEQ ID NO: 9656 - DNA, 1347 bp, Wolinella succinogenes DSM 1740
  CDS (1)..(1347): transl_table=11
atgcaaaagaagaagctagagaggattctcatcgccaatcgaggcgagatttcgcttcgagcgattcgcacgattcgcgagatgggcaagaagtctatcgcggtctattctacggctgatagagaggcaaactatctggatgtggctgacgctaaagtctgcatcggaggggataaatcaagcgagagctatcttaatatccccgcgattatctcagccgctgagctttttgaagcggatgcgatcttccctggatatggctttttgagtgaaaatcaaaattttgttgagatttgtcagcatcacggaatcgaattcatcggacccacgcctgaggtgatggtgctcatgagtgataagagcatggccaaagaggtgatgaaaaaggcgggtgtgcccgtgattcccggaagcgaaggcgcgctgagtggctacgaagaggccaaagaagaggcgaaaaagatcggctaccccgtgattcttaaagcttctgcgggaggaggggggcgagggatgagaatcgtcgaaaaagaggagaatctcatcaactcttatctagccgccgagagtgaagccctaagtgcctttggcgatgggactatctatatggagaagttcatcgataagcccaagcatatcgaggtgcaggtgcttgccgataagcatggcaacgctattcatgtgggagagcgagactgctctttgcagagacgccatcaaaaactcatcgaagaatcgcccgcactcgcccttcttccagagactcgcgagaagcttcttaaaaccgccattgaggccactaaagcgatcaagtatgtgggcgcgggaacctttgaatttttgcttgattccaaccaaaacttctatttcatggagatgaacactcgacttcaggtcgaacatcctgtgagcgagatggtgagtggattggatattgtagagtggatgattaaaatcgctgagggcgaagagctcccccctcaagaagagattcgctttaaaggtcatgcgattgagtgccgtatcaccgctgaagatccagagaagtttttcccttgtccaggaaagattaccaaatggatcgccccagggggcaactatgtgcgagtcgattctcacgcctatgcgggatatacggtgcccatgcattatgattcgatgattggaaagctgatcgtttggggtgagacgcgagatagagcgatcgctaggatggcgcgagctttgagtgagtttagtgttgaagggattaggacgacgatccctttccatcaaaagatgatggaaaatgtcgattttaaagaaagcaagattcatacgaagtatttggaacagaaggtgctttaa

SEQ ID NO: 9657 - protein, 448 aa, Wolinella succinogenes DSM 1740
MQKKKLERILIANRGEISLRAIRTIREMGKKSIAVYSTADREANYLDVADAKVCIGGDKSSESYLNIPAIISAAELFEADAIFPGYGFLSENQNFVEICQHHGIEFIGPTPEVMVLMSDKSMAKEVMKKAGVPVIPGSEGALSGYEEAKEEAKKIGYPVILKASAGGGGRGMRIVEKEENLINSYLAAESEALSAFGDGTIYMEKFIDKPKHIEVQVLADKHGNAIHVGERDCSLQRRHQKLIEESPALALLPETREKLLKTAIEATKAIKYVGAGTFEFLLDSNQNFYFMEMNTRLQVEHPVSEMVSGLDIVEWMIKIAEGEELPPQEEIRFKGHAIECRITAEDPEKFFPCPGKITKWIAPGGNYVRVDSHAYAGYTVPMHYDSMIGKLIVWGETRDRAIARMARALSEFSVEGIRTTIPFHQKMMENVDFKESKIHTKYLEQKVL

SEQ ID NO: 9658 - DNA, 1350 bp, Gloeobacter violaceus PCC 7421
  CDS (1)..(1350): transl_table=11
gtggtctattttcgcaagattttgattgccaaccggggcgaagtggcgctgcgcatcctgcgcacctgcagcgaactcggtatcggcaccgtggcggtacactcgacggccgacgccctctcgctgcacgtgcaactggccgaccaggcggtgtgcatcggcgaaccgatggccagcaagagctatttgagcattccgaatttgatctcggcggccctgacgcgcgactgcgacgccgtccacccgggctacggttttttgtcggaaaacgagcgcttcgctgaaatctgcgccgatcacggcctcacttttattggcccttcgccccgggcgatggtgctgatgggcgacaaatccaccgcccgcgacacgatgaaggcggcgggggtgcccaccgtacccggctccgaggggctcatcgacagtgaacaagaagcctacgaggcggccaaagcgattggctacccggtgatgatcaaggcgacggccgggggcggcgggcgcggcatgcgcattgcgggcaacgagcgcgacctcatcaaaatggtccagaccgcccagcgcgaggcggaggcggccttcggcaaccggggggtctacatcgagaagtacctcgaagaaccccggcacatcgaatttcagattctcgccgaccagcacggcaacgtcgtgcacctgggcgagcgcgactgctcgatccaaaggcgccaccagaaattgctcgaagaatcccccagcccctttctcacccccgcgatgcgcgagcgcatgggggaggcggccctacaggcggcgaggtcgatcaactacgtgggggcgggcaccatcgagtttctggtcgacaaaaagggcgacttttacttcatggagatgaacacccgcatccaggtggagcacccggtcaccgagatgcgcacgggtatcgatctgatcgccgagcagatccggatcgccgccggggagccgttgggctacacccagtccgacatccgcatggaaggccacgccatcgagtgccggatcaactgcgaggatcccaataatgactttcggcccaccccgggcacgatcagcgcctatctggcgccgggtggtccgggggtgcgcatggattctcacctgtacccgggctataaggtgccgtcccactacgattcgctcttgggcaagctgatcgtctggggccgcaaccgcgacgaggccatccgccgcatgcgccgggcgctcgccgagtgtgcgatcaccggggtaccgaccaccattccctttcacctgcgggtgctcgacaacgcctggttcctgcgcggcgacgtctacaccaactttgtccagcgacggatgagcgagtga

SEQ ID NO: 9659 - protein, 449 aa, Gloeobacter violaceus PCC 7421
MVYFRKILIANRGEVALRILRTCSELGIGTVAVHSTADALSLHVQLADQAVCIGEPMASKSYLSIPNLISAALTRDCDAVHPGYGFLSENERFAEICADHGLTFIGPSPRAMVLMGDKSTARDTMKAAGVPTVPGSEGLIDSEQEAYEAAKAIGYPVMIKATAGGGGRGMRIAGNERDLIKMVQTAQREAEAAFGNRGVYIEKYLEEPRHIEFQILADQHGNVVHLGERDCSIQRRHQKLLEESPSPFLTPAMRERMGEAALQAARSINYVGAGTIEFLVDKKGDFYFMEMNTRIQVEHPVTEMRTGIDLIAEQIRIAAGEPLGYTQSDIRMEGHAIECRINCEDPNNDFRPTPGTISAYLAPGGPGVRMDSHLYPGYKVPSHYDSLLGKLIVWGRNRDEAIRRMRRALAECAITGVPTTIPFHLRVLDNAWFLRGDVYTNFVQRRMSE

SEQ ID NO: 9660 - DNA, 1350 bp, Photorhabdus luminescens subsp. laumondii TTO1
  CDS (1)..(1350): transl_table=11
atgcttgataaaattgtaattgctaaccgtggtgaaattgccctgcgtatcctacgagcttgtaaagagttggggatcaaaaccgttgcggtacattcctccgcggatcgtgacttaaaacacgtactgctggcagacgaaactatctgtattggcccggcagcttctgcaaaaagctacctgaatatcccggcaattatttctgcggcagaaatcacgggtgctgtggctattcaccctggctacggttttctatctgaaaatgcagattttgctgaacaggttgagcgttctggctttatttttatcggcccaaaagcagaaacgatccgcctgatgggtgataaagtttctgctatcaatgcgatgaaaaaagcaggcgttccttgtgtacctggctctgatggcccattgtctgatgacacggagaaaaacaaagccttcgctaaacgcattggctatcctgtcatcatcaaagcatccggcggcggcggcggtcgcggtatgcgcgtcgtccgcagtgataaagatctggaacaatcaatcaatatgacccgtgcggaagcaaaagctgctttcaataacgatatggtttacatggaaaaattccttgagaatccacgtcatattgagatccaagtattggctgacggccaaggtcaagcaatttatctggctgagcgtgattgctccatgcaacgccgtcaccagaaagttgtcgaagaagcccctgcaccaggaatcacgccagaaatgcgtcgcagtattggtgaacgctgtgctaacgcatgtatcgaaattggctatcgtggtgccggtactttcgaattcctgtatgaaaacggtgaattctatttcattgagatgaatacccgtattcaggttgaacatccagttacggaaatgattaccggtgttgatctgattaaagagcagttgcggattgccgcaggtatgccactttcaattaagcagaaagatgttgttattcgtggtcacgctattgaatgtcgtatcaatgccgaagatccgaacacattcctgccaagcccaggtaaaattacccgcttccactcgccgggtggatttggtgtgcgttgggaatcgcatatttatgctggctacaccgttcccccttactatgattcaatgattggtaagctgattacttacggtgaaaatcgtgacaatgccattgcccgcatgaaaaatgcattggcagaattgatcattgatggcatcaagacaaatatcgagcttcaacaggcgataatgaatgatgaaaactttcagaatggcggtactaatatccactatctggagaaaaaactggggttacaggaaacttaa

SEQ ID NO: 9661 - protein, 449 aa, Photorhabdus luminescens subsp. laumondii TTO1
MLDKIVIANRGEIALRILRACKELGIKTVAVHSSADRDLKHVLLADETICIGPAASAKSYLNIPAIISAAEITGAVAIHPGYGFLSENADFAEQVERSGFIFIGPKAETIRLMGDKVSAINAMKKAGVPCVPGSDGPLSDDTEKNKAFAKRIGYPVIIKASGGGGGRGMRVVRSDKDLEQSINMTRAEAKAAFNNDMVYMEKFLENPRHIEIQVLADGQGQAIYLAERDCSMQRRHQKVVEEAPAPGITPEMRRSIGERCANACIEIGYRGAGTFEFLYENGEFYFIEMNTRIQVEHPVTEMITGVDLIKEQLRIAAGMPLSIKQKDVVIRGHAIECRINAEDPNTFLPSPGKITRFHSPGGFGVRWESHIYAGYTVPPYYDSMIGKLITYGENRDNAIARMKNALAELIIDGIKTNIELQQAIMNDENFQNGGTNIHYLEKKLGLQET

SEQ ID NO: 9662 - DNA, 1347 bp, Vibrio vulnificus YJ016
  CDS (1)..(1347): transl_table=11
atgctagataaagtagtcatcgcgaaccgaggtgaaatcgcacttcgtatccttcgcgcgtgtaaagaactcggcatcaaaactgttgccgtgcactccaccgccgatcgcgatctaaaacacgtactgctggcagatgaaactgtgtgtatcggtcctgctcgtggtatcgacagctatctgaacattcctcgcattatttcagcagcagaagtgactggcgcggtggcgatccacccaggttacggtttcttgtctgaaaacgcagactttgctgaacaagtagaacgtagcggtttcatctttgtgggtccaaaagcggacaccatccgcatgatgggtgacaaagtatcggctatcactgcaatgaaaaaagcgggcgttccatgtgtacctggttctgatggtccacttgataacgacgaagtgaaaaaccgagcacacgcgaaacgtattggttacccagtgatcatcaaagcctctggtggcggtggtggtcgtggtatgcgtgtggttcgtaaagaagcagacctcgttcaagcaattgccatgacgcgtgcagaagcaaaagcagcattcaacaacgacatggtttacatggagaaattcctagaaaacccacgtcacgttgaagttcaagtgattgcagatggccaaggcggcgctattcacctaggtgagcgtgactgttcaatgcagcgtcgtcaccaaaaggttgttgaagaagctccagctccaggtattactgaagagatgcgtaagtacatcggcgaacgttgtactcgtgcatgtctagagatcggttaccgcggtgcaggtacattcgaattcctctacgaaaacggcgagttctacttcattgaaatgaacacccgtattcaggtagaacacccagtgactgaaatggtgactggtgttgacctgatcaaagaacagctgcgcgttgcggcgggccagcctctgtcattcacgcagaatgacattaagatccgtggccatgcgattgagtgtcgtatcaacgcggaagacccagagcgcttcctaccgtctccaggtaagattgaacgcttccacgcaccaggcggtatgggtgttcgttgggaatcgcacatctacagcggctacaccgtgccaccgcactacgactcaatgatcggtaagctgatcacttacggtgaaaaccgtgacgttgcgattgcacgtatgaagaacgccctgggtgagatgttcattgaaggcatcaagaccaacattccgctgcaagtgagcatcatgaacgatgaaaacttccagcacggtggtgccaacatccactacctagagaaaaaactcggccttcagcactaa

SEQ ID NO: 9663 - protein, 448 aa, Vibrio vulnificus YJ016
MLDKVVIANRGEIALRILRACKELGIKTVAVHSTADRDLKHVLLADETVCIGPARGIDSYLNIPRIISAAEVTGAVAIHPGYGFLSENADFAEQVERSGFIFVGPKADTIRMMGDKVSAITAMKKAGVPCVPGSDGPLDNDEVKNRAHAKRIGYPVIIKASGGGGGRGMRVVRKEADLVQAIAMTRAEAKAAFNNDMVYMEKFLENPRHVEVQVIADGQGGAIHLGERDCSMQRRHQKVVEEAPAPGITEEMRKYIGERCTRACLEIGYRGAGTFEFLYENGEFYFIEMNTRIQVEHPVTEMVTGVDLIKEQLRVAAGQPLSFTQNDIKIRGHAIECRINAEDPERFLPSPGKIERFHAPGGMGVRWESHIYSGYTVPPHYDSMIGKLITYGENRDVAIARMKNALGEMFIEGIKTNIPLQVSIMNDENFQHGGANIHYLEKKLGLQH

SEQ ID NO: 9664 - DNA, 1353 bp, Rhodopseudomonas palustris CGA009
  CDS (1)..(1353): transl_table=11
atgttcgataaaatcctgatagctaatcgcggcgagatcgccctgcgcgtgctacgcgcgtgcaaggagctcggcatcgctacggtcgcggtccactccaccgccgacgccgacgcgatgcacgtccgcctcgccgacgagagcgtgtgcatcggcccgccgccgtccaaggacagctacctcaacgtgccggcgctgctcgccgcctgcgagatcaccggcgccgatgcggtgcatccgggctacggcttcctgtccgagaacgcccgcttcgccgaaatcctctccgaccacaatcttcacttcatcggaccgaaggccgaacacatccggctgatgggcgacaagatcgaggccaagaagaccgccaagaggctcggcattccggtggtcccgggctccgacggcggggtcggcccagatgacgatgcgatggcgatcgccaaggaaatcggcttcccggtgctggtcaaagccgcagcgggcggcggcggccgcggcatgaaggtcgcccacaccgccgaagacctggcgctggcgatctccaccgccggcaacgaggccaaggccgcgttcggcgacgcctcggtgtatcttgaaaagtacctgcagaagccgcgccacatcgaaatccaggtgctcggtgacggccgcggcggtgcgatccatctcggcgagcgcgactgctcgctgcagcgccggcatcagaaggtgtgggaggaaagcccctcgccggtgatcagcccggaggcgcgcgcccggatcggcgggatctgcgccaaggcgatgcaggacatgcagtatctcggcgtcgggacgatcgagttcctgtacgaggacggcgagttctatttcatcgaaatgaacacccgcatccaggtcgagcatccggtcaccgagatgatcaccggtatcgatctggtgctggagcagatccggattgccgccggcggcgacctgccggtgacgcaggacgaaatcaccctcaacggtcatgccatcgagtgccgggtcaacgccgagaacccggtgaccttccggccgtcgcccggcaagatctcgcgctatcatccgcccggcggcctcggcatccggatcgattccgcagtgtatcagggctacacgatcccgccctattacgactcgctggtcggcaagctgatcgtccacggcaaaacccgcggcgagtgcctgatgcggctgcgccgcgcgctcgacgagatggtggtggacggcatcgagaccacgctgccgctgttccgcgccctggtgcgtgagccgtcgatcatcgacggcgactaccacatccattggctggagcagtatctggcttcaggcgatcctgcaggttag

SEQ ID NO: 9665 - protein, 450 aa, Rhodopseudomonas palustris CGA009
MFDKILIANRGEIALRVLRACKELGIATVAVHSTADADAMHVRLADESVCIGPPPSKDSYLNVPALLAACEITGADAVHPGYGFLSENARFAEILSDHNLHFIGPKAEHIRLMGDKIEAKKTAKRLGIPVVPGSDGGVGPDDDAMAIAKEIGFPVLVKAAAGGGGRGMKVAHTAEDLALAISTAGNEAKAAFGDASVYLEKYLQKPRHIEIQVLGDGRGGAIHLGERDCSLQRRHQKVWEESPSPVISPEARARIGGICAKAMQDMQYLGVGTIEFLYEDGEFYFIEMNTRIQVEHPVTEMITGIDLVLEQIRIAAGGDLPVTQDEITLNGHAIECRVNAENPVTFRPSPGKISRYHPPGGLGIRIDSAVYQGYTIPPYYDSLVGKLIVHGKTRGECLMRLRRALDEMVVDGIETTLPLFRALVREPSIIDGDYHIHWLEQYLASGDPAG

SEQ ID NO: 9666 - DNA, 1341 bp, Geobacter sulfurreducens PCA
  CDS (1)..(1341): transl_table=11
atgtttcataaagttctgattgcaaatcgtggcgaaatcgccctgagggtcatccgggcctgcaaagagctgggaatcaagaccgttgccgtctactcgacagcggacagggattcgctccatgtgaagctcgcggatgagagtgtctgcatcggtcccgcgccgagcctgcagagctatcttaatattaacgccatcatttcggctgccgaattgaccgatgccgaggcaatccaccccggctacggttttctgtcggaaaatgccgcttttgccgaaatctgtgaaaactgcggtataaccttcatcggcccctcttcacaaagcatgcgcatcatgggcgacaagatcagcgcccggcaggcggtgatcaaggaaaatgtgccgatcctgcccggcaccaaggagggggttaacgacgtcaacgaggcggtgaagatcgccaagaagatcggcttccccgtcatcatcaaggcgactgccggaggcggtggccgggggatgaagatcgtgcactccccggcggccctccccaacgcctttgccacggctcgcgccgaggctcaggccggtttcggcaaccctgaggtctacattgagaagtattgcgagaagccgcgccacgttgagatccaggtcatggccgacaagcacggtaacgtgattcacctgggtgagcgggactgctccatccagcgtcgccaccagaagatcatcgaggagtcgccgtgcccggtcatgactcctgcactccgcaaggccatgggtgatgcggctgttcgcgcgtccaaggcagtggggtacgacagtgtcggcaccgttgagttcctggtggacaaggacctcaacttctatttcatggaaatgaatacccgggtgcaggttgagcatccggtgaccgaaatggtgaccggcatcgacatcgtccgggagcagatccgttctgcagccggtctcaagcttcgttacaagcaaagcgacattaaactgcacggtcacgctattgaatgccgtatcaatgctgaagatccggtgaagttcaccccgtcgccgggcaagatcgtcggttaccataccccgggaggtctgggtgtgcggatcgattctttcgtctatgatcagtattccgtggtcccccactacgactcgctcatagcgaagctgatcgtccacgcagagaccagggaagacgccatccgccgcatggcccgcgcccttgacgagtacatcattgagggcatcaagaccacaatccccttccataagaggatcatggacaacaaagactttatggaggggaatgtcgacaccggcttcctcgagcgaatcgtgctggagtag

SEQ ID NO: 9667 - protein, 446 aa, Geobacter sulfurreducens PCA
MFHKVLIANRGEIALRVIRACKELGIKTVAVYSTADRDSLHVKLADESVCIGPAPSLQSYLNINAIISAAELTDAEAIHPGYGFLSENAAFAEICENCGITFIGPSSQSMRIMGDKISARQAVIKENVPILPGTKEGVNDVNEAVKIAKKIGFPVIIKATAGGGGRGMKIVHSPAALPNAFATARAEAQAGFGNPEVYIEKYCEKPRHVEIQVMADKHGNVIHLGERDCSIQRRHQKIIEESPCPVMTPALRKAMGDAAVRASKAVGYDSVGTVEFLVDKDLNFYFMEMNTRVQVEHPVTEMVTGIDIVREQIRSAAGLKLRYKQSDIKLHGHAIECRINAEDPVKFTPSPGKIVGYHTPGGLGVRIDSFVYDQYSVVPHYDSLIAKLIVHAETREDAIRRMARALDEYIIEGIKTTIPFHKRIMDNKDFMEGNVDTGFLERIVLE

SEQ ID NO: 9668 - DNA, 2016 bp, Mycobacterium avium subsp. paratuberculosis K-10
  CDS (1)..(2016): transl_table=11
gtgttcgaaacggtattggtggccaaccgcggcgagatcgcggtgcgggtgatccgcaccctgcaccggctgggcatccggtcggtcgccgtctacagcgatcccgacgccactgcgcggcatgtgctcgaggccgacgaagcggtgcggctggggccggccgcggcgcgggacagctacctgaacatcgacaaggtcgtcgaggcggcgacgcgcaccggggcgcaggcgatccatcccgggtacggattcctctccgagaacgccgatttcgctgcggcatgcgaacgggccggggtggtgttcctcggcccgccggcacgggcgatccaggtgatgggcgacaagatcaccgccaagaacgccgtcgccgaattcgacgtcccggtggtgcccggggtggccaaactggggctgggcgacgacgaattggtggccgccgccgacgagatcggctacccggtgctgatcaagccgtcggcgggcggcggcggcaagggcatgcgcctggtggaagaaccgggcaggctgcgcgaggcgctggtgggcgcgcggcgcgaggccgcctcgtcgttcggcgacgacacgctgtttctggaacggtttatgttgcgccccaggcacatcgaggtgcagatcctggccgacgcgcacggcaacgtcgtgcatctcggcgaacgcgagtgcagcctgcagcggcgccatcaaaaggtcatcgaggaggcgccgtcgccgctgctcgacccggagacgcgggcgcggatcggggcggccgcctgcaataccgcccgcagcgtcgactacgtcggcgccggcacggtggagttcatcgtctccgccgatcggcccgacgagttcttcttcatggagatgaacacccggctgcaggtcgagcatccggtcaccgaggcggtgaccgggctggacctggtggaatggcagctgcgggtggccgccggcgagaagctggtgttcgcccaggacgacatcgaactgcgtgggcacgcgatcgaggcccgggtgtacgccgaggatccggcgcggggcttcctgcccaccggcggccgggtgctcggcgtcttcgagccgtccggtgacggcgtgcgggtcgactcgtcgctgctgcccggcaccgtggtgggcagcgactacgacccgatgctgagcaaggtgatcgcccacggggccgaccgcgacgaggcgctggccagactcgaccgggcgttgagccacaccgcgatcctgggcgtccagaccaacgtcgagttcctgcgcttcctgctggccgacgaacgggtacgcgccggcgatctggacaccgcgctgctcgatgcgcggctggccgacttcgcgccgctgcccgcacccgacgacgtgctcgccgcggccgggctgtaccggcaatcggcgctggccgcccgggcccgccgcttcgccggcaacccctgggcggcgccgacggggtggcgggccggcggtagcccggcgccggtccgcaccgacatgcgcaccgcgctgcgcaccgagacggtgtcggtgtgggggccacccgaggccgccgaagtacaggtcggtgccggcgaaaggctttcggccagcgcgcatctcgggccggaccggatcagtgtgacgctggacggccggcgccgcgactaccgctgggccgaggccgaccggcacctgtggatcgccgacgagcgcggaacctggcacctgcgcgaggccgaacagaccaccattcaccgcgccgccggcccgcagcgggccgagatcctcagcccgatgccgggcagcgtgatcgccgtccaaaccccttcgggcagcgacgtttccgaaggcgacgtggtggtcgtcgtggaggcgatgaagatggagcactcgctggccgcgccggtttccggacgggtggaggtgctggtctgcgtcggcgaccaggtgagcgtggaccaggtgctggcccgggtggtgcccgaggaatccgacccgccggccgattcgagtaaggacgagacatga

SEQ ID NO: 9669 - protein, 671 aa, Mycobacterium avium subsp. paratuberculosis K-10
MFETVLVANRGEIAVRVIRTLHRLGIRSVAVYSDPDATARHVLEADEAVRLGPAAARDSYLNIDKVVEAATRTGAQAIHPGYGFLSENADFAAACERAGVVFLGPPARAIQVMGDKITAKNAVAEFDVPVVPGVAKLGLGDDELVAAADEIGYPVLIKPSAGGGGKGMRLVEEPGRLREALVGARREAASSFGDDTLFLERFMLRPRHIEVQILADAHGNVVHLGERECSLQRRHQKVIEEAPSPLLDPETRARIGAAACNTARSVDYVGAGTVEFIVSADRPDEFFFMEMNTRLQVEHPVTEAVTGLDLVEWQLRVAAGEKLVFAQDDIELRGHAIEARVYAEDPARGFLPTGGRVLGVFEPSGDGVRVDSSLLPGTVVGSDYDPMLSKVIAHGADRDEALARLDRALSHTAILGVQTNVEFLRFLLADERVRAGDLDTALLDARLADFAPLPAPDDVLAAAGLYRQSALAARARRFAGNPWAAPTGWRAGGSPAPVRTDMRTALRTETVSVWGPPEAAEVQVGAGERLSASAHLGPDRISVTLDGRRRDYRWAEADRHLWIADERGTWHLREAEQTTIHRAAGPQRAEILSPMPGSVIAVQTPSGSDVSEGDVVVVVEAMKMEHSLAAPVSGRVEVLVCVGDQVSVDQVLARVVPEESDPPADSSKDET

SEQ ID NO: 9670 - DNA, 2076 bp, Wolbachia endosymbiont of Drosophila melanogaster
  CDS (1)..(2076): transl_table=11
atgatagaaaagaagtacagtaagattttaatagcaaacagaggagagattgcctgcaggattatcagaactgcccataagatgggtatatcttgtgtgtgcatatactcggatgcagatgtaaattctgtgcatgtaagacaagcagatgagtcaagatatatcggcccttcgccatcttgcctcagttatttaaacattgaaaaaatatgtgaagtagcagttgaaacaggtgctgaggcagttcatcctggctatggttttttagcagagaatccagattttccacgtgctcttcaaaaacataatatagacttcatcggtcccagtgcagaaacaatagaagttacagccaacaaaataacagcaaaagaagctgcaagaaaagctggagtgaatgtagtgccaggatatatgggtaagatcagcaatgctgcccacgcagctcaagttgctaaagaggtcggttttcccgttatgctcaaagctgcatcaggcggtggtggcaaaggaatgcgaattgtaaactccaaaaaagaaattgaactagcatttacatcagccacaaatgaagcagagaaaagttttaaggatggcagtatctttatagagaaatatatagagttgccaagacatattgaaatacaaatcatagcagataaatatggcaatatagtttgtcttggagaaagagaatgctcgatacaaaggaataatcagaaaataatagaagaaacgccaagtccattcattagtgaagaagtaagacaaaaaatgtatgttcaatgtgtttctctggcaaagcaagttggctatttttcagcaggcactgttgagtttgttgtagatcaagaccaaaacttctattttcttgaggtaaatacgagattgcaagttgagcatccagtaacagaatttataactggaatagacatagtagaagaaatgattagaacttcctgtggagagaaattgagattcaatcaggatgatattaaacttactggttctgcaatagaaagtagaatttgcgctgaagacccatcgaagaaatttttcccttccagcggaagaataaaatattacgataaaccgggtgaaaatgattatgtaagaatagatgatggagttgctgcaggttcagaaattagcatgttctatgattcgatgattgccaaagtgataacatatggaaaagatagagtagaagcgatcagcagaatgcaaaaagcattgtctgaatgctatatagaaggagtaacaaataatatagaatttctagaatccatcttccatcacccaaattttatcgcagcaaagctccatacgagattcattccagatcattaccctagtgggtttcacggcgattttgttacagaggagtatattaaaatatttattttcactgcgttatatgttcatttggaaaatgaagaaaggtaccatcataaagcagtgaatgaaacatctcaggtgtcattccagtgcgtgacactggaatctagtaaaaaagaaggggcaccagtatcagctactcggatggcaggtgaccgtgcaagagatttattcatagtgaatataaatgacaatgagtactccgtaaatgcaaaataccaagataatatattaataacggtatataatcacaataaatactccgttataggcaagtggaaatcaagttatagattgctatatatcacaattaatgacgataccaatatagcacttaaaatagaaagacaaggcagcaagtacttcataaggcatgcaggcatgaaagctgagtgttgtatatttaagcctcatgtagctgaattaagtaggttaatgctaaataatgaaacagaagggatttcagcagatgctgtaaaatccccaatatctggtttattagttaaattgcacgtaaatgtaggagatcaggtggaaataggacaacctttatttgtggtggaggcaatgaaaatggaaaatatcatatgtgctgaagcagcaatggtgataaaaaatattcccgttcaagaaggaaaaaatgtgcagattggtgatgtagtctgctttcttaaataa

SEQ ID NO: 9671 - protein, 691 aa, Wolbachia endosymbiont of Drosophila melanogaster
MIEKKYSKILIANRGEIACRIIRTAHKMGISCVCIYSDADVNSVHVRQADESRYIGPSPSCLSYLNIEKICEVAVETGAEAVHPGYGFLAENPDFPRALQKHNIDFIGPSAETIEVTANKITAKEAARKAGVNVVPGYMGKISNAAHAAQVAKEVGFPVMLKAASGGGGKGMRIVNSKKEIELAFTSATNEAEKSFKDGSIFIEKYIELPRHIEIQIIADKYGNIVCLGERECSIQRNNQKIIEETPSPFISEEVRQKMYVQCVSLAKQVGYFSAGTVEFVVDQDQNFYFLEVNTRLQVEHPVTEFITGIDIVEEMIRTSCGEKLRFNQDDIKLTGSAIESRICAEDPSKKFFPSSGRIKYYDKPGENDYVRIDDGVAAGSEISMFYDSMIAKVITYGKDRVEAISRMQKALSECYIEGVTNNIEFLESIFHHPNFIAAKLHTRFIPDHYPSGFHGDFVTEEYIKIFIFTALYVHLENEERYHHKAVNETSQVSFQCVTLESSKKEGAPVSATRMAGDRARDLFIVNINDNEYSVNAKYQDNILITVYNHNKYSVIGKWKSSYRLLYITINDDTNIALKIERQGSKYFIRHAGMKAECCIFKPHVAELSRLMLNNETEGISADAVKSPISGLLVKLHVNVGDQVEIGQPLFVVEAMKMENIICAEAAMVIKNIPVQEGKNVQIGDVVCFLK

SEQ ID NO: 9672 - DNA, 1479 bp, Bdellovibrio bacteriovorus HD100
  CDS (1)..(1479): transl_table=11
atgaaaaagttcacacgtattgccatcgccaatcgcggtgaagtggctgttcgtattatcaaagcctgcgaggaaatgggtattgaaaccgttcttctgcactcagaagccgacatcaacacccgcgcttatcgtatggcgactaaaaccatctgcgtgggtcctgcggcaacggcggaaagttatctgaacattccagccaacatcaacggcgctttggccggtggtgcgcaagcggtgcatccgggttttggtttcctgtctgaaaacgccgatttcgcggaggctgtgaataaagccggtttgaccttcattggtccttctccggaagcgatccgtgctttgggtgacaaggttcactgtaaagagctggcaaagcaggcgggtttgccgctggtgccgggttatcagggtgaaaaccaggatgtggctcacttgatcacgcaggctgagaagatcggctatccggtgatcgtgaaagccgctgccggtggtggtggccgcgggatgaaacttttgaagtcttccgcagaagctcacgagctgattgaatccgcccagcgtgaagcacagtcggcttttggttctccgaaagtcttcctggaaaagtatctggatcgtgcaaaacacattgaattccaggtcttcggtgacagcaccggaaatgtgcagcacttctttgaccgcgaatgctctgttcagcgccgtcaccagaaaatcatcgaagaggcgacttcgccttctttgaccgatgatctgcgccgccgtatgggagaggcggcttgtgccattgcgactttgggcaaatacaaaggggcgggcacggtggaattccttctgcaagatggggagttctatcttttggaagtgaacactcgtttgcaggtcgaacacccggtgacggaagaagttctgggtgtggatctggtgaaaatgcagatcctgactgcgcagggtgatttcgttcatgacaacaaacagatccgcgcaccgaagggccattccatcgaatgccgtatctatgctgaaaatccattcctgggtggcgttccttccacaggtcttttgggtcatgtggaatggccggaaggtccgggccgtcgttatgaatacggctttgattccggcgacaccattacgccgtactatgacccgatgattgccaaagtgatcgtgtgggatgaaaaccgtccgcgtgcgattcagaaaatgatccgcgtattgaaggattccgtggtgtttggtgttcacacgaacatcccgtacctgatcgaaattctttcgcacaaagagttcgtcatgggcacgatgacgacaagatttattgaaacttacttcagtgaatcactgaaagaaccagctttgacggaaattgaaaaaaccgtggcggcgggtgcattgttgcagcttcgcggaggcgctggtgaaacggcgaaaacttccgcatccccttgggcttcttactggagaggtatctaa

SEQ ID NO: 9673 - protein, 492 aa, Bdellovibrio bacteriovorus HD100
MKKFTRIAIANRGEVAVRIIKACEEMGIETVLLHSEADINTRAYRMATKTICVGPAATAESYLNIPANINGALAGGAQAVHPGFGFLSENADFAEAVNKAGLTFIGPSPEAIRALGDKVHCKELAKQAGLPLVPGYQGENQDVAHLITQAEKIGYPVIVKAAAGGGGRGMKLLKSSAEAHELIESAQREAQSAFGSPKVFLEKYLDRAKHIEFQVFGDSTGNVQHFFDRECSVQRRHQKIIEEATSPSLTDDLRRRMGEAACAIATLGKYKGAGTVEFLLQDGEFYLLEVNTRLQVEHPVTEEVLGVDLVKMQILTAQGDFVHDNKQIRAPKGHSIECRIYAENPFLGGVPSTGLLGHVEWPEGPGRRYEYGFDSGDTITPYYDPMIAKVIVWDENRPRAIQKMIRVLKDSVVFGVHTNIPYLIEILSHKEFVMGTMTTRFIETYFSESLKEPALTEIEKTVAAGALLQLRGGAGETAKTSASPWASYWRGI

SEQ ID NO: 9674 - DNA, 1503 bp, Bdellovibrio bacteriovorus HD100
  CDS (1)..(1503): transl_table=11
atggcattgtttaaaaaaatcctgatcgccaaccgcggggaaatcgccatccgtatcactcgcgcctgccgcgagctgggtatcggctctgtggcggtgttttccgatgcggaccgcgacagcttgcacgtattcctggcggatgaggcttaccacattggcccgtccccatcgcgagaaagttacctgaactataacaagatcatcgaagtctgcaaaaaagccggcgtggacgctgttcacccgggttacggcttcctgtctgaaaacaccacttttgcgcaagctttgaaagatgcaggcatcaccttcatcggtccaacggttgcgaatattgaagccatgggggataaactttccgccaaggctttgatgaaaaaagccggtgttccgacggttccaggctctgacggcggggttgaatccgttgaagaagcccagaagatcgcagaacaaatcggtctgcctatcatcatcaaggcttctgccggcggtggtggtaaagggatgcgtgtagttcgtcagatggacgaactggaaagcgctttccgtgcgtgccgttctgaaggccagaactatttcgcggatccgactgtttacatcgaaaaattcatcaacgatccgaaacacatcgagatccaggtgtttggcgacactcataacaaccacgttcacctgtttgaacgtgagtgctctgtgcagcgccgtcaccagaagatcatcgaggaatgtccgtccccttctgtgcctcacgaagtgcgcctgcgcatgggtgaagccgctgttcgcgcagcaaaacagatcaactatgtgggcgcgggaacgattgagttcatctttgataacgccaccaaggaattctacttcatggagatgaacactcgtcttcaggtggaacatccgatcacggaaatcgtgactggttatgacctggtgaaagagcagatctatgtggctgcgggcaaacctttgagcttcaaacaagaagacatcaaacaaaaaggccacgccatcgaagcccgtatctgtgcggaagacccgatcacgtataaaccgcaccctggtgtgatccgcgcctgccgtcacccgcaaggtccgtttatgcgtgtggattcctacgcttacccgggctacgaagtgcctatcttctacgatccaatgatcgccaaagtgatcacttggggtgagacgcgcgaagaggccatcgacagaatgcaacgtgccctgagtgagttcgtgctgaccggtattaaaaccaatatcgttctgcataaaaccatcctggatcacccgaaattccgtgatggctcttacacgactcagtttattgaaaagaacttcgaagttatcgaaccaaatcttttcaaagaagttgaagacccagtattcctgatcgcggcggcaatcactgcttacaacgatcgtaaatccaaagacgttcgccagctgaacctgacttccaactggaagcgtatcagccgcaaacttcaattgaggacgtaa

SEQ ID NO: 9675 - protein, 500 aa, Bdellovibrio bacteriovorus HD100
MALFKKILIANRGEIAIRITRACRELGIGSVAVFSDADRDSLHVFLADEAYHIGPSPSRESYLNYNKIIEVCKKAGVDAVHPGYGFLSENTTFAQALKDAGITFIGPTVANIEAMGDKLSAKALMKKAGVPTVPGSDGGVESVEEAQKIAEQIGLPIIIKASAGGGGKGMRVVRQMDELESAFRACRSEGQNYFADPTVYIEKFINDPKHIEIQVFGDTHNNHVHLFERECSVQRRHQKIIEECPSPSVPHEVRLRMGEAAVRAAKQINYVGAGTIEFIFDNATKEFYFMEMNTRLQVEHPITEIVTGYDLVKEQIYVAAGKPLSFKQEDIKQKGHAIEARICAEDPITYKPHPGVIRACRHPQGPFMRVDSYAYPGYEVPIFYDPMIAKVITWGETREEAIDRMQRALSEFVLTGIKTNIVLHKTILDHPKFRDGSYTTQFIEKNFEVIEPNLFKEVEDPVFLIAAAITAYNDRKSKDVRQLNLTSNWKRISRKLQLRT

SEQ ID NO: 9676 - DNA, 1320 bp, Treponema denticola ATCC 35405
  CDS (1)..(1320): transl_table=11
atgattaaaaaaatacttatcgccaacagaggcgagatagccgtgagggttatccgctcctgccgcgaaatgggaataaaaaccgtcgccgtttactctacggcggacaaggactgtcttcatgtgcttttagctgatgaagcagtctgcataggcccgcccccctcggctaaaagctatcttaacaaagaagctcttatcacggcagccctttgcacttcctgtgaggcagtgcatccgggggtaggctttttatcggaaaatgcaggtttcgcccgcgaggtagaaaatgcagggctcttttggatagggccaaaacccgacacaatcgaaatgctcggcgataaggtccgcgctcgcgaaacagccgtaaaaagcggacttcccgtgacacccggttcggatggagctataaaggagttggctgaagccaaaaaaacggccgaaaaatgcggctatcccgtaatcattaaagctgcctcaggcggcggcggaaaagggatgcgcatcgtttataaagaatcggaattagccgaaaacctaaaaatcgcttccgccgaagccgaagccaattttgccgacggcacggtttatatcgaaaaatatctggtagatccgcgccatgtagagcttcaaattctgggcaatggtaaaggagccgtttccgttttgggtgaaagggattgctcggttcaaaaaaatcatcagaagttgatagaagaaagcccctctccggccgtaagcgaggaaatgcgggaagccatgtgtaagggggctgtcagccttttttcttcccttaaataccgcggggcgggaacaatcgagttcctagtatcaggcaataatttctactttatggaagtaaacgcccgaattcaggtagagcatcccgtttcggagatgattaccggcaccgatataattgcagaacaaatccgtgtttgtacaggggaaaacatgaagtttgcccaagggattttgcctactaaaggctgggctatcgaggctagaataaacgcccgctctccagggctcataaagaatttaagggttcccggaggaaacggagtgcgttttgacagctttttgtaccaaggctattcggtagttccgttttatgactcgatgacggctaaactcatcgttcacggggctgacagggccaatgctatccaaaagctgctttgcgccctcgatgagcttaaaattgaaggcattacctgcaatatcgaagaacaaaagattatacttaactcaaaaaagttcaaatcgggtgttttcggtacagggctctatgaagagctttttggaaataagtaa

SEQ ID NO: 9677 - protein, 439 aa, Treponema denticola ATCC 35405
MIKKILIANRGEIAVRVIRSCREMGIKTVAVYSTADKDCLHVLLADEAVCIGPPPSAKSYLNKEALITAALCTSCEAVHPGVGFLSENAGFAREVENAGLFWIGPKPDTIEMLGDKVRARETAVKSGLPVTPGSDGAIKELAEAKKTAEKCGYPVIIKAASGGGGKGMRIVYKESELAENLKIASAEAEANFADGTVYIEKYLVDPRHVELQILGNGKGAVSVLGERDCSVQKNHQKLIEESPSPAVSEEMREAMCKGAVSLFSSLKYRGAGTIEFLVSGNNFYFMEVNARIQVEHPVSEMITGTDIIAEQIRVCTGENMKFAQGILPTKGWAIEARINARSPGLIKNLRVPGGNGVRFDSFLYQGYSVVPFYDSMTAKLIVHGADRANAIQKLLCALDELKIEGITCNIEEQKIILNSKKFKSGVFGTGLYEELFGNK

SEQ ID NO: 9678 - DNA, 2100 bp, Nasonia vitripennis
  CDS (1)..(2100)
atgtatagaattgacttaatctctggaactagagaattctcagctaatcaaagaaattgttctactagaatagacaagattcttattgcaaatagaggagagattgcctgtcgtattacaagaactgcaaagaaacttggtgtgaaaactgtagcagtttacagcgatgtggataaagattccatgcacgttgacctggctgacgaagcatactgtatcggcccagcaccctctagtcagagttacttgagacaagacaaaattatagcgactgctaaaagtgccaagtgtcaagctatacatcctggatatggatttctgtcagaaaacactgaatttgcagagttatgccaaaagcaaaatattatcttcatcggtcctccagctcaggccattagagacatgggaatcaaaagtacatcaaaggcaatcatggcagcagctggagtacccatcatcgaaggataccatggtgatgatcaaagcaatgaaaaattattacaagaagctcaaaagattggtttcccattaatgatcaaggcagttcgaggtggtggaggcaagggaatgagaattgcacggaaagaagctgaatttcttcaagcactggaatctgcgagaacagaatctcagaaggcatttggtgactcagcagttcttttagaacaatatgttgcggaaccaagacatgttgaagtacaagtttttgctgataagcatggtaatgcagtttatttgtttgagagagactgctctgttcaaaggaggcatcaaaaagtcattgaagaagctcctgcacctggaatttccgaagaacttagagttgaacttggagaagcagctgttcgagcagcaaaggctgttggctacgtaggagctggtacagtggaatttattatggataggcatacacataaatttcacttcatggaaatgaatacacgtttgcaagttgagcatccagttacagaagctataactggtacagatcttgttgaatggcagttaagaattgctgctggtgaagaactaccgttgaaacaagaagacatcaaactcaatggtcatgcttttgaagctcgaatatatgctgaggatcctcgcggtggattcttgcctggtgctggtaaactgcttcatttaacgcctccatcaatagtcgaaaatatacgcgtggagactggtgtacgacaaaatgatgaggtgtcagtacactacgatccaatgatagctaaattaattgtttggggaaaagacagaaaagaagctttaagtatcatgaaatctaaactgtcagagtataatatcgtgggcttggagacaaatgtagagtttatcaaggatatatgcgcgcacccgaaattccgaaacggcgacgttcatacgggattcatagaagagaattacgatgcgttatttcctaaaattgaagttccaaagagggtattggctgagggagctcttggattaattttgtgcgcagaattagacgcgcttaaaaccgccgtcaagtcaagtgatgtatataatcctttcgctttggaaactggactaagggtaaaccacgtcttgcacaggcgaattcacttcgaagttggagaagagaagtttttcgtcgatgtgcaatatgttgaaccagaagtgtactctatgagaataaacgatcttggaccatggagaaccgtgaccggttcgttgaaaaaggaaggaaatatttcagaattgaaggcagacgtcgatggtgtcgtacaaaagtctaggattgttaaaattggaaatgaacttcatttatttactcacgaccgaaaatggaaacttgtcactccacaaccgaaatacgttaaagaattgtcgaatcaaactaatgtagtcgcgggtgcagcggtgagtccaatgccaggagttgttgataaaatacttattaaacaaggtgacgaagtcaagactggcgacccattgatagttatcgtcgctatgaaaatggagcatgtaatcaaagcatcggcgaatggaactgttgacaatgtgttgtgcaaagttggagaaagcgtagccaaaaataaactgctcgtcaaagtcgaaagtgttcaagcgcaataa

SEQ ID NO: 9679 - protein, 699 aa, Nasonia vitripennis
MYRIDLISGTREFSANQRNCSTRIDKILIANRGEIACRITRTAKKLGVKTVAVYSDVDKDSMHVDLADEAYCIGPAPSSQSYLRQDKIIATAKSAKCQAIHPGYGFLSENTEFAELCQKQNIIFIGPPAQAIRDMGIKSTSKAIMAAAGVPIIEGYHGDDQSNEKLLQEAQKIGFPLMIKAVRGGGGKGMRIARKEAEFLQALESARTESQKAFGDSAVLLEQYVAEPRHVEVQVFADKHGNAVYLFERDCSVQRRHQKVIEEAPAPGISEELRVELGEAAVRAAKAVGYVGAGTVEFIMDRHTHKFHFMEMNTRLQVEHPVTEAITGTDLVEWQLRIAAGEELPLKQEDIKLNGHAFEARIYAEDPRGGFLPGAGKLLHLTPPSIVENIRVETGVRQNDEVSVHYDPMIAKLIVWGKDRKEALSIMKSKLSEYNIVGLETNVEFIKDICAHPKFRNGDVHTGFIEENYDALFPKIEVPKRVLAEGALGLILCAELDALKTAVKSSDVYNPFALETGLRVNHVLHRRIHFEVGEEKFFVDVQYVEPEVYSMRINDLGPWRTVTGSLKKEGNISELKADVDGVVQKSRIVKIGNELHLFTHDRKWKLVTPQPKYVKELSNQTNVVAGAAVSPMPGVVDKILIKQGDEVKTGDPLIVIVAMKMEHVIKASANGTVDNVLCKVGESVAKNKLLVKVESVQAQ

SEQ ID NO: 9680 - DNA, 2220 bp, Magnaporthe grisea 70-15
  CDS (1)..(2220)
atgcgctcaatcacaaaagccaacgctcggcttcccctccgccatgcatcccgccgcctcctctcgtccagcgcatccgccagcaacaacaacaacaacaccatctcgcaagcagcatcatccttggcccaatcaataacaccgaccacgaccccgataacatccctcttgatcgccaaccgcggcgaaatcgccctccgcatccaccgcaccgccacccgcctcggcatccctacaaccacagtcttcaccgacgtcgaccgccactcccagcatgccgccgcctctccctcctccatcgcgctcggatccgacccgcgcgcctacctcgacggagaccgcatctcacgcctagctgccgacaagctcgggcccggcgtcgcgttgcacccgggctacggcttcctctcggagaatgccgccttcgccaggctgtgcgcggaccgcggcgtcaactttgtcggcccgcccgcctccgccatggccgacatgggcgacaaggcgcgctccaagcacatcatgtcggccgccggcgtcccctgcgtccccggctaccacggcgaggagcagtccgcggcctttttggccgaaaaggccgccgagattgagtaccccgtcctgctcaagagcctgcgcagcgcccgcgccgaggcccgcgccagttttggtcccgacggcgagatcatgctcgtcgaaaagtacatcacgcgcccgcgccacgtggaggtccaggtgtttgccgaccgccacggcggctgcgtggccctgggcgagcgcgactgcagcatccagcgcaggcatcaaaaggtcattgaggagtcgcccgcgccgggactgtcggaagagctgaggcaggacctctgggccaaggcgcggacggctgccctggcggtggggtacgtgggcgccggcacggtcgagttcattctggacagggataccgaccgtttctactttatggagatgaacacccgcctccaggtcgagcaccccgtcagcgagatggttaccggcacagacctggtcgagtggcagctgcgggtcgcggccggggagaggttacccatgacgcaggctgagattgagcaaaagatcgccgagcggggctgggcgattgaagcccgcatctacgcagagaacccagagaagggcttcatgcccgattcaggaaagctggttcacctggtgactccgaaaacggacacggaagtgcaccgaccagaggatgcggcggtgcggatagacgctggtttcgtcgagggcgacaccgtatcgcaggcgtacgacggcatgatcgccaagctcatcgttcgcggtgcggacagagagacggccatcaagaggatggagctggctctgagggaatacgaagtggtggggctatcgaccaacattgagttcctcaagaggctctgtcgcagccccgcattcatccaaggtgatctggacaccggctatatcgaccggtggagagaggagctgttccagccgaggagggtcgaggacgaggtttttgtccaggctgccctgggcctactggctcccgtcaagcagacggtccaacaaatgggactgggcgcccacggagagactcttggtttcggcgaggcagctgccagcactggcgagaggagatttgcgttcaaggtgacggatggttacgccgagcaggctgctgagggcaagggtgaggatgtggtcgaggtgactttaacccaacgtgggaacaacctatacaatgcgcgtgtggcgcgaaggggagagcagacgcctatcgagtttgacaatgtcacctcggaacccactgagagcagcgacctcaagacaaaagtcaagtccttcttcccgctgtccagggtggagtcgactgtggtgcgggaccccatcaacagcgacaagatcaccgtgttccagctgggcacaaagacggacttgagcttggtgcagccgggctggttcgacaaggctctaggcctgaaggaggcggccgcgtcggtcgtcgcgccgatgccgtgcaggatcatgagggtcgaggttgcggagggtgacagcgtcgaaaaggggacacctttggttgtgatcgagtccatgaagatggaaacagtcatccgctcgccccaagccggtgtggtcaagaagttggcgcacaaggagggtgacatttgcaaggctgggacagtattggtgcttttcgaagaggacgcggccgagcagtcataa

SEQ ID NO: 9681 - protein, 739 aa, Magnaporthe grisea 70-15
MRSITKANARLPLRHASRRLLSSSASASNNNNNTISQAASSLAQSITPTTTPITSLLIANRGEIALRIHRTATRLGIPTTTVFTDVDRHSQHAAASPSSIALGSDPRAYLDGDRISRLAADKLGPGVALHPGYGFLSENAAFARLCADRGVNFVGPPASAMADMGDKARSKHIMSAAGVPCVPGYHGEEQSAAFLAEKAAEIEYPVLLKSLRSARAEARASFGPDGEIMLVEKYITRPRHVEVQVFADRHGGCVALGERDCSIQRRHQKVIEESPAPGLSEELRQDLWAKARTAALAVGYVGAGTVEFILDRDTDRFYFMEMNTRLQVEHPVSEMVTGTDLVEWQLRVAAGERLPMTQAEIEQKIAERGWAIEARIYAENPEKGFMPDSGKLVHLVTPKTDTEVHRPEDAAVRIDAGFVEGDTVSQAYDGMIAKLIVRGADRETAIKRMELALREYEVVGLSTNIEFLKRLCRSPAFIQGDLDTGYIDRWREELFQPRRVEDEVFVQAALGLLAPVKQTVQQMGLGAHGETLGFGEAAASTGERRFAFKVTDGYAEQAAEGKGEDVVEVTLTQRGNNLYNARVARRGEQTPIEFDNVTSEPTESSDLKTKVKSFFPLSRVESTVVRDPINSDKITVFQLGTKTDLSLVQPGWFDKALGLKEAAASVVAPMPCRIMRVEVAEGDSVEKGTPLVVIESMKMETVIRSPQAGVVKKLAHKEGDICKAGTVLVLFEEDAAEQS

SEQ ID NO: 9682 - DNA, 2145 bp, Gibberella zeae PH-1
  CDS (1)..(2145)
atgcgttctacacttcgcgcaaaccgacgtcttcctttgaagtctctccctcgatttttatctaccactgccccttcaagcgcttccaccccttctgtggcctcctcttcacccacgccaaagcaaacacccatcagttcggtcctgatcgctaaccgtggcgaaattgctattcgcattaaccggactgctgagcgcctcggtatccgggccactactgtttataccgacattgatgctggctcttggcatgcctcttcaggattccaatctttgggcttgggtcccgcaaacgcttatctagatggagagaagattatctccctagcgaagcagaatggtatccaagcactccatcctggttatggctttttgtctgagaactccaagttcgcagaacgctgcgaggaggagggtattgtgtttgtcggaccgcctgctactgctatggccgatatgggacacaaggctcgcagtaaagagatcatgacagctgccaacgtgccctgcgtcccaggctatcacggcgcagaccagggcgagcaggagctcctggagcacgccaagaagatcacattccccgtacttctcaaaagtgtccgaggtggtggaggtaaaggaatgcgtatcgtgttgaccgaggaagagttcttgacgcagctcaggagtgctcgagctgaggccaaggcttcatttggcgaaggcggcgaggtgatgctagtggagaagtacatcattcgcccgagacacgttgaagtacaggtcttcgcagacaaatggggcaacacagtcgccctaggtgagcgagattgcagtatccaacgtcgacaccagaagatccttgaggaatctccagctcctgatctggatctggcaacccgacacgatctttgggacaaggcccgaaaagcagcttcagcggtcggttatgtcggcgccggcaccgttgaatttattctcgacaaggataccaacaagttctacttcatggagatgaacacccgacttcaggtagaacatcctgtcactgagatggtcactggcctggatctggtagagtggcaattccgagttgcggccggcgagaaacttcctctgtctcaagaggaagtggaaacccagatgaacgagagaggtgccgccattgaagcaagaatctacgctgagaatcccgaaaaagggttcattcccgactcaggcaagttagtgagggcgtatctcccagccgagctgcagaacgaggacgttcgtctggactggggcttccgttctggaaacaccatttccgaggcctacgatggtatgatcgccaagcttatcgtacgaggcgatacaagagaacgtgccattgctaagatggagagcgtcctaaggtcctatgagatcgttggtgttgctacaaatatcgaattcttgaagcgcctctgtgagactgatgcgtttgttgaaggcgatgtggagactggctttatcgacaaatggcgagagcagctcttcaagcctcgacctatcaaaaacgaagtcgttgcgcaagcagcccttggtatggtcaactctgaactccaaaactctgggcctcatggtcttacacttggctttggcgaggccaacagcattggcgaacgaaagctttctttcaagatccaggacggatacagccaagaagaaggagaagttgtcgaggccagtgtgacgcaggtagcccacaacctatataacgtttctatctcccgaaaaggtaatgaaacacctcaagtgttcaccaatattgcctgcaagccagagccagaaggcgaggttatgaagcttgagtcatatttcccattcgaacgaattcagtcttctgttgtaccccagcacacagacaatgataccaaggtcactgtctttcagcatggcgtgaagacggatcttgtcctactgccacccaagtggtatgagaaggcgcttggactcaaggaatcaagtgcttcagtggcagcacctatgccctgtaaaatcctgaagaacgaagttgaagagggccaaacggtgcaaaagggtgcccctcttgtagtaaagactaacagactcctagatatttgcaaagcaggtacagtgcttgtgatgtttgaagaggccgaaggaaaggatggagatgcatga

SEQ ID NO: 9683 - protein, 714 aa, Gibberella zeae PH-1
MRSTLRANRRLPLKSLPRFLSTTAPSSASTPSVASSSPTPKQTPISSVLIANRGEIAIRINRTAERLGIRATTVYTDIDAGSWHASSGFQSLGLGPANAYLDGEKIISLAKQNGIQALHPGYGFLSENSKFAERCEEEGIVFVGPPATAMADMGHKARSKEIMTAANVPCVPGYHGADQGEQELLEHAKKITFPVLLKSVRGGGGKGMRIVLTEEEFLTQLRSARAEAKASFGEGGEVMLVEKYIIRPRHVEVQVFADKWGNTVALGERDCSIQRRHQKILEESPAPDLDLATRHDLWDKARKAASAVGYVGAGTVEFILDKDTNKFYFMEMNTRLQVEHPVTEMVTGLDLVEWQFRVAAGEKLPLSQEEVETQMNERGAAIEARIYAENPEKGFIPDSGKLVRAYLPAELQNEDVRLDWGFRSGNTISEAYDGMIAKLIVRGDTRERAIAKMESVLRSYEIVGVATNIEFLKRLCETDAFVEGDVETGFIDKWREQLFKPRPIKNEVVAQAALGMVNSELQNSGPHGLTLGFGEANSIGERKLSFKIQDGYSQEEGEVVEASVTQVAHNLYNVSISRKGNETPQVFTNIACKPEPEGEVMKLESYFPFERIQSSVVPQHTDNDTKVTVFQHGVKTDLVLLPPKWYEKALGLKESSASVAAPMPCKILKNEVEEGQTVQKGAPLVVKTNRLLDICKAGTVLVMFEEAEGKDGDA

SEQ ID NO: 9684 - DNA, 3543 bp, Candida glabrata CBS 138
  CDS (1)..(3543)
atgccacaatctggtcaaaagaagaaattggccggtttgagggctaatttcaacatccttggtgaaaaggataagattttagttgccaacagaggtgaaattcccattagaatctttagaacagcccatgaactgtctatgagaaccgtcgctatctactctcacgaggatagactttctacacacagattgaaggcggatgaagcctatgtgattggtgaagaaggtcaatacaccccagttggtgcttaccttgccattgatgaaattattgatattgctaagaaacacggtgttgatttcattcaccctggttacggtttcctttctgaaaactcggaatttgcagacaaggtacaaaaagctggtatcacatggattggcccacctccagaagtcatcgaatctgttggtgacaaagtctcagctagaaacttggccgcaaaggctaaagttccaaccgttccaggtactcctggtccaattaaaaccgtggaagaagctgaggcctttgtcgctgagtatggttacccagtgatcatcaaagctgcctacggtggtggtggtagaggtatgagagtggtaagagaaggcgaagacattggtgacgctttccaacgtgccacttctgaggctaagacagctttcggtaacggtacttgttttgtagaaagattcttggacaagccaaaacatattgaagttcaacttctggctgacaaccatggtaacgtcatacatctatttgaaagagattgttcggtacaacgtagacaccagaaggtcgtagaagtcgcaccagcaaaaacattacctcgtgacgttagagatgcaattttaacagatgccgttaaattggcaaaagaagcaggctacagaaatgctggtacagctgaattcttagttgataaccaaaatagacattatttcattgaaattaacccaagaattcaagttgaacatacaattactgaagaaattactggtattgatattgtggccgctcaaattcaaattgcagccggtgcttccctaacagaattaggtcttctacaagacagaattaccactcgtggttttgctattcaatgtcgtatcacaactgaggatccagcaaagaatttccaaccggatactggtagaattgaagtttacggttctactggtggtaacggtgttagattagatggtggtaatgcatacgcaggcgctgttatttcacctcattatgactctatgctggtcaaatgttcctgttcaggttccacttatgaaattgtacgtcgtaaaataatccgtgccttgattgaattcagaattagaggtgtgaaaactaatattccatttttgctaacattattaactcatccagtatttattagcggccagtattggacaactttcattgatgacaccccacagttgttccatatggtttcatcacaaaacagagcccaaaaattgctacactacttggctgatttagcagtcaatggttcatcaattaagggtcaaattggcttgcctaaattatctactaaaccaaacattccacatctacatgacgaaaagggtgagattattagtgtcaccaaagtggctccaccagatggttggagacaagtgctattagaaaagggacctgaaggattcgctaaagctgttagagcattcaagggtactttactaatggacacaacttggagagatgcccaccaatccttacttgcaacaagagttagaacacacgacttggccgctattgcaccaactactgcacatgctttagctggtgcgtttgcgctagaatgttggggtggtgctacttttgatgttgctatgagattcttacatgaagatccatgggaacgtctaagagtattgagaaaactagtcccaaatattccattccaaatgctacttcgtggtgcaaatggtgttgcatactcatcactgccagacaatgccattgaccattttgttaaacaagcaaaggataacggtgttgacattttcagagtttttgatgcactaaacgatttagagcaattaaaggttggtgtagatgctgttaagaaagctggaggtgttgtcgaggcaacagtatgctattctggtgatatgttacaaccaggcaagaaatacaacttggattactatctagaagtcactgacaagattgttgaaatgggtacacatgttcttggtatcaaagatatggctggtactttgaaacctactgctgcaaagttgctaattggttctattagagctaaatacccagacctaccaattcatgttcatagtcatgactctgctggtactgctgtggcttccatggctgcttgtgcatttgcaggtgcagatgttgtcgatgtcgctatcaactctatgtcaggaatgacttctcaggcatcaatcaatgccctattagcatctctagatggggaaattgatacaggtgttaatgttaagcatgctcgtgaattagatgcttactgggcggagatgagactgttgtattcttgttttgaagctgatctaaagggtcccgatccagaagtgtacgaccatgaaattccaggtggtcaattgactaacctgttattccaagcccaacagctaggcctaggtgagaaatggattgaaaccaagagagcttataaagaggccaaccacttgctgggtgacattgtaaaggttactcctacctcgaaggttgttggtgatttagcacagtttatggttaccaatcaactgacatcggaagatgttaaacgtttagcaaactcattggatttcccagactctgtcatggacttctttgaaggtttaatgggtcaaccatacggtggtttcccagaacctttaagatctgatatcttgagaaacaagaggagaaaattgacagttcgtcccggtttggagcttgagccattcgatcttgaatcaatcagagaagatcttgaaaacagatttggtgaaatcgatgaatgcgatgttgcttcttataacatgtatccaaaggtttacgaagacttccaaaaaatgaaagaattgtacggtgacttatctgtgctaccaactaaaaacttcctagctccaccaagcattggcgaagacattgaagttcatttagaacaaggtaagactttgatcataaagctacaagctgtcggtgatttgaacaaagagactggtatgagggatgtctactttgaactaaatggtgaaatgagaaagattcgcgtacctgatagatctcagaaggtcgaaaaagtctctaaacccaaggctgacaatcatgatccattccaaattggtgccccaatggcaggtgttatcgtggaagttaaggtccacaaaggttcattagtcaagaagggtcaaccggttgctattttgagcgcaatgaagatggaaatggttgtgtcatctcaagcagatggccaggtaaaggacgtgtttgtcaaagatgccgaaaatgttgaagcttccgatcttctggttcttctagaagaagaaattccgccacaagagtaa

SEQ ID NO: 9685 - protein, 1180 aa, Candida glabrata CBS 138
MPQSGQKKKLAGLRANFNILGEKDKILVANRGEIPIRIFRTAHELSMRTVAIYSHEDRLSTHRLKADEAYVIGEEGQYTPVGAYLAIDEIIDIAKKHGVDFIHPGYGFLSENSEFADKVQKAGITWIGPPPEVIESVGDKVSARNLAAKAKVPTVPGTPGPIKTVEEAEAFVAEYGYPVIIKAAYGGGGRGMRVVREGEDIGDAFQRATSEAKTAFGNGTCFVERFLDKPKHIEVQLLADNHGNVIHLFERDCSVQRRHQKVVEVAPAKTLPRDVRDAILTDAVKLAKEAGYRNAGTAEFLVDNQNRHYFIEINPRIQVEHTITEEITGIDIVAAQIQIAAGASLTELGLLQDRITTRGFAIQCRITTEDPAKNFQPDTGRIEVYGSTGGNGVRLDGGNAYAGAVISPHYDSMLVKCSCSGSTYEIVRRKIIRALIEFRIRGVKTNIPFLLTLLTHPVFISGQYWTTFIDDTPQLFHMVSSQNRAQKLLHYLADLAVNGSSIKGQIGLPKLSTKPNIPHLHDEKGEIISVTKVAPPDGWRQVLLEKGPEGFAKAVRAFKGTLLMDTTWRDAHQSLLATRVRTHDLAAIAPTTAHALAGAFALECWGGATFDVAMRFLHEDPWERLRVLRKLVPNIPFQMLLRGANGVAYSSLPDNAIDHFVKQAKDNGVDIFRVFDALNDLEQLKVGVDAVKKAGGVVEATVCYSGDMLQPGKKYNLDYYLEVTDKIVEMGTHVLGIKDMAGTLKPTAAKLLIGSIRAKYPDLPIHVHSHDSAGTAVASMAACAFAGADVVDVAINSMSGMTSQASINALLASLDGEIDTGVNVKHARELDAYWAEMRLLYSCFEADLKGPDPEVYDHEIPGGQLTNLLFQAQQLGLGEKWIETKRAYKEANHLLGDIVKVTPTSKVVGDLAQFMVTNQLTSEDVKRLANSLDFPDSVMDFFEGLMGQPYGGFPEPLRSDILRNKRRKLTVRPGLELEPFDLESIREDLENRFGEIDECDVASYNMYPKVYEDFQKMKELYGDLSVLPTKNFLAPPSIGEDIEVHLEQGKTLIIKLQAVGDLNKETGMRDVYFELNGEMRKIRVPDRSQKVEKVSKPKADNHDPFQIGAPMAGVIVEVKVHKGSLVKKGQPVAILSAMKMEMVVSSQADGQVKDVFVKDAENVEASDLLVLLEEEIPPQE

SEQ ID NO: 9686 - DNA, 3528 bp, Candida glabrata CBS 138
  CDS (1)..(3528)
atggccacgaacaagatgttgaccggtctccgggacaactttagtttgcttggtgagaagaataagatattggttgccaacagaggtgagattccaattagaatttttagatcagcccatgagctatcaatgagaactgtagccatttattcacatgaagatagactatccacacatagattaaaagcagatgaagcctatgttatcggaaaggaaggtgaatatactccagtcggtgcatacttagcaattgatgaaattattgatattgctaaaaaacacggtgtagacttcattcatccaggttatggtttcctctcagagaatgctgagtttgctgataaagttcaaaaagccggcattacttggattggtcctcccccagaagttatcgaatctgtcggtgacaaagtctcagctagaaacttggcagctaaggctaatgttcccactgtgccaggtactccaggcccaattgaaactgttgaagaagcacaagattttgttaataaatatgggtatcctgtcattattaaggctgcttacggtggtggtggtagaggtatgcgtgttgtgagagaaggagacgatgttgctgatgcattccaacgtgctaaatccgaagctataacggcattcggtaatggtacttgttttgttgaaagatttttagataagccaaagcacattgaagttcaactacttgccgataatcatggcaatgtagtccatttgtttgaaagagattgctccgtgcaacgtagacaccaaaaagttgtggaagttgcaccagctaaaactttaccacgtgaagttagagattccattttgacagatgcggttagattagcaaaggaagctggttacagaaatgctggtacagcggaatttttagttgataaccaaaacaggcattacttcatcgaaattaacccaagaattcaagtcgagcacaccatcactgaagaaattactggtatagatcttgtttctgctcaaattcaaatagctgctggtgcttctttgccacaactaggtttactacaagacagaatcactacccgtggttttgcaattcaatgtcgtatcaccacagaagatcctgcaaaaaatttccagcctgatactggtagactggaggtttaccgttcggctggtggtaacggtgtcagattagatggtggtactgcttatgcaggtgctgttatttcaccacattatgattccatgttggtgaaatgttcttgttctggttctacttatgaaattgttcgtcgtaagatgcttcgtgcactaatcgaatttagaattagaggtgttaaaactaatattcctttcttgttgacattattgactcaccctgttttcattagtggtgattactggacaacattcatcgatgatactcctcaactattccacatggtctcatccaggaacagagcccaaaagctacttcattaccttgctgatttggctgttaacggatcctcaattaaaggtcaaattggtgaacctaaattaaagactcacccacagattcctcgtttacatgatgaggatggatctccagtcgacgtgtctgttccaccacaaaagggttggagatatttattacagtcggaaggaccagaggcatttgccaaggctgttagacataatcaaggcacactagttatggacactacctggagagatgcacaccagtctttattggctacaagagttagaacttacgatctagctgccattgctcaaacaaccgcacatgcatttgctggtgcatttgctttagaatgttggggtggtgccacatttgatgttgctatgagattcttacatgaagatccgtgggaacgtttaagaatattgagaaaactcgttcctaatattccattccaaatgcttctccgtggtgccaacggtgttgcatactcttctctacctgacaacgctattgaccattttgttaagcaagctaaggataacggtgttgatatttttagagtattcgatgctctgaatgatttggaacaattaaaagttggtgtggatgctgttaagaaggctggaggtgttgtggaagccactgtttgttactccggtgacatgcttcaaccaggtaagaaatataatttggattactatttggatgtcacagaaaagattgttgctatgggtactcatatactaggtatcaaagatatggctggtactatgaaaccagccgctgctaaacttttgattggggctattagggcgaaattccctgatctacctattcacgtgcactctcacgattctgcaggtaccgccgtggcctctatggctgcttgtgcccttgctggtgctgatgttgttgatgttgctatcaattctatgtcgggtttgacttctcaagcgtctgttaatgctgttttggcttctcttgatggccaaatcgatactggtatcaatgttaaacatgtctgtgaactggatgcatactgggctgaaatgagattattatactcttgttttgaagcagacctaaaaggtccagatccagaagtttatgatcatgaaattccaggtggtcaattgactaacttattgttccaggcccaacaattgggtttgggtgagaaatggattgaaactaaaaaggcatataaacaagccaatcaactgttgggtgatattgtcaaggttaccccaacttcaaaggttgttggtgatttggcccagttcatggttagcaaccaattaacaccagatgacatcagacgtctagcaaattcattagatttcccagattcagtgatggatttcttcgaaggcttgatgggccaaccatatggtggattcccagaacctctaagaacagatatattgaagaataagagaagaaagctaaaccgtcgtccaggcttagaattggcaccattcgacttagctaagattagagaggatcttgaagccagatttggtgatattaacgaatgcgatgttgcttcctacaacatgtacccaaaggtttacgaagacttccaaaagattcttgaagaatatggtgacttgtctgtattgccaaccagaaacttcttggcaaagccaagagttggtgaggaaattgaagtacacattgaacaaggtaagactttaataataaaactgcaagctgtcggtgatttgaacgaagaaaccggtatcagagaggtctattttgaactgaatggtgaaacaagaaagattcgcatcgcagataagtctcaagtggtccaaacaattgctaagcctaaagcagacggtcatgatccactacagattggcgctccaatggctggtgtcattgttgaagtcaaggtacacaaggggtctcaagttaaaaagggccaaccagttgctgttctaagtgcaatgaagatggagatggtgatctcatctacaggtgaaggccttgtcaaagatgttctagtcaaagatggtgaaaatgtcgatgcaagcgacctattggttgttttagaagaagaggtaaaggacgaataa

SEQ ID NO: 9687 - protein, 1175 aa, Candida glabrata CBS 138
MATNKMLTGLRDNFSLLGEKNKILVANRGEIPIRIFRSAHELSMRTVAIYSHEDRLSTHRLKADEAYVIGKEGEYTPVGAYLAIDEIIDIAKKHGVDFIHPGYGFLSENAEFADKVQKAGITWIGPPPEVIESVGDKVSARNLAAKANVPTVPGTPGPIETVEEAQDFVNKYGYPVIIKAAYGGGGRGMRVVREGDDVADAFQRAKSEAITAFGNGTCFVERFLDKPKHIEVQLLADNHGNVVHLFERDCSVQRRHQKVVEVAPAKTLPREVRDSILTDAVRLAKEAGYRNAGTAEFLVDNQNRHYFIEINPRIQVEHTITEEITGIDLVSAQIQIAAGASLPQLGLLQDRITTRGFAIQCRITTEDPAKNFQPDTGRLEVYRSAGGNGVRLDGGTAYAGAVISPHYDSMLVKCSCSGSTYEIVRRKMLRALIEFRIRGVKTNIPFLLTLLTHPVFISGDYWTTFIDDTPQLFHMVSSRNRAQKLLHYLADLAVNGSSIKGQIGEPKLKTHPQIPRLHDEDGSPVDVSVPPQKGWRYLLQSEGPEAFAKAVRHNQGTLVMDTTWRDAHQSLLATRVRTYDLAAIAQTTAHAFAGAFALECWGGATFDVAMRFLHEDPWERLRILRKLVPNIPFQMLLRGANGVAYSSLPDNAIDHFVKQAKDNGVDIFRVFDALNDLEQLKVGVDAVKKAGGVVEATVCYSGDMLQPGKKYNLDYYLDVTEKIVAMGTHILGIKDMAGTMKPAAAKLLIGAIRAKFPDLPIHVHSHDSAGTAVASMAACALAGADVVDVAINSMSGLTSQASVNAVLASLDGQIDTGINVKHVCELDAYWAEMRLLYSCFEADLKGPDPEVYDHEIPGGQLTNLLFQAQQLGLGEKWIETKKAYKQANQLLGDIVKVTPTSKVVGDLAQFMVSNQLTPDDIRRLANSLDFPDSVMDFFEGLMGQPYGGFPEPLRTDILKNKRRKLNRRPGLELAPFDLAKIREDLEARFGDINECDVASYNMYPKVYEDFQKILEEYGDLSVLPTRNFLAKPRVGEEIEVHIEQGKTLIIKLQAVGDLNEETGIREVYFELNGETRKIRIADKSQVVQTIAKPKADGHDPLQIGAPMAGVIVEVKVHKGSQVKKGQPVAVLSAMKMEMVISSTGEGLVKDVLVKDGENVDASDLLVVLEEEVKDE

SEQ ID NO: 9688 - DNA, 3522 bp, Kluyveromyces lactis NRRL Y-1140
  CDS (1)..(3522)
atgtcatctcaactagctggattgcgtgacaattccaaccttatgggtgaaaagaacaagttgcttgttgctaaccgtggtgaaattccgatcagaatcttcagaacagctcatgaactttctatgaagactgtggcgatttactcgcacgaggatagattgtccatgcacaggttaaaggccgatgaagcttacgttatcggtgaacaaggtaaatatactccagttggtgcttacttggcgattgatgaaattatcaacattgccaagtcccatggtgtgaactttatccatcctggttacgggttcctatcagaaaactctgaattcgctgaaaaagttgcagcttctggtatcacttgggttggtcctccagctgctgttatcgattccgttggtgacaaagtttcagccagaaacttggctgaaaaggctaacgttccagtggttccaggtactccaggtccaattgagactgtcgaagaagcacaggccttcgttgataaatacggattcccagtcatcattaaggccgcctttggtggtggtggtcgtggtatgagagttgtccgtgaaggtgatgatatcagtgacgctttccaacgtgccaaatctgaagctatcactgcttttggtaacggtacttgtttcattgaaagattcttggacaagccaaagcatatcgaagttcaattgttggctgataactacggtaacgttgttcatctgttcgaaagagattgttccgttcaaagaagacatcaaaaggttgtcgaagttgccccagccaaaactctacctgaagaagtgcgtgacgctatcttaactgatgcggtcaaattagctaaggaagctggttacagaaacgctggtaccgctgaattcttagtcgataaccaaaacagacattactttatcgaaattaacccaagaattcaagtcgaacatacaattaccgaagaaatcaccggtatcgatatcgtcgctgctcaaatccaaatcgctgcaggtgccactttggaacaattgggtttgatgcaagataagattacaactcgtggtttcgccatccagtgtcgtatcaccactgaagatccttccaaaaacttccaacctgatacaggtcgtatcgacgtttaccgttctgctggtggtaacggtgtcagattagatggtggtaacgccttcgccgggtctgttatctcccctcattacgactctatgttggttaagtgttcttgttcaggttctacttacgaaatcgttcgtcgtaagatgttacgtgccttgattgaatttagaattagaggagttaagactaacattccattcttgttgactctattaactcatccagtcttcaagtctggtgaatactggaccactttcatcgatgataccccacaattgttcgaaatggtctcctcccaaaacagagctcaaaaactattgcactacttagctgacttggccgttaacggttcttcaattaagggtcaaattggcttaccaaaattgaccactcatccaaccatcccacatttgcacaatgaagatggttcccttgtggacgtttctgctaagccacctgctggatggagagatgttctattagattacggtccagaagaatttgccaagcaagttagaaaattcaacggtactttgttgatggataccacctggagagatgcgcatcaatctttattggctaccagagttcgtacctacgatttggctgccatcgcaccaactactgctcatgctatgagtggagcatttgccttagaatgttggggtggtgccaccttcgatgtctctatgagattcttgcacgaagatccatgggaacgcctgagaactctaagaaagttggttccaaacattccattccaaatgttgttacgtggtgctaacggtgttgcttactcttctctaccagataacgctattgaccacttcgtcaagcaagctaaggacaatggtgttgatattttcagagttttcgatgctctaaacgatttagaacaattgaaagttggtgtcgacgctgtcaagaaggctggtggtgttgttgaagctaccatctgttactctggtgacatgttggccccaggcaaaaagtacaacttggattattacttagacattaccgaaaagattgtcaacagtggtactcacattttaggtatcaaggatatggctggtactttgaagccttctgctgccaggttattgattggttcgatcagagctaagtaccctgaattgccaatccacgttcacactcacgattcagctggtactggtgttgcctctatggctgcttgcgctctctccggtgcagatgttgttgacgtcgctaccaactccatgtctggtttgacttctcaaccatctattaacgctttgctagctgctttggacggcgaaatcgacaacaacgtcaacgttggttacgttcgtgaattagatgcctactgggctgagatgagattgctatactcttgtttcgaagctgatttgaagggtcctgatccagaagtttacgtccacgaaattccaggtggccaattgaccaacttgttattccaagcccaacaattgggtctaggtgaaaaatgggcagaaactaagagagcttatcgcgaggctaacctgttgttaggagatttggttaaggttactccaacctccaaagttgttggtgatttggcccaatttatggtttcaaacaagttgacctctgatgacgtcagaagattggcttcttctcttgacttcccagactccgttatggacttcttcgaaggtttaatcggtcaaccatacggtggtttcccagaaccattgagaactgatgttttgaggaacaagagaagaaagttgactcaaagaccaggtttggaattggctccattcgaattggaaaagattaaggaagacttatcaaccagattcagtgacatcgatgaatgtgatgttgcctcctacaacatgtatccaaaggtctacgaagacttccgcaaaatcaaggaaaagtatggtgatctatcagtgttgcctaccaagaacttcttatcccctccagttattggtgaagaaattgtcgttaccatcgaacaaggtaagactttgatcattaagccacaagctattggtgatttgaacaaggaaaccggtatcagagaagtttacttcgaattgaacggtgaattgagaaaggtctctgttgctgacagatcccaaaaggttgaatctgtctccaagccaaaggctgacgcccatgatccattccaaatcggttccccaatggctggtgttgtcgttgaagtcaaggtccacaagggttcattgattgctaaaggtcaaccagtcgctgtcttgagtgccatgaagatggaaatggttatctcatccccagcagacggccaagtcaaggaggttcttgtcaaggatggtgagaatgttgacgcttccgacttgcttgttgttttggaagaagctccagctaaggaatag

SEQ ID NO: 9689 - protein, 1173 aa, Kluyveromyces lactis NRRL Y-1140
MSSQLAGLRDNSNLMGEKNKLLVANRGEIPIRIFRTAHELSMKTVAIYSHEDRLSMHRLKADEAYVIGEQGKYTPVGAYLAIDEIINIAKSHGVNFIHPGYGFLSENSEFAEKVAASGITWVGPPAAVIDSVGDKVSARNLAEKANVPVVPGTPGPIETVEEAQAFVDKYGFPVIIKAAFGGGGRGMRVVREGDDISDAFQRAKSEAITAFGNGTCFIERFLDKPKHIEVQLLADNYGNVVHLFERDCSVQRRHQKVVEVAPAKTLPEEVRDAILTDAVKLAKEAGYRNAGTAEFLVDNQNRHYFIEINPRIQVEHTITEEITGIDIVAAQIQIAAGATLEQLGLMQDKITTRGFAIQCRITTEDPSKNFQPDTGRIDVYRSAGGNGVRLDGGNAFAGSVISPHYDSMLVKCSCSGSTYEIVRRKMLRALIEFRIRGVKTNIPFLLTLLTHPVFKSGEYWTTFIDDTPQLFEMVSSQNRAQKLLHYLADLAVNGSSIKGQIGLPKLTTHPTIPHLHNEDGSLVDVSAKPPAGWRDVLLDYGPEEFAKQVRKFNGTLLMDTTWRDAHQSLLATRVRTYDLAAIAPTTAHAMSGAFALECWGGATFDVSMRFLHEDPWERLRTLRKLVPNIPFQMLLRGANGVAYSSLPDNAIDHFVKQAKDNGVDIFRVFDALNDLEQLKVGVDAVKKAGGVVEATICYSGDMLAPGKKYNLDYYLDITEKIVNSGTHILGIKDMAGTLKPSAARLLIGSIRAKYPELPIHVHTHDSAGTGVASMAACALSGADVVDVATNSMSGLTSQPSINALLAALDGEIDNNVNVGYVRELDAYWAEMRLLYSCFEADLKGPDPEVYVHEIPGGQLTNLLFQAQQLGLGEKWAETKRAYREANLLLGDLVKVTPTSKVVGDLAQFMVSNKLTSDDVRRLASSLDFPDSVMDFFEGLIGQPYGGFPEPLRTDVLRNKRRKLTQRPGLELAPFELEKIKEDLSTRFSDIDECDVASYNMYPKVYEDFRKIKEKYGDLSVLPTKNFLSPPVIGEEIVVTIEQGKTLIIKPQAIGDLNKETGIREVYFELNGELRKVSVADRSQKVESVSKPKADAHDPFQIGSPMAGVVVEVKVHKGSLIAKGQPVAVLSAMKMEMVISSPADGQVKEVLVKDGENVDASDLLVVLEEAPAKE

SEQ ID NO: 9690 - DNA, 3522 bp, Debaryomyces hansenii CBS767
  CDS (1)..(3522)
atgagtgacggtaatgaacataagatcaaccagatgagaagggcatcgacggtgatgggtcctatgaacaagatcttagttgctaacagaggtgaaatccctatcagaattttccgtactgctcacgaattgtcgatgcagacggtggctatcttttcacacgaagatagattgtcgatgcacagattgaaggcggacgagtcgtacgttattggcaaaaagggccaattttcgcctgtgcaagcatatttgcagatcgacgagattatcaacatagctaaggagcacggcgttaacatgatccacccgggatacgggtttctctcggagaactctgagtttgccagaaaagtcgaggaagctggtatctcatggattggacctacccacaagactattgatgcagtcggagacaaggtcagtgccaggacattggcgatccagaacggcgtgccagtggtcccgggaacgccaggaccaattgctgatgttgaagaggcggtcaagtttgtcgaaaagcatggtttgccagttatcatcaaagctgcctttggtggtggtggtagaggtatgagagtggtcagagagggtgattcagtgggcgaagccttcgaaagagcggtttccgaagccaaaacctcctttggtaacggtacctgtttcatcgaaagattcttggacaaacctaagcacatcgaagtccaattgttggccgataactacggtaacgtcatccatcttttcgaaagagactgttctgtccaaagaagacatcaaaaggttgtcgaagtagctcctgccaagacgttgaccaagctggttagagacgccattttgaccgacgccgtcaagttggctagactggctaactaccgtaacgctggtactgctgaattcttggttgatgaacaagacagacattattttattgaaattaaccccagaatccaagtcgaacacacaatcaccgaagaaatcaccggtgttgatatcgtggctgcccaaatccaaattgctgctggtgcatccttgaagcaattgggcttattacaagataaaatcacgactagagggtttgctattcaatgtagaatcaccaccgaagacccttcgaagaactttcaacctgatactggtaaaatcgaggtttatagatccgctggtggtaatggggtcagattagatggtggtaatggttttgctggttcaattatttctcctcattacgattccatgttagtcaagtgttcgtgttccggttccacctatgaaatcgtcagaagaaagatgttgagagctttgattgaattcagaatcagaggcgtgaagactaacattccgttcttattggctatgttaactaatgaaacgtttatcagcggtgattgttggactacttttattgatgatactccatccttattccaaatgatccgttcccagaacagagccactaagatattaagttacttaggtgacttgatcgttaatggttcttctatcaagggtcaaattggtgaacctaaattgaacaccgaagctttaattccagatttgcatgatcctaagaccggtattaagatcgagattcataatgaagttgctccaagaggctggagacaagtgttattagaacaaggtccggaaaaattcgcccaaaaggttcgtgaattcaacggtaccttgcttatggatactacctggagagatgcccatcaatctttattggccacaagagtcagaactatcgatttgttaaacattgcccctacgactgctgttgcattgaacggttgctttgctttagaatgttggggtggtgccacttttgatgtctgtatgagattcttatatgaagatccatggagcagattaagacagttgcgtaagttggtgccaaacattccattccaaatgttgttaagaggtgctaacggtgtagcttactcttcattaccagataacgccattgaccaattcgttcttcaagcaaaggaaaatggtgttgatattttcagagttttcgatgcattaaacgacttagaacaattaaaggttggtattgacgctgttaagaaggctggtggtgttattgaagccactgtttgttactctggtgacatgttaaagcctggtaagaaatataatttagaatactacttaggtgtcgtcgatgatattgtcaagttgggtacacatttcttaggtatcaaggatatggctggtactttaaaacctaaggcagcaaaaatcttgattggtgcaattagagaaagatatcctaagttaccaattcatgtccacactcatgattctgctggtacaggtgttgccagtatgaccgaagctgcaaaggccggtgccgatgttgttgacgccgcatccaactctatgtctggtatgacttctcaaccttcaatcaatgctatcttagcttcgtttgaaggtgaagttgaaagtggtttacaggcctcattggttagagagttagataactactgggcgcaaatgagattattatactcatgtttcgaagctgacttgaagggtccagatcctgaagtttaccaacacgaaatcccaggtggccaattaactaacttgttgttccaagcccaacaattaggtttaggtagcaagtggatgttgacaaaggaagcttataagactgccaataagttattaggtgatatcgttaaggtcaccccaacttctaaggtcgttggtgacttggcacaatttatggtttctaataacttaagcgaagaagatgttactaagttagcaagtgagctagatttcccaagttctgtcttagacttcatggaaggtttaatgggtactccatacggtggattcccagaacctttgagaactaacatcttgggtaccaagagagtcaaattgaataacagacctggtctcaatttacctcctatcgactttgctgctgtcaaggaagagcttgtttccagatatggttccaatatcaatgaatgtgatattgcttcatatgtcatgtatccaaaggtctatgaagatttcagagaattatcagaaaagtatggtgacttatctgtattaccaactcgtttcttcttgaaggcatgtaatattaatgaagaaattgtcgttgatattgaaaagggtaagactttaattattaagttattagctattggtgaaatttctcaacaaacaggtaccagagaagtcttctttgaattgaatggtgaaatgagatcggtcactgttgacgataagactgtttctattgaaactaagaccagacctaaggccactagccctaacgaagttggtgctccaatggctggtgtggttgttgaaatcagatcaaaggttggtaatgaagttaagaagggtgatccaattgctgtcttatctgccatgaagatggaaatggttattagttctccagttctgggtaagattggtgaaattctcataaaggaaggtgattccgttgatgctaacgatttgattgcaagtgttgttaaataa

SEQ ID NO: 9691 - protein, 1173 aa, Debaryomyces hansenii CBS767
MSDGNEHKINQMRRASTVMGPMNKILVANRGEIPIRIFRTAHELSMQTVAIFSHEDRLSMHRLKADESYVIGKKGQFSPVQAYLQIDEIINIAKEHGVNMIHPGYGFLSENSEFARKVEEAGISWIGPTHKTIDAVGDKVSARTLAIQNGVPVVPGTPGPIADVEEAVKFVEKHGLPVIIKAAFGGGGRGMRVVREGDSVGEAFERAVSEAKTSFGNGTCFIERFLDKPKHIEVQLLADNYGNVIHLFERDCSVQRRHQKVVEVAPAKTLTKLVRDAILTDAVKLARLANYRNAGTAEFLVDEQDRHYFIEINPRIQVEHTITEEITGVDIVAAQIQIAAGASLKQLGLLQDKITTRGFAIQCRITTEDPSKNFQPDTGKIEVYRSAGGNGVRLDGGNGFAGSIISPHYDSMLVKCSCSGSTYEIVRRKMLRALIEFRIRGVKTNIPFLLAMLTNETFISGDCWTTFIDDTPSLFQMIRSQNRATKILSYLGDLIVNGSSIKGQIGEPKLNTEALIPDLHDPKTGIKIEIHNEVAPRGWRQVLLEQGPEKFAQKVREFNGTLLMDTTWRDAHQSLLATRVRTIDLLNIAPTTAVALNGCFALECWGGATFDVCMRFLYEDPWSRLRQLRKLVPNIPFQMLLRGANGVAYSSLPDNAIDQFVLQAKENGVDIFRVFDALNDLEQLKVGIDAVKKAGGVIEATVCYSGDMLKPGKKYNLEYYLGVVDDIVKLGTHFLGIKDMAGTLKPKAAKILIGAIRERYPKLPIHVHTHDSAGTGVASMTEAAKAGADVVDAASNSMSGMTSQPSINAILASFEGEVESGLQASLVRELDNYWAQMRLLYSCFEADLKGPDPEVYQHEIPGGQLTNLLFQAQQLGLGSKWMLTKEAYKTANKLLGDIVKVTPTSKVVGDLAQFMVSNNLSEEDVTKLASELDFPSSVLDFMEGLMGTPYGGFPEPLRTNILGTKRVKLNNRPGLNLPPIDFAAVKEELVSRYGSNINECDIASYVMYPKVYEDFRELSEKYGDLSVLPTRFFLKACNINEEIVVDIEKGKTLIIKLLAIGEISQQTGTREVFFELNGEMRSVTVDDKTVSIETKTRPKATSPNEVGAPMAGVVVEIRSKVGNEVKKGDPIAVLSAMKMEMVISSPVLGKIGEILIKEGDSVDANDLIASVVK

SEQ ID NO: 9692 - DNA, 2178 bp, Yarrowia lipolytica CLIB122
  CDS (1)..(2178)
atgagacgagtgatcaactccacgctacggtcgtactcgacaaaggctgcctcccagtccaacgcctctgtgcagcccgaaatccttaagtctctttgtgtggctaaccgaggagaaatcgtccacagagtgtgtgatacagcctccaaaatgggcattgacaccacatctttctacaccgagcccgatggaaacctcgccttctcgcgatctgcaaacaacaacttgaatctcggagctgacacaaagggttaccttgagatggacaagattgttcgcctggccaaggagaatggctgtgactccattcaccctggttatggtttcctttccgagaactctgagttcgcgaagaaggtccaagatgctggcttgatctttgtcggccctcctgctgccgctatggaggccatgggctccaagtctcgatccaaggagattatgaccgatgctggtgtctcgtgtgttcctggttaccacggagagaatcaggatcccaagtttcttgaggccgagtctgaaaagatgggcttccccgttcttatcaaggctgtcctcggaggaggaggtaagggtatgcgaattgtagagtccaaggctgacttccaaaagcagctggcctccgccaagtctgaagccaagtcctcttttggtgatgagcgtgtcctcgtcgagaagtacatcaagcgacctcgtcacgtggaggtccaggtctttgccgacaagttcggcaacgttgtggctctcggagagcgagactgttccgtccagcgacgacaccagaaggttcttgaggagtctcctgcccccggccttgagctctactccgccgactgccgacagaagatgtacaagcaggcctgtgacgctgctcgagccgtcaactacgagggagctggtaccgtcgaattcattttcgaccgagattcacccaacggacagttctactttatggagatgaacactcgactccaggtcgagcatcccgttaccgagatggtcactggtgttgatctcgttgagtggcagctccttatcgcctccggtcgacctctgcctaagacccaggaggagatccaggctgatatggacaagcttggtgtgcatgcaatcgaggcccgaatctactgtgaggaccccttcaaccagttcatgccttcttctggaaagattgtgcatatgcagcttccccaggtgggcaacccccgacttgatgtcacctttgagcagggcgacaccgtttctcccctctacgaccccatgatcggaaagctcattgttcgaggtgactctcgggaggaggctctcaagaagctgcgtctggctctcaatgagtacgagattgttggtcctaccacaaacattgaattcatcaagcgagttctcaagcacgagggattccggggcaacaaccccaccgatctcgataccggtttcattcctcgacacggcgaggtcctatttgccaacgagggaacccccagcgaggtttacgttcaggctgccattgcccaagctttccccaaggccctgtctgctccatccattctggaggctgccaacgctttctcttccgtcggaactgctggctggtcttcaatgcagactcgagaggttaccttcaagaacggcaaggagtctgtcgttgtcactctgactcagctccccggcaccaaccccaccgagcacacttttgccgccaaggtcggtgataaagccattggcaacgtgactgcttctcacttcaatggaaaggcccgatttaagttccccacaggccagcatgtcaacaccgttgtttctaacgactccaacctcggtaacgttaacgaggtccatgtcttccaccgaggaacccatcacaaagtcgagctggccactcctgactggatcactgccgtcaacaagcgaattggtgccggtgctgctgccggaggctccttcaatgaccccgacgccctggaggttgccactcctatgccttgtcgagtcgttcgagtcacagtcaagcctggagatgtcgtgtccaaggatgatgagctgctggtcatcgagtcgatgaagatggagaccactgttcgatctgcccgtgaacagcctactaaggtcaagagagtggcatttgttcctggagacctggtcaagcagggctccgttctcatcgagtacgaggagtag

SEQ ID NO: 9693 - protein, 725 aa, Yarrowia lipolytica CLIB122
MRRVINSTLRSYSTKAASQSNASVQPEILKSLCVANRGEIVHRVCDTASKMGIDTTSFYTEPDGNLAFSRSANNNLNLGADTKGYLEMDKIVRLAKENGCDSIHPGYGFLSENSEFAKKVQDAGLIFVGPPAAAMEAMGSKSRSKEIMTDAGVSCVPGYHGENQDPKFLEAESEKMGFPVLIKAVLGGGGKGMRIVESKADFQKQLASAKSEAKSSFGDERVLVEKYIKRPRHVEVQVFADKFGNVVALGERDCSVQRRHQKVLEESPAPGLELYSADCRQKMYKQACDAARAVNYEGAGTVEFIFDRDSPNGQFYFMEMNTRLQVEHPVTEMVTGVDLVEWQLLIASGRPLPKTQEEIQADMDKLGVHAIEARIYCEDPFNQFMPSSGKIVHMQLPQVGNPRLDVTFEQGDTVSPLYDPMIGKLIVRGDSREEALKKLRLALNEYEIVGPTTNIEFIKRVLKHEGFRGNNPTDLDTGFIPRHGEVLFANEGTPSEVYVQAAIAQAFPKALSAPSILEAANAFSSVGTAGWSSMQTREVTFKNGKESVVVTLTQLPGTNPTEHTFAAKVGDKAIGNVTASHFNGKARFKFPTGQHVNTVVSNDSNLGNVNEVHVFHRGTHHKVELATPDWITAVNKRIGAGAAAGGSFNDPDALEVATPMPCRVVRVTVKPGDVVSKDDELLVIESMKMETTVRSAREQPTKVKRVAFVPGDLVKQGSVLIEYEE

SEQ ID NO: 9694 - DNA, 3576 bp, Yarrowia lipolytica CLIB122
  CDS (1)..(3576)
atgtccaacgttcctgagaccaaggtggatccctcgctctcgacgcccgaggtgccctcgcagggccttcacagccgcctcgacaagatgcgagccgattccagtattctgggctccatgaacaagattctggtcgccaaccgaggagagatccccattcgaatcttcagaaccgcccatgagctttccatgcagaccgtggctatctacgcccacgaggatcggctctctatgcaccgattcaaggccgacgaggcctatgtgattggtgaccgtggcaagtacacccccgtccaggcctaccttcaggtcgacgagatcatcgagatcgcaaaggctcacggtgtcaacatggtccaccccggatacggtttcctttccgagaactccgagtttgctcgaaaggttgaggaggccggcatggcctggattggcccccctcacaacgtcattgactctgtcggtgacaaggtctctgcccgaaacctggccattaagaacaacgttcccgttgtgcccggtactgatggccctgtcgaggaccccaaggacgctctcaagtttgtggagaagtacggttaccctgttatcatcaaggctgcctttggtggtggaggccgaggtatgcgagttgttcgagaaggagacgacattgttgatgcattcaaccgagcctcctccgaggccaagactgcatttggcaacggaacctgtttcatcgagcgattcctcgataaacccaagcacattgaggtccagcttcttgctgacggccagggcaacgttgtacatctgtttgagcgagactgttccgtccagcgacgacaccagaaggtggttgagattgctcctgccaaggacctgcccgtggaggttcgagacgccattcttgacgacgctgtccgacttgctgaggacgccaagtaccgaaacgccggtaccgccgagttcctcgttgacgagcagaaccgacactacttcatcgagatcaacccccgaattcaggttgagcacacaattaccgaagagattactggcatcgacattgttgctgcacagatccagattgccgctggtgccactcttgagcagctgggactcacccaggacaagatctccactcgaggctttgccatccaatgccgaatcacaaccgaggaccctgccaagcagttccaacccgacaccggtaagatcgaggtctaccgatctgctggaggtaacggagttcggctcgatggaggaaacggttttgccggagccatcatctcccctcactacgattccatgctggtcaagtgctcttgttccggcaccacattcgagattgctcgacgaaagatgatccgagctctggttgagttccgaatccgaggagtcaagaccaacattcccttcctgttggctcttctcacccaccccactttcatcgagggtaagtgctggaccacttttatcgacgacactccttcgctgttcgacctcatgacctcccagaaccgagcccagaagctgcttgcctaccttgccgatctctgtgtcaacggcacttccatcaagggccaggttggcaaccccaagctcaagtccgaggttgtcatccccgtgctcaagaactctgagggcaagattgtcgactgttccaagcccgaccctgttggctggagaaacattcttgtcgagcagggccccgaggcctttgccaaggccgttcgaaagaacgacggtgtgcttgtcatggacaccacttggcgtgacgcccaccagtctctgcttgccacccgagttcgaaccaccgatctgctggctatcgccaacgagacctcccacgccatgtccggtgcttttgccttggagtgctggggaggagccaccttcgatgtcgccatgcggttcctgtacgaggacccctgggaccgacttcgaaagatgcgaaaggccgtgcccaacatccccttccagatgcttctgcgaggtgccaatggtgtcgcttactcctctctacctgataacgccattgaccactttgtcaagcaggccaaggataatggagtcgacattttccgagtgtttgacgctctcaacgatctcgaccagctcaaggtcggtgttgacgctgtcaagaaggccggaggagtggttgaggccaccgtttgctactccggagacatgctcaaccccaagaagaagtacaacctcgagtactacctcgattttgtcgatcgtgtggttgagatgggcactcacattctgggtatcaaggatatggctggtactcttaagcccgccgctgctaccaagctcattggtgccattcgagagaagtaccccaacctccccatccatgtccacacacatgactctgctggtactggtgtggcctccatggctgctgccgccgaggctggagctgatgtggttgacgtggcttccaactccatgtctggtatgacctctcagccctccatctctgctctcatggctactcttgagggcaagctttccactggcctggaccctgctcttgtccgagagctcgacgcgtactgggcccagatgcgactgctgtactcctgcttcgaggctgatctcaagggtcccgatcccgaggtgttccagcacgagattcctggtggccagctgaccaaccttctcttccaggcccagcaggttggtctgggagagcagtggaaggagaccaagcaggcttacatcgctgccaaccagctgctgggcgatattgttaaggtaacccctacctcgaaggttgtcggtgatctggcccagtttatggtttccaacaagctgtcatatgatgacgtcatcaaacaggctggctctctggacttccccggttccgtgctcgacttcttcgagggtctcatgggccagccctacggtggtttccctgagcctctccgaactgaggctctgcgaggccagcgaaagaagctgaccgagcgacccggtaagtctctgccccctgttgactttgctgccgtccgaaaggacctcgaggaacgatttggccacatcactgagtgcgacattgcctcttactgcatgtaccccaaggtgtttgaggactaccgaaagattgtcgacaaatacggtgatctatccatcgtccctactcgactcttcctggaggctcccaagactgacgaggagttctctgtcgagattgagcagggtaagactctgattctcgctctgcgagccattggagacctgtccatgcagactggtctacgagaggtctactttgagctcaacggagagatgcgaaagatttctgttgaggacaagaaggctgctgtcgagactgtttctcgacctaaggccgaccctggcaaccccaacgaggtcggagctcccatggccggtgtggttgtggaggtccgagtccacgagggcaccgaggtcaagaagggcgaccccgtggctgttctgtctgccatgaagatggagatggttatctctgcccctgtttccggtaaggtgggcgaggttcctgtgaaggagggcgactctgtcgatggttccgatcttatttgcaagattgtgcgggcttaa

SEQ ID NO: 9695 - protein, 1191 aa, Yarrowia lipolytica CLIB122
MSNVPETKVDPSLSTPEVPSQGLHSRLDKMRADSSILGSMNKILVANRGEIPIRIFRTAHELSMQTVAIYAHEDRLSMHRFKADEAYVIGDRGKYTPVQAYLQVDEIIEIAKAHGVNMVHPGYGFLSENSEFARKVEEAGMAWIGPPHNVIDSVGDKVSARNLAIKNNVPVVPGTDGPVEDPKDALKFVEKYGYPVIIKAAFGGGGRGMRVVREGDDIVDAFNRASSEAKTAFGNGTCFIERFLDKPKHIEVQLLADGQGNVVHLFERDCSVQRRHQKVVEIAPAKDLPVEVRDAILDDAVRLAEDAKYRNAGTAEFLVDEQNRHYFIEINPRIQVEHTITEEITGIDIVAAQIQIAAGATLEQLGLTQDKISTRGFAIQCRITTEDPAKQFQPDTGKIEVYRSAGGNGVRLDGGNGFAGAIISPHYDSMLVKCSCSGTTFEIARRKMIRALVEFRIRGVKTNIPFLLALLTHPTFIEGKCWTTFIDDTPSLFDLMTSQNRAQKLLAYLADLCVNGTSIKGQVGNPKLKSEVVIPVLKNSEGKIVDCSKPDPVGWRNILVEQGPEAFAKAVRKNDGVLVMDTTWRDAHQSLLATRVRTTDLLAIANETSHAMSGAFALECWGGATFDVAMRFLYEDPWDRLRKMRKAVPNIPFQMLLRGANGVAYSSLPDNAIDHFVKQAKDNGVDIFRVFDALNDLDQLKVGVDAVKKAGGVVEATVCYSGDMLNPKKKYNLEYYLDFVDRVVEMGTHILGIKDMAGTLKPAAATKLIGAIREKYPNLPIHVHTHDSAGTGVASMAAAAEAGADVVDVASNSMSGMTSQPSISALMATLEGKLSTGLDPALVRELDAYWAQMRLLYSCFEADLKGPDPEVFQHEIPGGQLTNLLFQAQQVGLGEQWKETKQAYIAANQLLGDIVKVTPTSKVVGDLAQFMVSNKLSYDDVIKQAGSLDFPGSVLDFFEGLMGQPYGGFPEPLRTEALRGQRKKLTERPGKSLPPVDFAAVRKDLEERFGHITECDIASYCMYPKVFEDYRKIVDKYGDLSIVPTRLFLEAPKTDEEFSVEIEQGKTLILALRAIGDLSMQTGLREVYFELNGEMRKISVEDKKAAVETVSRPKADPGNPNEVGAPMAGVVVEVRVHEGTEVKKGDPVAVLSAMKMEMVISAPVSGKVGEVPVKEGDSVDGSDLICKIVRA

SEQ ID NO: 9696 - DNA, 3591 bp, Aspergillus nidulans FGSC A4
  CDS (1)..(3591)
atggcttccattgtaccacacaatcagcctgaggaggccgttgatgagaccgagttcgttgatgaccaccaccatgctcatcaccgggactccgtccaccaccgtctgcgggccaattcggccatcatgcagttccagaagatcctcgtcgccaatcgtggtgagattcctattcgtatcttccgaacagcccatgagctatcccttcagaccgtcgccatcttctcccacgaggaccgactttcaatgcaccgccagaaggctgacgaggcctatatgattggaaagcggggccaatatactcccgttggtgcatacctggcaattgacgagattgtcaagatcgccctggaacatggggtgcatttgatccaccctggttatggtttcttgtcagagaacgcagagttcgctcggaaggtcgaacaatcggggatggtctttgttgggccgacccctgagacgattgagggactgggtgacaaggtctccgccaggagactggccatcaaggccaatgtcccggttgttcccggtactgagggtcctgttgagcgattcgaggaagtcaaggcgtttactgacacctacggcttccccatcatcatcaaggccgccttcggtggtggtggccgtggtatgcgtgttgtccgtaaccaggccgatctgcgtgactcttttgagcgtgctacttcagaggctcgctcagctttcggtaacggcacagtcttcgtcgagcgtttccttgacaagcccaagcacatcgaggtgcagttattgggtgacaaccacggcaacgtcgtccacctcttcgagcgtgactgctctgtccaacgtcgtcatcagaaagttgttgaaatcgcgcccgcaaaggatctccctcaaaacgtccgggacagcatccttgcagacgctgttaagctggctaaatccgtcaactaccgcaacgccggtactgccgagttcttggtcgaccagcaaaaccgctactacttcatcgaaatcaacccccgtatccaagtcgagcacaccatcacagaggaaatcaccggcattgatatcgttgctgctcagatccagattgccgctggtgctactctcgagcagctcggcctgacccaggaccgtatctccacccgcggtttcgctatccagtgccgtatcaccaccgaggaccccgctaagggattctctccggacactggtaagattgaggtgtaccgttccgccggtggtaacggtgtccgtcttgacggtggtaacggtttcgctggtgccatcattactccccactatgattccatgctggtcaagtgcacttgccgtggttccacttatgagatagcgcgccgcaaggtcgtgcgtgccttggtcgagttccgtattcgtggtgttaagaccaacattcctttcttgacctctttacttagccaccccacctttattgacggcaattgctggaccactttcattgatgatactcccgaactttttgccctggttggcagtcaaaaccgtgctcagaagctgctcgcttacctgggtgatgttgccgtgaacggtagcagcattaagggtcagattggtgaacccaaactcaagggcgacattatcaagcccactctccacgatgctgctggcaagcccatcgacgtctcctccccatgcactaagggctggaagcagattctcgaccaggagggtccagaggcttgggcgaaggcggtgcgtgccaacaagggatgcttgattatggacaccacctggcgtgatgctcaccagtccctgctcgccacccgtgtccgtaccattgacctgttgaacattgcccatgagacaagtcatgctctctccaacgcttacagtcttgagtgctggggaggtgccactttcgacgtcgccatgcggttcctctacgaggacccgtgggaccgtctgcgtaagctgcgcaaggctgttcctaacattcccttccagatgctgctccgtggtgccaacggagttgcctactcctcccttcctgataatgccatctaccacttctgtaagcaagccaagaggtgcggtgttgacatcttccgtgttttcgatgctcttaacgacatcgatcagctcgaggttggtataaaggcggttcacgccgctggcggtgttgtcgaagccactgtctgctacagcggtgacatgctaaacccctccaagaagtataacctggaatactacctcaaattggttgataagatcgttgctctcaagccccatgtcctcggaattaaggatatggctggtgtactgaagccccaggctgctcgccttctcattggtagtatccgtgagcgctaccccgacctccctattcacgtccacactcatgactctgccggtactggtgtggcgtccatgattgcctgcgcccaggcaggtgctgatgctgttgacgcggccactgatagcctttctggaatgacctctcagcccagcattggtgccatccttgcttctcttgagggcactgagcaggaccccggtcttgacagcgctcaagttcgggctcttgacagctactgggcccagctccgtctgctttactcgccttttgaagctggtctcaccgggcctgaccctgaagtctacgagcacgaaattcctggtggtcagttgaccaatcttatcttccaggctagccagctcggtctaggccagcaatgggccgagaccaagaaagcctacgaggttgccaacgacctgcttggcgacattgtcaaggtcactcctacctccaaggtcgtcggtgatttggctcaattcatcgtgtccaacaaattgacgcctgaagatgttatcaaccgcgcaggtgagcttgatttccctggctctgtccttgagttcctcgaaggtctcatgggccagccgtacggcggtttccccgagcctttgcgttccaaggccctccgtgaccgccgcaagctcgacaagcgccctggtcttttcctggagcccctggacttggcgaagataaaaaatgaccttcgtgagaagtacggctccgccaccgaatacgacgtggctagttacgctatgtaccctaaggtctttgaagactacaagaagttcgtccagaagtacggagacctttctgttcttcctacccgcttcttcctggccaagcctgagattggcgaggaattccatgtcgaactcgaaaagggtaaggtactgatcctcaagctgcttgccatcggtcctctttccgaccagactggccagcgtgaggtcttctacgaagtcaacggagaggttcgtcaagtctccgtcgacgataaaaaggcgtccgtcgagaacattgcccgccctaaggccgatgtcaccgacagcagccaggtcggtgctcctatgagcggtgttgtagtcgaaatccgtgtccacgagggctccgaggtcaagaagggtgacccgattgctgttctcagcgccatgaaaatggaaatggtcatatccgctccgcacagcggcaaggtgtctggattgctggttaaagagggcgactctgttgatgggcaggatctcatctgcaagattgccaaggcttaa

SEQ ID NO: 9697 - protein, 1196 aa, Aspergillus nidulans FGSC A4
MASIVPHNQPEEAVDETEFVDDHHHAHHRDSVHHRLRANSAIMQFQKILVANRGEIPIRIFRTAHELSLQTVAIFSHEDRLSMHRQKADEAYMIGKRGQYTPVGAYLAIDEIVKIALEHGVHLIHPGYGFLSENAEFARKVEQSGMVFVGPTPETIEGLGDKVSARRLAIKANVPVVPGTEGPVERFEEVKAFTDTYGFPIIIKAAFGGGGRGMRVVRNQADLRDSFERATSEARSAFGNGTVFVERFLDKPKHIEVQLLGDNHGNVVHLFERDCSVQRRHQKVVEIAPAKDLPQNVRDSILADAVKLAKSVNYRNAGTAEFLVDQQNRYYFIEINPRIQVEHTITEEITGIDIVAAQIQIAAGATLEQLGLTQDRISTRGFAIQCRITTEDPAKGFSPDTGKIEVYRSAGGNGVRLDGGNGFAGAIITPHYDSMLVKCTCRGSTYEIARRKVVRALVEFRIRGVKTNIPFLTSLLSHPTFIDGNCWTTFIDDTPELFALVGSQNRAQKLLAYLGDVAVNGSSIKGQIGEPKLKGDIIKPTLHDAAGKPIDVSSPCTKGWKQILDQEGPEAWAKAVRANKGCLIMDTTWRDAHQSLLATRVRTIDLLNIAHETSHALSNAYSLECWGGATFDVAMRFLYEDPWDRLRKLRKAVPNIPFQMLLRGANGVAYSSLPDNAIYHFCKQAKRCGVDIFRVFDALNDIDQLEVGIKAVHAAGGVVEATVCYSGDMLNPSKKYNLEYYLKLVDKIVALKPHVLGIKDMAGVLKPQAARLLIGSIRERYPDLPIHVHTHDSAGTGVASMIACAQAGADAVDAATDSLSGMTSQPSIGAILASLEGTEQDPGLDSAQVRALDSYWAQLRLLYSPFEAGLTGPDPEVYEHEIPGGQLTNLIFQASQLGLGQQWAETKKAYEVANDLLGDIVKVTPTSKVVGDLAQFIVSNKLTPEDVINRAGELDFPGSVLEFLEGLMGQPYGGFPEPLRSKALRDRRKLDKRPGLFLEPLDLAKIKNDLREKYGSATEYDVASYAMYPKVFEDYKKFVQKYGDLSVLPTRFFLAKPEIGEEFHVELEKGKVLILKLLAIGPLSDQTGQREVFYEVNGEVRQVSVDDKKASVENIARPKADVTDSSQVGAPMSGVVVEIRVHEGSEVKKGDPIAVLSAMKMEMVISAPHSGKVSGLLVKEGDSVDGQDLICKIAKA

SEQ ID NO: 9698 - DNA, 2139 bp, Aspergillus nidulans FGSC A4
  CDS (1)..(2139)
atgccgctctcatctcttctccgcacttccgcccgcctggggcagacggttgttgctcgacgctcacgacgaactgcttccacagtaacctccaattcctcgagtaactttcgcgcattagactcgattttaattgccaacaggggagaaatcgctctacgagttggtaggactgcggcccagcatggaattcgagtcactacgctctatacggatccagattcccaagcgcagcatgctttgagtacaccatatgcattcaatctcggctccgtgtccgcgtacctcgatggagaccgtatcattgaaatcgcaaaggcccaaggatgccagggaatacaccccggctacggcttccttagtgagaactcagagttcgcacgaaaatgtacagaagcagggctggtctttattggaccgccgtggaaagctatcgaggatatgggagataagagtcagtctaagcatatcatgactgccgctggagtgccctgtgtccccggctaccacggtgaaaaccaagaccctaatttcctcgaagcggaggccgataaaatcaaatacccagtgctcatcaaagcaatcaagggcggtgggggcaaaggaatgagaatcgctcgttcaaaggaagagtttcaagcgcagcttcagtcggcgaagtcggaggctatgaactcttttggggatgaccatgtcctagtcgagaaatatatcacaacaccgcgacacattgaggtccaagtctttgctgacaaacacggaaattgtgtagcgctgggagagcgagattgcagcatccaacggcgacaccaaaaaatcctggaagagtcaccggctcctcacctgcctgatgccacaagaaaagacatatgggcaaaggctcggtcggccgcgttagccgttcgctacgagggcgccggtacagttgagtttatcttcgacaacgatacgggagagttcttcttcatggaaatgaatactagacttcaggtggagcatcccgtaaccgagatggtcactgggcaagatttggtgcattggcagctgaaggtcgcggagggcgccgagcttccattaacgcaggaagaagtggaagccaatatagctacccatggtcatgcgatcgaagcgagaatctacgctgagaaccctgcgcagggcttcattccagattccggtgctcttctccatgtccgcactcccgccaccaccgaggacgttcgaatcgacgccggatttgtgcaaggtgacgaggtttcggcgcactatgatcccatgattgcgaaactaatcgttcggggcgccgaccgacaagaagctattcgcaagcttgctgcagcattggaagagtacgaggtggccggcccagcgacgaatatcgagttcttgaaatcagtttgcaaaagtgccgacttcatctctggcaaagtcgaaacgggttacattgagaagcatcacgacgagctattcgcccaatcgccaattgagccggaagtgctggcacaagtagcactggcttgcttgcatgacgacgctcgtctcgccgcgcaaaaagcaaccaattttcaaggctccgcagtgggatttgggccaggcttccaacaacaccacatgaccttcacgaactcagcatcagcaaacaacgaggcctttgacgtcaaagttcaacaaaccggagagaacgtgttcaatgtaaagattggcgagcacactttcgagcaggtgaccagccaccctaatgcggacttccgcatcatcacctcgttcttcccgcacacccgtttggacaccactgtcatccgcgacggcgattcaatcgtcgtatttcagcgcggcaggcaataccgccttactacaccacgggcgaaatggatggaaaaagcactcggcatgaaagacgtcacaaatagtgtactcgccccaatgccctgcaaagtcctccgtgtcgaggtccaagccggcgatactgtagaaaaggaccagccacttgtggtgattgagagcatgaaaatggaaacagtcatccgcagcccacaaagagggaaaattgccaaagtcgtccatcaaaaaggagaccaatgcaaaagcgggacaccgcttgtggagtttgctggtgaagacgaagaggcgtcgaaatag

SEQ ID NO: 9699 - protein, 712 aa, Aspergillus nidulans FGSC A4
MPLSSLLRTSARLGQTVVARRSRRTASTVTSNSSSNFRALDSILIANRGEIALRVGRTAAQHGIRVTTLYTDPDSQAQHALSTPYAFNLGSVSAYLDGDRIIEIAKAQGCQGIHPGYGFLSENSEFARKCTEAGLVFIGPPWKAIEDMGDKSQSKHIMTAAGVPCVPGYHGENQDPNFLEAEADKIKYPVLIKAIKGGGGKGMRIARSKEEFQAQLQSAKSEAMNSFGDDHVLVEKYITTPRHIEVQVFADKHGNCVALGERDCSIQRRHQKILEESPAPHLPDATRKDIWAKARSAALAVRYEGAGTVEFIFDNDTGEFFFMEMNTRLQVEHPVTEMVTGQDLVHWQLKVAEGAELPLTQEEVEANIATHGHAIEARIYAENPAQGFIPDSGALLHVRTPATTEDVRIDAGFVQGDEVSAHYDPMIAKLIVRGADRQEAIRKLAAALEEYEVAGPATNIEFLKSVCKSADFISGKVETGYIEKHHDELFAQSPIEPEVLAQVALACLHDDARLAAQKATNFQGSAVGFGPGFQQHHMTFTNSASANNEAFDVKVQQTGENVFNVKIGEHTFEQVTSHPNADFRIITSFFPHTRLDTTVIRDGDSIVVFQRGRQYRLTTPRAKWMEKALGMKDVTNSVLAPMPCKVLRVEVQAGDTVEKDQPLVVIESMKMETVIRSPQRGKIAKVVHQKGDQCKSGTPLVEFAGEDEEASK

SEQ ID NO: 9700 - DNA, 3627 bp, Ustilago maydis 521
  CDS (1)..(3627)
atgcctaccgagcccgagaccgcgcaggctccggccggtgctcccaggagcacctttgtcgacaccttcgagagccagcccggcactccaggtgagagaactggccaccttttccccaccatccagcgcatccgaagcagcatgacaggtgaggctactggtccattgaagaagctcatggttgccaatcgcggtgaaatcgccatccgaatcttccgtaccgcccacgagcttgccatgaccactgtcgcgctctactcgttcgaggacaggatgagcgcccatcgatacaaggccgacgaggcctatcaggtcggtgcaggtctcaaccccgtctcagcctacttggccatcgacgacattgtccgcattgctctcgagcacaaagttgatatgatccatcccggttacggtttcttgtccgagaaccctcactttgccaagaaggtcgaggaggccggcattgctttcatcgggccccgccccgagaccatcgatggtttgggtgacaagaccaaagcccgtgaccttgcccgcaaggccaacgtgcccattgtgcccggtacacccggtcccattgccagctacgaggaggccaagccattcgtcgaggaagttggcttcccggtcatcatcaaagcagctatgggtggtggtggacgaggaatgcgagtcgtccgtaagatggaggaatttaaggagtcctttgaacgtgctgtttccgaggccaagtcggccttcggtgaccccactgtctttatcgagcgtttcctcgaccgacctcgccacattgaagtgcagctgcttgccgacggtgagggcaacgtcgtccacctcttcgaacgtgactgctccgtacagcgtcgtcaccagaaggtcgtcgaagtggcacctgcccccaacctccgcgacgacgtgcgccaggccatcctcagcgatgctgttcgtctcgccaagacggccggctaccgaaatgctggcactgccgagttcctggtcgaccagcagaaccgatactactttatcgagatcaacccccgtctgcaggtcgaacacactatcaccgaggagatcaccggtatcgacattgtcggtgctcagatccagatcgctgcgggtgctaccttggccgaccttggactcagccaggagaccatccagaagcgtggctccgccatccagtgtcgtatcactaccgaagatcccgctgccaacttccagcccgacacgggtaggatcgaggtctaccgttctgccggaggtaacggtgtgcgtctcgacgccggctccggctttgccggtgctcagatcacgccacactacgattccttgctcgtcaaggtctcgtgccgtggcgcgacctacgaggtggcacgaagaaagatgctgcgatccttggtcgagttccgtatccgcggtgtcaagactaacatccccttcttgttccgtctcttgacccacgaggcctttgctaccgccagcacttggaccaccatgattgacgacacacctgagctcttcaacctggttcaaaccaagaaccgagcccagaagctgctagcctacctcggcgacgtcgcagtcaatggcagttccatcgccggtcaggtcggcgagcctggtctcaaggaggagattcagattcccagcttcaccgaccccaaggacccgtccaagcctctcgacaccaccaagccgtgcaccgagggttggaggaacatcattatcaacgagggacccgaggcctttgccaaggctgttcgagcctacaagggaacgctcatcatggacaccacatggcgtgacgcccaccagagtctgtttgctactcgtctgcgaaccattgacatggtcaacattgccaaggagaccagctacgtactcaagaacgccttctcgctcgagtgctggggcggtgccaccttcgacgtttctatgcgcttcctctacgaggacccttgggagcgtctgcgcaagatccgaaagctcgtgcccaacattcccctgcaggcgctcgtccgtggtgccaacgccgtaggctacactgcttatcccgacaacgccatctacgagttcagcaagaaggccgttgaatgtggtctcgacatcttccgtgtctttgactcgctcaactcgctcgattcgctcaagcttggtatcgacgccgcaaagaaggccggtggtgtcgctgaaggtaccatttgctacactggtgacgttgccaatcctagcaagcaccccaagtacacgctcgagtactacctcaacctcacggacgaactcgtcaagaccggaatccacatcctcggtatcaaggacatggctggtctgctcaagccaactgccgccaagatactcgttggcgccatcaggaagaagtaccccgacctgccaatccacgtccactcgcacgacacggccggtatcgccctttcgagcatgctcgcctgtgcggaggccggtgcagacgtggtcgacgttgccatcgacagcatgagtggtctcacttcgcaaccatcgatgggtgcgctcgtcagtgctctcgagcagaccggtctcggtgcgggcattcgccacgaggacatccagaacctcaacctgtattggagccaggtgcgtcagctctaccagtgcttcgaggccaatgtcaaggcttcggactcgtcggtgttcgaccacgagatgcctggtggtcagtataccaacctcatgttccagtcgcagcagctcggccttggtacccagtggaaggagatcaagaacgcctacatccaggccaacaagctttgcggtgacattgtcaaggtgacgccctcttccaaggtggtgggtgattttgctcagtttatggtcgccaacaagctcacggccaaggatgtcgaggaacgcgccgacaagctcgacttccccagctcggtcatcgagtacttccagggctacctgggcacaccgcctggcggcttccccgagcctctgcgaagcaaggtgatccgcgacaagaagcgcatcgatggccgaccgggtgccagcatggagcccattgactttgcccaagtcaagaaggatcttactgccaagtatggccgttcgatgagcgccaccgacgccatcagctacatcatgtaccccaaggtatttgaagagttccagggcttcctcgacctgtacggagacctgagcaacctgcctacacgctacttccttggtaaggcgcacccgggcgaggagttgcacgcctacatcgaccgcggcaagctgctcattgtcaagctgctcgccgtgggtgcactcaacaccaacaacggtacccgagaggtgttcttcgaactcaacgccgagcctcgagccctcaccatcgaggaccgaagtgctgcggtcgagaccgtcaagcgtgagaaggcctcttcagaccctggcagcgtcggctcgcctttggccggtgtcgttgtggagatccgtgccaaggagggtcactcgatcaaggctggcgacccattgttcatcatgagtgccatgaagatggagacggtcgtttcggcacccgtcagcggtcacgtcaagcgcgtcctcgttgagcagaacgactcggtgtcccagggcgacttgctctgcgagatcgagcactag

SEQ ID NO: 9701 - protein, 1208 aa, Ustilago maydis 521
MPTEPETAQAPAGAPRSTFVDTFESQPGTPGERTGHLFPTIQRIRSSMTGEATGPLKKLMVANRGEIAIRIFRTAHELAMTTVALYSFEDRMSAHRYKADEAYQVGAGLNPVSAYLAIDDIVRIALEHKVDMIHPGYGFLSENPHFAKKVEEAGIAFIGPRPETIDGLGDKTKARDLARKANVPIVPGTPGPIASYEEAKPFVEEVGFPVIIKAAMGGGGRGMRVVRKMEEFKESFERAVSEAKSAFGDPTVFIERFLDRPRHIEVQLLADGEGNVVHLFERDCSVQRRHQKVVEVAPAPNLRDDVRQAILSDAVRLAKTAGYRNAGTAEFLVDQQNRYYFIEINPRLQVEHTITEEITGIDIVGAQIQIAAGATLADLGLSQETIQKRGSAIQCRITTEDPAANFQPDTGRIEVYRSAGGNGVRLDAGSGFAGAQITPHYDSLLVKVSCRGATYEVARRKMLRSLVEFRIRGVKTNIPFLFRLLTHEAFATASTWTTMIDDTPELFNLVQTKNRAQKLLAYLGDVAVNGSSIAGQVGEPGLKEEIQIPSFTDPKDPSKPLDTTKPCTEGWRNIIINEGPEAFAKAVRAYKGTLIMDTTWRDAHQSLFATRLRTIDMVNIAKETSYVLKNAFSLECWGGATFDVSMRFLYEDPWERLRKIRKLVPNIPLQALVRGANAVGYTAYPDNAIYEFSKKAVECGLDIFRVFDSLNSLDSLKLGIDAAKKAGGVAEGTICYTGDVANPSKHPKYTLEYYLNLTDELVKTGIHILGIKDMAGLLKPTAAKILVGAIRKKYPDLPIHVHSHDTAGIALSSMLACAEAGADVVDVAIDSMSGLTSQPSMGALVSALEQTGLGAGIRHEDIQNLNLYWSQVRQLYQCFEANVKASDSSVFDHEMPGGQYTNLMFQSQQLGLGTQWKEIKNAYIQANKLCGDIVKVTPSSKVVGDFAQFMVANKLTAKDVEERADKLDFPSSVIEYFQGYLGTPPGGFPEPLRSKVIRDKKRIDGRPGASMEPIDFAQVKKDLTAKYGRSMSATDAISYIMYPKVFEEFQGFLDLYGDLSNLPTRYFLGKAHPGEELHAYIDRGKLLIVKLLAVGALNTNNGTREVFFELNAEPRALTIEDRSAAVETVKREKASSDPGSVGSPLAGVVVEIRAKEGHSIKAGDPLFIMSAMKMETVVSAPVSGHVKRVLVEQNDSVSQGDLLCEIEH

SEQ ID NO: 9702 - DNA, 2271 bp, Ustilago maydis 521
  CDS (1)..(2271)
atgtcgacggtgcgaagcggggtggttggtcgacagttgggcacgtggagtggcacagatgctggtgtgagcaggggtcacgttcagcgcgctcgaggtgtaggtgagcgacgaaacgcttccagtgtggacgagtctcgactggatacgcgtgcaccgcgcgcactgaagcggttgccagccaagatcgtgatcgcaaatcgcggagagattgcgtgccgaatcatcggcacctgtcgccgactcggtatctcgaccgtcgccgtctactcggaagcggatgccatgtctcagcatgtaaagctcgccgatgaggcgtactgcattggtcctgccgcatcctcggaatcgtatctgtgtcaagaaaagatcctcgccatcgcacaacgtacgcatgcaaccatggtgcatcctggctacggcttcctctctgaaaacgcgtcgtttgccaaattgctccaagactcgcgcatcacgttcatcggtcctcctccaagcgcgatcgatgcaatgggctcaaagagcgcaagcaaagacatcatgttggcggccaacgtaccgtgcgtgcctggatatcacggtctccaacaggacgccgaatcgcttgcgtccgaggcagacaagatcggctacccggtcctcatcaaggcggtcaagggcggaggtggcaaaggcatgaagatcgcctgtacgcgcgacgagtttgcggatgcgctctcgtccgcgcagcgtgaagcgctcaagtcgttcggagacgctacggtgctcatcgagaaatacctcactgctccacgccacgtcgaggtacaggtgtttgcagatacgcacggcaatgcagtgtacatctcagaacgcgactgctcggtccaacgtcgtcatcaaaaaatcattgaagaagcgcccgccccgcacctcgacgcacgcctgcgaaccgagttgggagaaaaggcagttgctgctgccaaagcggtcggctacgtaggcgcaggaacggtcgagtttattctggatgcgcagagaccgcaagagttctactttatggagatgaacacgcgcctgcaggtggagcacccggtaaccgagatggtcagtggcctagatctggtcgaatggcagcttgaggtggcagctggcaatcgactgcctttgctgcagcacgagctcagcatccaaggccacgcattcgaggcgaggatctatgcggaaaacacggatgccaactttcttcccgatacaggtacgctcgttcacgtctcgttgcctcgcacgacgacgacgacgcactcgaacccggcgctcatccatcgagatgctggccaagtgagttcgctcaacgatgcacaagccgtcgtccgcgtcgacacgggctttgtcacgggcgacgagatttccgtccactacgatccgatgattgccaaactcatcgtcaaaggtcgtgaccgtaccgaggcgctacgcatcatggctcatgcactatcgcagtaccaggtggtgggaccgatgaccaacatccagtttctaaagaacctcgtgcgacatcccaagtttatcgccggtgaggtggagacaggctttatagcaaagtacggagagcaggcgttgtttggcgatccgtatacgagcgaggctgagttgggcgaggcgattgcgcagggggttgtgtggatctaccagcgcgatcttggtgctactttggacgacgccaagcggggtgtgtggacgagcgatgagtttgttcgttggcagagccgcacgttttcggtcggtcacaagacgctgggggaggtgcaggtctgcgtgacgcctacgaatgcacgagccgacacgtttcatgtcgtcattgacgcccgcgacggatcgcagatgcggtacgactcgctgcgcacacatggctccaccacgatcgcgcacactgcttcttcaggctcgtcgccacccgtctacacaaccttcctcgccaccggcgtctcgaccagcttcaacctactcgcgcccacctggttctcacaaacgaccacagcctcaacgcacatggcgtccgacctagtcagctcgcctatgccgagcaagatcgtcgattgcaaagtcaagcgcggcgactctgtcaaagctggccaaaccatcgtcatcctagaggcgatgaagacagagatctcgctcaaggctcctagagatgcggtcgtagagagcgtcagcgcaaagtgcaagcccggtggcttggtagccgaggcaactgtgttggtaacgtttgtcgcgcaaaacgacgagtag

SEQ ID NO: 9703 - protein, 756 aa, Ustilago maydis 521
MSTVRSGVVGRQLGTWSGTDAGVSRGHVQRARGVGERRNASSVDESRLDTRAPRALKRLPAKIVIANRGEIACRIIGTCRRLGISTVAVYSEADAMSQHVKLADEAYCIGPAASSESYLCQEKILAIAQRTHATMVHPGYGFLSENASFAKLLQDSRITFIGPPPSAIDAMGSKSASKDIMLAANVPCVPGYHGLQQDAESLASEADKIGYPVLIKAVKGGGGKGMKIACTRDEFADALSSAQREALKSFGDATVLIEKYLTAPRHVEVQVFADTHGNAVYISERDCSVQRRHQKIIEEAPAPHLDARLRTELGEKAVAAAKAVGYVGAGTVEFILDAQRPQEFYFMEMNTRLQVEHPVTEMVSGLDLVEWQLEVAAGNRLPLLQHELSIQGHAFEARIYAENTDANFLPDTGTLVHVSLPRTTTTTHSNPALIHRDAGQVSSLNDAQAVVRVDTGFVTGDEISVHYDPMIAKLIVKGRDRTEALRIMAHALSQYQVVGPMTNIQFLKNLVRHPKFIAGEVETGFIAKYGEQALFGDPYTSEAELGEAIAQGVVWIYQRDLGATLDDAKRGVWTSDEFVRWQSRTFSVGHKTLGEVQVCVTPTNARADTFHVVIDARDGSQMRYDSLRTHGSTTIAHTASSGSSPPVYTTFLATGVSTSFNLLAPTWFSQTTTASTHMASDLVSSPMPSKIVDCKVKRGDSVKAGQTIVILEAMKTEISLKAPRDAVVESVSAKCKPGGLVAEATVLVTFVAQNDE

SEQ ID NO: 9704 - DNA, 3612 bp, Cryptococcus neoformans var. neoformans B-3501A
  CDS (1)..(3612)
atgaccgccgtgggtgagcttcagacacctatcgaagcctgggtttcccacctcggcatcgatacctctcgacctggtactcccaatgcaccgggtacacccgctattccccacaccatcactggcctccgaaagagacaagccggccactctggccctctcaaaaagctccttgtggctaaccgaggagagattgccatccgtgtcttccgtactgcccacgagcttgccatgtctaccgtggccatctactctcatgaagaccgaatgggcgctcaccgatacaaatccgacgagtcttaccttgttggcaagggtatgtcccctgttgctgcctatttggcccaggacgatattatcaggattgcccttgaacatgaagtagacatgatccaccctggttacggtttcctctctgagaacgccgaattcgccaagaaggttgaagatgctggtattgcctttatcggtccccgccccgagaccatcgacgccctcggtgacaagaccaaggcccgaactcttgccattaagaccggtgttcccgtcgtccccggtactcctggccctgtcgagtcttatgacaaggctgccgcgttcattgagaaatacggattccctgttattatcaaggccgctatgggtggtggtggacgaggtatgcgagttgttagggatcaggagagttttaaggagagctttgagcgagctgtcagtgaggccaagagtgctttcggtgacggtaccgtcttcatcgagcgattccttgaccgaccccggcacattgaagtccagcttcttgccgatggtgaaggtaactgcgtccacctctttgagcgagactgttccgtccagcgacgtcaccagaaggtcgtcgaagtcgcccctgctccccatctcgaggaatccgttcgacaagccatcctgtccgatgccctcaagctcgccgacgctgtcaagtaccgtaacgcgggtaccgccgaattcctcgtcgaccaacagaaccgacactactttattgagatcaaccctcgtatccaggtcgagcacaccattaccgaagagatcactggtatcgacattgtcgccgctcagatccagattgctgctggtgtgaccctccaacagcttggtttgacccaggagaacatccacaggcgaggattcgctatccaatgtcgtatcaccactgaggatgccgccgccaacttccagcctgacactggtaagattgaagtctacaggtctgctggtggtaatggtgtccgattggacgcgagctccggttatgccggtgcgcagatcactccccactacgactctttgctcgtcaaatgttccgttagcggtgccacttatgaggttgctaggaggaagatgctccgttctttgatcgagttccgtatccgaggcgtcaagaccaacatccccttcttgatccgtcttctcactcacgaagtcttcgagtctggtaagacctggactacctttatcgacgacactcccgaactcttcaagctcgttcactctcagaaccgagcccagaagcttctcgcctacctcggtgatattgccgttaacggatcttccatcaagggtcagatgggcgaacccggtctcaagactgaggctatgatccccacgattgtggacgctgagggtaatgctgttgacactagcaagccttgcttgactggttggaggaacattatcgttgaacaaggccccgaggccttcgccaaagctatcaggaactacaagggttgtcttatcatggacactacatggcgagacgcccaccaatctctccttgctacccgtatgcgaaccattgacatggccaacattgctcgagagacttcccacgccctccagaacgcctactctctcgaatgctggggtggtgccacttttgatgtcgcgatgaggttcctctacgaggacccttgggtcaggttgaggactttgagaaagttggtccccaacattcctttgcaagctttggtccgaggcgccaacgctgtcggttacacctcttaccccgacaatgccatctatgacttctccaagaaggctgttgaggccggtctcgatattttccgagtctttgactctctcaactaccttgaaaacttgaaggttggtatcgatgccgctaagaaggctggtggtgtcgttgaaggcactatctgttactctggtgacgttgccaaccccaagaagaccaagtacacccttcaatactacctcgagctcaccgacgcgctcgtcaaggaaggtatccacgttcttggtatcaaggatatggccggtctcctcaagcccgaggctgctcgattgcttatcggtgctattcgaaaggcccatcccgaacttcctatccatgttcactctcacgacactgctggtatcgctgctgcgagcatgatcgcttgtgccgccgccggtgccgatgttgttgacgtcgccatcgatgacctttccggtctcacctctcagcctgccatgggtgccgtctgcggtgctctcgagcagaccggtttgggtactggtatctcttacgagaacatccaggcgctcaaccaatactggactcagatcaggaagctctaccagtgcttcgaggccaacgtccgcgcttccgactctggtgtctttgaccacgagatgcccggtggtcagtacaccaacttgcagttccaggcctcccaacttggtttgggtacccagtggttggacatcaagaagaagtacattgaggccaacaagctctgtggagacatcattaaggtcactccttcctccaaggtcgttggcgactttgcccaattcatggtttccaacaacctcgacgcgcaggacgtccttgaacgagccacctctcttgacttcccctcttcagtcgtcgaattcttccaaggttacctcggccagccgtacggtggtttccccgagcctcttcgatctaacatcatccgtgacaaggctaggatcgatgagcgtcctggtttgaacatggctcctcttgacttcaagaagattaaagctgagttgagggagaagtacggcccccaaatcaccgacttcgatgtagcgagctactacatgtaccccaaggtgttcgaggagttccagggctttgttgagaagttcggtgacctcagtgtcatgcctactcgattcttcctcgccaagcccgcgatcaatgaagaaataatcatttccatcgaaactggtaagactcttaccatcaaactccttgccatcggtcctctcgaccaatccaagggtacccgagaatgcttctttgagctcaacggtgaaactcgtgccgtcgtcatcaacgacaccaacgctgccatcgagcatgtatccagggagaaggcctctggtgaccccggaagtgtcggatctcctatgtctggtgttgtgatcgacgtccgagtcaaggacggccaagccgtcaaggccggtgaccccttgtgtgtcctctctgctatgaagatggagagtgtggtttccagtcccgtatctggtaacgtcaagcgtgtgttagtcaaggagaatgactctatcgcccaaggtgacttagtcgtcgaggttacgcattag

SEQ ID NO: 9705 - protein, 1203 aa, Cryptococcus neoformans var. neoformans B-3501A
MTAVGELQTPIEAWVSHLGIDTSRPGTPNAPGTPAIPHTITGLRKRQAGHSGPLKKLLVANRGEIAIRVFRTAHELAMSTVAIYSHEDRMGAHRYKSDESYLVGKGMSPVAAYLAQDDIIRIALEHEVDMIHPGYGFLSENAEFAKKVEDAGIAFIGPRPETIDALGDKTKARTLAIKTGVPVVPGTPGPVESYDKAAAFIEKYGFPVIIKAAMGGGGRGMRVVRDQESFKESFERAVSEAKSAFGDGTVFIERFLDRPRHIEVQLLADGEGNCVHLFERDCSVQRRHQKVVEVAPAPHLEESVRQAILSDALKLADAVKYRNAGTAEFLVDQQNRHYFIEINPRIQVEHTITEEITGIDIVAAQIQIAAGVTLQQLGLTQENIHRRGFAIQCRITTEDAAANFQPDTGKIEVYRSAGGNGVRLDASSGYAGAQITPHYDSLLVKCSVSGATYEVARRKMLRSLIEFRIRGVKTNIPFLIRLLTHEVFESGKTWTTFIDDTPELFKLVHSQNRAQKLLAYLGDIAVNGSSIKGQMGEPGLKTEAMIPTIVDAEGNAVDTSKPCLTGWRNIIVEQGPEAFAKAIRNYKGCLIMDTTWRDAHQSLLATRMRTIDMANIARETSHALQNAYSLECWGGATFDVAMRFLYEDPWVRLRTLRKLVPNIPLQALVRGANAVGYTSYPDNAIYDFSKKAVEAGLDIFRVFDSLNYLENLKVGIDAAKKAGGVVEGTICYSGDVANPKKTKYTLQYYLELTDALVKEGIHVLGIKDMAGLLKPEAARLLIGAIRKAHPELPIHVHSHDTAGIAAASMIACAAAGADVVDVAIDDLSGLTSQPAMGAVCGALEQTGLGTGISYENIQALNQYWTQIRKLYQCFEANVRASDSGVFDHEMPGGQYTNLQFQASQLGLGTQWLDIKKKYIEANKLCGDIIKVTPSSKVVGDFAQFMVSNNLDAQDVLERATSLDFPSSVVEFFQGYLGQPYGGFPEPLRSNIIRDKARIDERPGLNMAPLDFKKIKAELREKYGPQITDFDVASYYMYPKVFEEFQGFVEKFGDLSVMPTRFFLAKPAINEEIIISIETGKTLTIKLLAIGPLDQSKGTRECFFELNGETRAVVINDTNAAIEHVSREKASGDPGSVGSPMSGVVIDVRVKDGQAVKAGDPLCVLSAMKMESVVSSPVSGNVKRVLVKENDSIAQGDLVVEVTH

SEQ ID NO: 9706 - DNA, 2202 bp, Cryptococcus neoformans var. neoformans B-3501A
  CDS (1)..(2202)
atgcgacccataagaggtattcttatcaatcggggtgctctcgcaatgccccaatatatcaaaccccaccgcctcacccgagcgcatcatatggtagcggcaaatcggacaccctgtggcggccaatattctactgttgctcaacatggtaatttggtccatcttttcgacggcaataccgagctgaaggtcggaaaacgtcctttcaaaaagatcttgattgccaaccgaggagagatagcatgcgcgatcattcgtaccgctcgacgattgggtatcgctactgtttcagtatacagcgaagctgatcgaaactgtcaacacgttgctatggctgacgaggcatacctcatcgggccttccccaagttcggagagctatctcaagatggaaaaaatactccatatcgcaaagctcaccggggcagaagcaatacacccaggatacggttttctttcagaatcttcagactttgcagagaaagtgagagatgcaggtctcatttttatcggaccttcagcagaagcaatcaagagcatgggcagcaaacgtgagagtaaagagattatggtcgcggctggtgtgccatgcgtaccgggatatcatggggctgaccaatcttacgatgcattgctcaaaggctctcagcagacaggttacccccttattatcaaaccgacacacggcggaggaggcaaaggaatgcgcatcgttcgagatcctttgacacttcaagatgagctcctctctgcccaacgtgaagcactgaagagttttggaaatgatgaagtcttgctggaaaggtggttggagaaaccaagacacgttgaagtacaagtattcggagaccaatttgggaactgcgtcgcgctttgggagagggactgttcagtacagagaagacaccaaaaaatcattgaagaagcgccagccccaggattatcacctgcgttgaaacgggacttcgcagaaaaggcagtagcagcagccaaagcaatcaattatgttggggctgggacagttgaatttatcatggatgccgagacgggcgagcacttcttcatggagatgaatacccgtttacaggtagaacaccctgtcacagaaatgattacgggtatggatcttatagaatggcagctttctatcgcggccggtaatcctattccatacacccaggacaagatcccctgcatcggtcatgcgtttgaagcgcgaatctacgctgaaaagcccgaatacaattttttgccagacactggcaagctgttccatgtgcgttcgccaattaatacaccacaccggctggagacaggtttccaagaaggcgatgaaatcagctcccattatgacccaatgattgccaaacttgtggttcatggtaaagatcggcctcaggctctgtcgcttttacgatcggcattggcggaatatcaaattgttgggccctccaccaacatcgagtttctcaagtcagtcgccgaacacgatgactttgcagctgggtcagtcgaaacgagtttcataccatcacatcacgacgagttattcccaccacgagttgtcccccaggacatcttggcacaagcggcggtttttttggttctccgagcggaatcaggccagaaaagtttggcacctgctgggccatgggcatccttggtgcacagacgattcagtgacatctgtacattctcatttcgactcgattcggaacaagtcaccgtcaacccggtcgaatctggatatcatgttgcaattgcaggtcaagacttgtacagtcagttgattcaaagctgcgttacctcttccaccgagttcagtgctcaaatagggcccaaaaagatacaaagtaccattatccctatcttcgtaaatggtcttgaaaaattgcatatcttttcgtcatcatcgcactatgtaatcacgcaccatccatcgcctctcgagggcatagaaggcccgcaatctttgtcttccagcggtacggggaccctcgtctcgcccatgcctgcaactgtcatcgaagtgaaggtcaaaaagggggataaagtgaaggagaatcaagtgttgtgtgtgttggaaagtatgaagatggagatcaatttgagagctgaaagggatggggtagtgggcgaagtgagggccgaaaagggtaaaggtgttgaagagggagaaattttggtactgttggaaccatga

SEQ ID NO: 9707 - protein, 733 aa, Cryptococcus neoformans var. neoformans B-3501A
MRPIRGILINRGALAMPQYIKPHRLTRAHHMVAANRTPCGGQYSTVAQHGNLVHLFDGNTELKVGKRPFKKILIANRGEIACAIIRTARRLGIATVSVYSEADRNCQHVAMADEAYLIGPSPSSESYLKMEKILHIAKLTGAEAIHPGYGFLSESSDFAEKVRDAGLIFIGPSAEAIKSMGSKRESKEIMVAAGVPCVPGYHGADQSYDALLKGSQQTGYPLIIKPTHGGGGKGMRIVRDPLTLQDELLSAQREALKSFGNDEVLLERWLEKPRHVEVQVFGDQFGNCVALWERDCSVQRRHQKIIEEAPAPGLSPALKRDFAEKAVAAAKAINYVGAGTVEFIMDAETGEHFFMEMNTRLQVEHPVTEMITGMDLIEWQLSIAAGNPIPYTQDKIPCIGHAFEARIYAEKPEYNFLPDTGKLFHVRSPINTPHRLETGFQEGDEISSHYDPMIAKLVVHGKDRPQALSLLRSALAEYQIVGPSTNIEFLKSVAEHDDFAAGSVETSFIPSHHDELFPPRVVPQDILAQAAVFLVLRAESGQKSLAPAGPWASLVHRRFSDICTFSFRLDSEQVTVNPVESGYHVAIAGQDLYSQLIQSCVTSSTEFSAQIGPKKIQSTIIPIFVNGLEKLHIFSSSSHYVITHHPSPLEGIEGPQSLSSSGTGTLVSPMPATVIEVKVKKGDKVKENQVLCVLESMKMEINLRAERDGVVGEVRAEKGKGVEEGEILVLLEP

SEQ ID NO: 9708 - DNA, 2112 bp, Tribolium castaneum
  CDS (1)..(2112)
atgccgttgtgggcctcattgttacaaaacacaaatttcggcgttcaaataacaacaagaagatggaacagtactttgagaaggatagataaattattaattgcaaatagaggtgagatagcttgtcgtgtgttgaggactgcccgccggttgggcgtaaaaacggtcgcggtttatagcgacgctgataagaattcgttacacgtttcacaggcagatgaggcctataacatcggccctccccaagcctcgcaaagttacctccgaggtgacaaaattttagaagtagcgcacaaatccggctgtcaggcgatccatccaggctacggcttcctttccgaaaatgtggaatttgcggaaaattgcgaaaaaaacaaaatcattttcatgggccctccggcttcggcgattcgcgacatgggaatcaaaagcaaatcgaaggaaattatgtcgaaagccggggttcccataatcgggggttaccacggggaagaccaagacagggccaagctcaaagcagaagccctgaaaatcggatttcccgtcatgataaaagccgtgagaggtggtggcggcaaaggaatgaggatagctctcacggagtctgaatttgaggaagccttggagtcggccaaaagtgaggcgcagaaagctttcggcgattctgtggtgcttttggagaaattcgtgcaagagccgaggcacgtggaagtgcaggtttttgcagatatgcatggcaatgctgttcacttgttcgaacgggattgttcggtgcagaggaggcatcagaaaattatagaggaagcgccagcgccgggaataagcgaagaattgagggctgaactgggggctgctgccgtaagagctgccaaagcggttgggtatgtgggggccgggacggtggaatttattctagacaggaaaagtcacaattttcattttatggaaatgaatacgcgattgcaggtagaacacccgataacggagatgattacaggaaccgatttggtggaatggcaaataaaagtcgctcgaggtgaaaagttgccattaactcaggaggaaataacactgagtggccacgcgtttgagtctcgaatttacgcggaggacccaagtgggggctttttgccaggggctggtgttttgtcgtatttgagtagtccccaagttcgggatgacatgaggattgaaactggcattcgagaaggggatgaagtgtcggttcattacgaccccatgattgccaaactggtcgtttggggccaaaacagatctgaaagtctcctaaaaatgcaatcccttctcttgcagtataacgtggcaggtttggaaaccaacgttaatttccttctagatcttgtaaggcatccggaatttatttccggaaacgttcacactaatttcattaaagaaaacaatgatagtttatttaaaaataaaaccgtaactccaacgcaaatcactcaagcagctttaagcgtggttttaaaagacgagttattagacatgaaaaatgccatgggtcgaaatgaccaatttaacccatttgtggttgaatctgggttccgaattaaccacaacttgattcgcgacgtcaaaatgaaatttaaggatgaagaaaaactagttaaagtaaaatttattggccacaacacgtaccacatttcgctcgatgagggaaagacctggagtgtagttcagggcgaatttaacaaagaaagtctaaaaagcacaattgatggtatcaccaccagtgtgaatgttttcaggggtgacgacgttattgcaattttcgatgatagtggtaaagttgaatttaatttagaaaagccatcgtttgtgacaattcaagaagatgattcttcggcaggaggttcgttgaacagagctgttgccccaatgcccggtgtcatagacaaggtcttggtcagtgctggagaccaagtgaaaaaaggagattcgctttttgtcttaatagctatgaaaatggaacatgtggtgaaggccgatcgggacgctgttattgaaaatatttatttcaaagtcggtgataacgtccagaaggatgttactgttatacaatttaaggaggaaaatgtgtctagctaa

SEQ ID NO: 9709 - protein, 703 aa, Tribolium castaneum
MPLWASLLQNTNFGVQITTRRWNSTLRRIDKLLIANRGEIACRVLRTARRLGVKTVAVYSDADKNSLHVSQADEAYNIGPPQASQSYLRGDKILEVAHKSGCQAIHPGYGFLSENVEFAENCEKNKIIFMGPPASAIRDMGIKSKSKEIMSKAGVPIIGGYHGEDQDRAKLKAEALKIGFPVMIKAVRGGGGKGMRIALTESEFEEALESAKSEAQKAFGDSVVLLEKFVQEPRHVEVQVFADMHGNAVHLFERDCSVQRRHQKIIEEAPAPGISEELRAELGAAAVRAAKAVGYVGAGTVEFILDRKSHNFHFMEMNTRLQVEHPITEMITGTDLVEWQIKVARGEKLPLTQEEITLSGHAFESRIYAEDPSGGFLPGAGVLSYLSSPQVRDDMRIETGIREGDEVSVHYDPMIAKLVVWGQNRSESLLKMQSLLLQYNVAGLETNVNFLLDLVRHPEFISGNVHTNFIKENNDSLFKNKTVTPTQITQAALSVVLKDELLDMKNAMGRNDQFNPFVVESGFRINHNLIRDVKMKFKDEEKLVKVKFIGHNTYHISLDEGKTWSVVQGEFNKESLKSTIDGITTSVNVFRGDDVIAIFDDSGKVEFNLEKPSFVTIQEDDSSAGGSLNRAVAPMPGVIDKVLVSAGDQVKKGDSLFVLIAMKMEHVVKADRDAVIENIYFKVGDNVQKDVTVIQFKEENVSS

SEQ ID NO: 9710 - DNA, 6687 bp, Tribolium castaneum
  CDS (1)..(6687)
atggcgcggttggtaactgaaaaactaaacggtcgtgactacattaaccacctatgggacgaaatagaaggcaccacttccgaccttgacataaacccgtcgtcaatccaagacttcaacaaccacttaccagtcctcctggaagaattttgggaagatgccttaaaaaaactatcaggggaaacaaccctggacgaatacgacgacgagttgaaaacctatctcctagtcctcatctaccagtgcataacccaatcccacgaactcatttcctacacctgtgtcttacacgcacttgaagtgtacttaactctgctcacaaccccccaaagtgacgacttctacaaaagcaaactctattgtgcgactttaagcacgcttttgtccgcttttgacgctacagttagcgaaaacgtaaacaataggctcatgtttaaactgcgctgttttgtaaccaaagccaaattcaatgcgaacgatttggagataacgctcgcgagtttgacccaaatcgtcttcgtcaagacacaagacacgtttcagaattttgagccaaattcgggcgcttcaccagcgtttgaagcgctcctaagtttgaaaattttgtacgaagtggagaaaatccccgcgcggaaaacacaaatcgcgtgttattttttcaacgggctgaggaaacccaacattcatctgccgccacggcttttcagcatcgttcagaccaatttccggaatttgctcaaaagcttgcacaagaaatttaaggaggatcattacaagacgttccttaatgcctttatccacgtctggaagcatccagaattcacgtttttcggcgaagctgtttgcattatgaacggtttgaaggagaaacactaccgtactttaatcgacgttttgaacaaaatgatgtcttcgaagtcggtccataacaatttgtttaaactgtctttggcgattatttgtttcccgcctaagcacacttccattgataaaattaaagtgacgaatgaaattttactaaggaacattttgctcaattgtatttcgcacaatggagcgcttgaatcacttgccgaaattttggtgtcgcctgatttggataaaaattacgtcaaggaaccagtcaaagctgttttcaatgttggcagtgaccaaataatgaatcccgttactataattcgaggactgcaaagtttgatgaataagaagtggagcagtcgctcgaaaaataagcatttgtttgttgtttttgtttctgtgatgttgtttagcgaagaggatcatccacaactttatagagaggttttagaatacttgacagaagggtgctctccctttgacctaaaaccctttttgccgcttttatccgagacttatttaaaactgaacgaaaaaaactacaaatatagcgcacttcaaattttgaaagtactttttaaaatggcactgcatccaatggcatcttcgactgaatttgttaagtatttatacatggctatgatttacccaaacatttgtaaaggaatctcgcaaaaacctgattatttcatcgaaccgatcatttcggacgactttaatttccccgattttttccaaaaatgccacactttaggcctgattaaaaatgagcacataagtcgaacgattggaagtctctcaaacatcacaaaatctaacttaaaattactttgcgcgatcgttcacctgactgaatttaaagaactgtcgcaaattgccgaccacataaacgacaattttatgatgatttgtaacagttccgacttgaattatttattttacatttacaataaaatattcaagaacaacaccggtttaatgcgattgaaccaaaacttgaggtgtaacgaaattatggtttgttttctcaaacatcacctcctcagacagactttgaggtggaattgcgtagctaatgcttttgccttgttgaaaactcttgaaaagttcacaaacctagacgaggatttttccagattaaaagagcaatatgatcaaaagttagctctgactttgcaacacaagggcagttttctcccgctattgtatttctcgcagttagtgattttcagtaaactcacaccgaatgatgaaaatcttaaaaatgtcaccgattttttgcaattatgcagcgatggattgcatcaaagatcgcctgaatttaacccaaaactctggatcggctgtttactcctttacaccaacatttccatcataaaaaccagtctggttgaaccatgcttggaacacctccagagtggtttaaactcaccggtaatggtggttaaattaacctccctgaacctgacatttgacctatgcaacctggtgacccacaattttgaggacttgacacgttacatgttcaaccagctcgtacacggcgacattgtcttcaaaaaaacatgtttgaagaaaatcgatcgtttgattcgcgacgattatttgaaactagatttggaacagtttttggtttttattgcgattttaggcgacagaaatgtggatttaagcgattatttgagacagcttttgaatgagaattttttcgtgtctaatgcttccgtcactgcgagattttttgtgcctttgattgtacatattaacggatacaggaaacataccgggtataagttgggtaaaagtggggacgaattgattgaactcgtggccagaaatgtgacaaataggcgaaagatttattcgttgttgtttgcaagtcttccggttaaaacacggtttaatattattcaaataattgggacgcaaattttggataaaatgatgaaaggggtgcttaagcttgacgagggtttttggaaaatgattaaagattcgatctttatttttaaattgttggctttgaattcaaacgaggaggaagttggtgcaaatttttacaaaaaagtttcaggacatatctctaaatatttgttacagaagggtgaatattcggagaaaagttcctacgttgaataccacaaagaaattacacaaggaacggaacttttactaaagttgttgtttttcaatgattttgataatattcagcaacacattagtatttctctgtttgatgcaatcatgcattggaccaattttctgatggctgatacccaacggcctcccgcaatgctcgtccgcctcatcagctcgaaaaccctcctccgctcgacccagcacatctccttcctccctgcaacatgcaacttctccacaaaaatcgaatacaaaccaatcagaagcgtcctcgtggcaaatcgtggcgaaatcgccgttcgtgttttccgcgcttgtaacgaacttggaatcaaatcggtggcaatctactccaaagaggacagagcccacattcacagactcaaagccgatgaaagttacctagtgggtgaaggcctaccacctgtacaagcctaccttaacatacccgaaattatcaaaatttgtaaagacaacggcattgacgctgtacatccaggctatggatttctgtcagaaagggccgactttgcacaagctgttatcgatgccggaattagattcatcggaccgtcgccaaaggtcgtgcaccagatgggggacaaagtggccgccagagaggcggctattgctgcaggtgttcctattgttccggggacagatggacctgtcaccacaaaggaggaagccaaggagttttgcgtcaaacacggattacctgtcatttttaaggcggcttatgggggcggcggccgtggcatgcgcgtcgtccgcaagatggaagaagtggaggagaacttccagagagcatcgtccgaagccctaagtgccttcggtaacggtgccatgtttattgaaaaattcatcgaacgtccaagacacatcgaagtgcaactaatgggtgataaggccggtaatgtggtgcacctctacgagcgcgattgttccgtccaacggaggcaccagaaggtggtggaaatggccccagccccccatttggacatcaacgtccgtaataaaatgaccgatttggccgtaaaacttgccaaacatgtgggctatgaaaatgccggcactgttgaatttttatgcgatgaaaaaggcaatttctactttatcgaagtgaacgctcgactccaagtcgaacacacggtcacggaggaaatcaccggaattgatttggtgcaaacgcaaatccgggtcgctgaaggaatgacgcttccggagatgggaatcgagcaagaaaatatcaaaccaaacggttttgcgattcaatgccgggtgaccaccgaagacccagccaaaaacttccaaccggatacgggaaggatcgaagtgttccggtccggtgaagggatggggatacgtctagatggcgcgtcggcgtttgcaggagcaattatttcgccctattatgattcgctcctagtcaaggtcattgcacattcgagggacttgcaagcgtcgtgcgctaaaatgaaccgagcattgagggaatttcgcgttcgaggtgttaaaactaacgtcccttttcttctaaacgtgttggaaaatcaaaagtttttgaatggagctgtcgatacttatttcattgacgaaaatccgcaactttttaatttcccacagacgcaaaatcgggcacaaaaattgctcaattatttagggcaggtgcttgttaatggaccacaaactcccctagctacgtcaagtaaaccgtcggatattaaaccgcatttgccagaggtgtcgcaagacgcccaaccaccgaaaggcttccgtgacatttacaaacagcaaggtcccgaagcttttgctaaagccgttcgcaatcacaaaggccttcttttgatggacacaacatatcgtgatgcccaccaatcactgctcgctaccagagtcaggtcgcacgacctattgcgaatttcacctttcgttacacacaactttaaccagttgtattcgctggaaaattggggcggggctacgtttgatgtcgctttgagattcttgcacgaatgtccgtgggaacgcttggaggagatgcgaaaattgatcccgaacattccgttccagatgttgctcagaggagcaaacgctgtcggctacacgaattatcccgataacgttgtcttcaaattctgcgagttggcggtccaaactggaatggacgttttccgcgtctttgactctctgaactaccttccaaacctgattgtgggtatggaagccgcaggcaaagctggcggaatcgtcgaagccgctatttcctattccggtgacgtgagcaatccgaacaaaacgaaatacgacctaaaatattacttaaacattgctgaggaactagtcaaggctggaacgcatgttttggccattaaggacatggccgggttacttaaaccggcagctgggaggatgcttgtgagcgctttacgtgacaaataccccgatcttccaatccatattcacacccatgacacaagtggtgctggagttgccgcaatgttggcctgtgctgaagctggagctgatgttgttgatgttgctgttgattccatgtctgggttaacaagtcagccaagtatgggcgcagttgttgcaagtcttcaaggcactcaactcgacacaaaacttgatttatcgaaagtgtccgaatattccgcctattgggaacaaaccaggactttgtatgcgccgttcgagtgcacgacgacgatgaagtcaggaaacgccgatgtttatattaatgaaattcccggagggcagtacacgaacttacagttccaagcgtattctctcggtcttggcgactttttcgaagacgttaagaaggcgtacgctgaggctaacattctcctgggtgacataataaaagtgacaccttcgtcaaaagtcgtgggtgaccttgcccagttcatggtccaaaacaaactgagtcctgaggacgtcctaaacaaggctgaagaattatctttccctaaatcagtagtggagtatttgcaaggtcacatcgggcaaccctacggcggtttccctgaaccgttacgctcgaaagtacttagagacatgccacgtattgaagggcgtcctggggcgtcccttcctcccttagaattcgacaaactcaagactgatcttaaggaaactttcccgcatgcaaccgatcgtgacgtcatgtcggcagctttgtacccccaagtcaccaacgaatacttagcgtttaaagagcaatacggccctgttgataaactcgacacgaggattttcctcgttgggccaaaagtgggcgaagagtttgaagtgacaatcgaaaagggcaaaactttgggcattaaaacactagcaatggccgaggatttgacggagaatggggaacgtgaagtgttctttgaactgaacgggacgctacgttcggttcttatcagagataaggatgcagggaaagaaatccacgtgcatcccaaagctgataaagccaataagaagcaagtgggggctccaatgccgggaactgttattgatattagggttaaagttggggagaaagttgagaaaggaactccgttggttattttgtcggctatgaagatggaaactgtggttcagagtccgattgctggtgttatcaaaactttggatgtcaatatggggatgaaactggaagctgaggatttgatgatgactgttgagtaa

SEQ ID NO: 9711 - protein, 2228 aa, Tribolium castaneum
MARLVTEKLNGRDYINHLWDEIEGTTSDLDINPSSIQDFNNHLPVLLEEFWEDALKKLSGETTLDEYDDELKTYLLVLIYQCITQSHELISYTCVLHALEVYLTLLTTPQSDDFYKSKLYCATLSTLLSAFDATVSENVNNRLMFKLRCFVTKAKFNANDLEITLASLTQIVFVKTQDTFQNFEPNSGASPAFEALLSLKILYEVEKIPARKTQIACYFFNGLRKPNIHLPPRLFSIVQTNFRNLLKSLHKKFKEDHYKTFLNAFIHVWKHPEFTFFGEAVCIMNGLKEKHYRTLIDVLNKMMSSKSVHNNLFKLSLAIICFPPKHTSIDKIKVTNEILLRNILLNCISHNGALESLAEILVSPDLDKNYVKEPVKAVFNVGSDQIMNPVTIIRGLQSLMNKKWSSRSKNKHLFVVFVSVMLFSEEDHPQLYREVLEYLTEGCSPFDLKPFLPLLSETYLKLNEKNYKYSALQILKVLFKMALHPMASSTEFVKYLYMAMIYPNICKGISQKPDYFIEPIISDDFNFPDFFQKCHTLGLIKNEHISRTIGSLSNITKSNLKLLCAIVHLTEFKELSQIADHINDNFMMICNSSDLNYLFYIYNKIFKNNTGLMRLNQNLRCNEIMVCFLKHHLLRQTLRWNCVANAFALLKTLEKFTNLDEDFSRLKEQYDQKLALTLQHKGSFLPLLYFSQLVIFSKLTPNDENLKNVTDFLQLCSDGLHQRSPEFNPKLWIGCLLLYTNISIIKTSLVEPCLEHLQSGLNSPVMVVKLTSLNLTFDLCNLVTHNFEDLTRYMFNQLVHGDIVFKKTCLKKIDRLIRDDYLKLDLEQFLVFIAILGDRNVDLSDYLRQLLNENFFVSNASVTARFFVPLIVHINGYRKHTGYKLGKSGDELIELVARNVTNRRKIYSLLFASLPVKTRFNIIQIIGTQILDKMMKGVLKLDEGFWKMIKDSIFIFKLLALNSNEEEVGANFYKKVSGHISKYLLQKGEYSEKSSYVEYHKEITQGTELLLKLLFFNDFDNIQQHISISLFDAIMHWTNFLMADTQRPPAMLVRLISSKTLLRSTQHISFLPATCNFSTKIEYKPIRSVLVANRGEIAVRVFRACNELGIKSVAIYSKEDRAHIHRLKADESYLVGEGLPPVQAYLNIPEIIKICKDNGIDAVHPGYGFLSERADFAQAVIDAGIRFIGPSPKVVHQMGDKVAAREAAIAAGVPIVPGTDGPVTTKEEAKEFCVKHGLPVIFKAAYGGGGRGMRVVRKMEEVEENFQRASSEALSAFGNGAMFIEKFIERPRHIEVQLMGDKAGNVVHLYERDCSVQRRHQKVVEMAPAPHLDINVRNKMTDLAVKLAKHVGYENAGTVEFLCDEKGNFYFIEVNARLQVEHTVTEEITGIDLVQTQIRVAEGMTLPEMGIEQENIKPNGFAIQCRVTTEDPAKNFQPDTGRIEVFRSGEGMGIRLDGASAFAGAIISPYYDSLLVKVIAHSRDLQASCAKMNRALREFRVRGVKTNVPFLLNVLENQKFLNGAVDTYFIDENPQLFNFPQTQNRAQKLLNYLGQVLVNGPQTPLATSSKPSDIKPHLPEVSQDAQPPKGFRDIYKQQGPEAFAKAVRNHKGLLLMDTTYRDAHQSLLATRVRSHDLLRISPFVTHNFNQLYSLENWGGATFDVALRFLHECPWERLEEMRKLIPNIPFQMLLRGANAVGYTNYPDNVVFKFCELAVQTGMDVFRVFDSLNYLPNLIVGMEAAGKAGGIVEAAISYSGDVSNPNKTKYDLKYYLNIAEELVKAGTHVLAIKDMAGLLKPAAGRMLVSALRDKYPDLPIHIHTHDTSGAGVAAMLACAEAGADVVDVAVDSMSGLTSQPSMGAVVASLQGTQLDTKLDLSKVSEYSAYWEQTRTLYAPFECTTTMKSGNADVYINEIPGGQYTNLQFQAYSLGLGDFFEDVKKAYAEANILLGDIIKVTPSSKVVGDLAQFMVQNKLSPEDVLNKAEELSFPKSVVEYLQGHIGQPYGGFPEPLRSKVLRDMPRIEGRPGASLPPLEFDKLKTDLKETFPHATDRDVMSAALYPQVTNEYLAFKEQYGPVDKLDTRIFLVGPKVGEEFEVTIEKGKTLGIKTLAMAEDLTENGEREVFFELNGTLRSVLIRDKDAGKEIHVHPKADKANKKQVGAPMPGTVIDIRVKVGEKVEKGTPLVILSAMKMETVVQSPIAGVIKTLDVNMGMKLEAEDLMMTVE

SEQ ID NO: 9712 - DNA, 2055 bp, Tribolium castaneum
  CDS (1)..(2055)
atgacaatacagaatgttccaatatttaggaattttgcgcaccataagacaccagcgtcttcaaccaaaagttttagtaaaattttagtggccaatagaggggaaattgcgtgcagaatcataaaaaccgccaagaagatgaatttaaaaacggtggctgtttactctgaagctgatgcattctctccccatgtgaagttagccgacgaggcagtatttttggggccgtctttggcgtccgaatcctacttaaacattaaaaaaatcatcgatgcggttaaatccaccggtgcagaggcggtgcacccgggttacggtttcttgtccgagaacgcgtctttcgtttctctgctggaggatgaaaaaatagttttcgttggacccccagctggggtaattaataaactcggtgacaaattagcatcaaagaagctcgctcaaaatgcaggcgttaacgtaattccaggattcgacggtgaaataagggatgctaaacactgtgttgaaatagctcggcaaattggatatccggtaatgataaaggcatctgctggtggcggtggcaaaggaatgagaattgcaagaaacgacgacgatgcaaggaacggctttcaaatgtcaactgaagaagccgcttctagcttcggagataatcgtattttacttgagaaacttatagaaagccctaggcacgttgaagtacaagtcttaggagataaacacgggaggattgtttacctaaacgagagagagtgcagcattcagcgcagaaatcaaaaaattgtagaagaggcgccgagtacgtttctggacgtggaaactcgaaaagctatgggcgagcaggccgtgcggctttgcaccgacatcggctaccactccgcaggaactgtcgagtttttagtggacaagaatcgcgcgttttatttcctggaaatgaacacaagactacaagtggaacatcccgtcaccgaggcgataacaggggttgacatagtgcaacaaatgattcgaatcgcccaaggatatccactcgatgtaactcaagaagacgtaaaaattaacggacacgccattgaatgtcgaatttacgccgaggatccttacaaaaacctgggttccccgagtattggaaaactttttaaatatagagagccgaatagggttcagggaataagatgtgatagtggtgttgaagaaggcagcgaaatcactttctattacgactcaatgatctgcaaactaatatgttttgggaaagatcgacaagaagccatcaaaaaaagcacacaagcacttgattattacgttgtgagaggagttacgcacaatgtgccacttttgcggagcatcctgtcgcatgaacgtttcgcaatcggggacataaacacaaatttcttatcggaagcgtatccgaacggctttggcggacatgagcttaatttgcgcgaaaaaaatcaactacttgctatagcctcagcgttttacgtgaggaatgactcgagaaatcgggtgaataatcccacccaacaaaacgagtggaatgttgttgtaaaactgaatcgcgacactcacactgtacgcatttccgagcgatgtgattttttcgaaatagagatcaacgattccaaagtgtacaaaataaataaaatgggtttaaatttagccgaaccggtgacagaaattaaattaaatggagagcaagctgttgtgcaattgatttctaaaaaccctagcggtgattacaaaatctcctaccttggaactacctacgatttaaatataattcccaagaaagcggcggatttgttacacctaatgccccaagaacttcagccagatatatctaaaacaattaaatccccgatgccaggtttaattaaaagtttatcttgcaaagaaggcgattgtataaccgagggccaagagttgtgtacaattgaggccatgaagatgcaaaattccataattgcactcacttcgggcaaaattaaaacggtttacatcaaggaaggcagcgtagttagcgataacgacgttttaatcgacttggaataa

SEQ ID NO: 9713 - protein, 684 aa, Tribolium castaneum
MTIQNVPIFRNFAHHKTPASSTKSFSKILVANRGEIACRIIKTAKKMNLKTVAVYSEADAFSPHVKLADEAVFLGPSLASESYLNIKKIIDAVKSTGAEAVHPGYGFLSENASFVSLLEDEKIVFVGPPAGVINKLGDKLASKKLAQNAGVNVIPGFDGEIRDAKHCVEIARQIGYPVMIKASAGGGGKGMRIARNDDDARNGFQMSTEEAASSFGDNRILLEKLIESPRHVEVQVLGDKHGRIVYLNERECSIQRRNQKIVEEAPSTFLDVETRKAMGEQAVRLCTDIGYHSAGTVEFLVDKNRAFYFLEMNTRLQVEHPVTEAITGVDIVQQMIRIAQGYPLDVTQEDVKINGHAIECRIYAEDPYKNLGSPSIGKLFKYREPNRVQGIRCDSGVEEGSEITFYYDSMICKLICFGKDRQEAIKKSTQALDYYVVRGVTHNVPLLRSILSHERFAIGDINTNFLSEAYPNGFGGHELNLREKNQLLAIASAFYVRNDSRNRVNNPTQQNEWNVVVKLNRDTHTVRISERCDFFEIEINDSKVYKINKMGLNLAEPVTEIKLNGEQAVVQLISKNPSGDYKISYLGTTYDLNIIPKKAADLLHLMPQELQPDISKTIKSPMPGLIKSLSCKEGDCITEGQELCTIEAMKMQNSIIALTSGKIKTVYIKEGSVVSDNDVLIDLE

SEQ ID NO: 9714 - DNA, 1347 bp, Prochlorococcus marinus str. MIT 9303
  CDS (1)..(1347): transl_table=11
atgaccatcggcaaggtgctgatcgccaaccgcggcgaaattgccctcagaattctgcgtagctgcagagagctgaatatccccacagtggctgtttacagcaccgtggatcgcaatgcgctgcacgttcaacttgctgatgaagccgtctgcgttggcgaggctcctagcagcaagagctatctcaatatccccaatatcctcgcggctgcaacctcccgcggggtcgatgccattcatccgggctatggatttctagccgaaaacgatcgattcgccgaaatctgtcgtgaccatggcatcacctttgtcggtccttcaccccatgcaatccgctccatgggagacaagtcgaccgctaaggcgaccatgcaacaagtcggtgttccgactgtgccaggtagcgagggcttgctcgccagtccagaagaagcagctgagctggcgaagggaatgggctacccagtgatgatcaaagccaccgcaggtgggggtggccgcggcatgcgcctggtcaccacgccagaccaactggaaaacctcttcaaggccgcccaaggagaggccgaagcggccttcggcaatcctgggctctacatggagaaattcattgaccggccacggcacgtcgaagtgcagatcctgtcggatcgacacggcaacgtcatccacctcggcgagcgtgactgctccattcagcgacgtcaccaaaaactgttggaagaatcccccagcccagccctcacccccgaattacgcctgcgcatgggtgaggctgcggtggccgccgcaaggagcatcaactacgaaggcgctggaaccgtggaattcctccttgatcgcaagggtgacttttacttcatggaaatgaacacccgtattcaggttgagcatcccgtcacagaaatggtgacaggcatcgatttgatcgcagaacaactgcacatcgccggaggcgatcccatcagcatcaaacaagaggacatccaactaagaggccatgccatcgagtgtcgaatcaatgctgaagactccacccacaacttccgcccctcaccagggcaaatcacaggctggttaccaccaggaggaccaggggtacgcatcgacagccacgtctataccggctacgacataccgcctttctacgattcgttgattggcaaggtgatcgcctgggggcataaccgagacgcggccctcaaacgaatgaaaagagcactcaatgaatgtgctgtcacaggaatccccaccacagttgcattccatctcgaactgctcaatcgggaagaatttcttagaggagatgttcacaccaaatttgtcgaacaggacatgctcgactga

SEQ ID NO: 9715 - protein, 448 aa, Prochlorococcus marinus str. MIT 9303
MTIGKVLIANRGEIALRILRSCRELNIPTVAVYSTVDRNALHVQLADEAVCVGEAPSSKSYLNIPNILAAATSRGVDAIHPGYGFLAENDRFAEICRDHGITFVGPSPHAIRSMGDKSTAKATMQQVGVPTVPGSEGLLASPEEAAELAKGMGYPVMIKATAGGGGRGMRLVTTPDQLENLFKAAQGEAEAAFGNPGLYMEKFIDRPRHVEVQILSDRHGNVIHLGERDCSIQRRHQKLLEESPSPALTPELRLRMGEAAVAAARSINYEGAGTVEFLLDRKGDFYFMEMNTRIQVEHPVTEMVTGIDLIAEQLHIAGGDPISIKQEDIQLRGHAIECRINAEDSTHNFRPSPGQITGWLPPGGPGVRIDSHVYTGYDIPPFYDSLIGKVIAWGHNRDAALKRMKRALNECAVTGIPTTVAFHLELLNREEFLRGDVHTKFVEQDMLD

SEQ ID NO: 9716 - DNA, 1371 bp, Herminiimonas arsenicoxydans
  CDS (1)..(1371): transl_table=11
atgtttgaaaaaattctcattgccaatcgcggcgaaatcgcgctccgtatccagcgcgcctgccgagaaatgggcattaaaaccgtggtcgtccattccgaagccgaccgcgacgccaaatatgtcaagctggccgacgagtccgtgtgtatcggccctgcgccttccacactgagctatctgaacatgccggccatcatcagcgcggcggaagtaaccgatgcggaagcgatccatccaggttacggcttcctgtctgaaaacgccgattttgcagaacgcgtagaacagtccggttttgtcttcatcggtccgcgttcggaatccatccgcatgatgggcgacaaggtgacagccaagcagacgatgatcaaggctggcgtaccgtgcgtacccggctcggatggcgccctgccggacgatccgaaggaaatcattcaaactgcacgcaaggtcggctacccggtcattatcaaggcagctggtggcggcggcggacgcggcatgcgcgtggtgcataccgaagcggcgttgctgaatgccgtcacgatgaccaaaaccgaagccggttcagcctttggcaatccggaagtctatatggagaaatatctggaaaatccgcgtcacgtggaaatccagatcctcgccgatgaacacaaaaacgccatctggctgggcgagcgcgattgctccatgcagcgccgccatcagaaagtgctggaagaggcgcctgcgcccggcatcccgcgcaaaaccatagaacgcataggcgatcgttgcgccgaagcctgtcgcaagatgggttatcgcggcgccggcaccttcgagttcttgtatgaaaacggcgaattctatttcatcgaaatgaatacccgcgtgcaggtcgagcatccggtaacagaaatgattaccggcatcgacattgtgcaggaacagatccgcatcgccgccggtgaaaaactgcgttatcgccagcgcgacatcgttctgaacggccatgcaatcgaatgtcgcatcaatgccgaagatccgttcaagttcacgccatcgccaggcaagatcgtttcctggcatgcgcctggcggtcctggcatacgcgtcgattcacatgcatatgccggttactatgttccgccgcattacgattcgatggtcggcaaagtcatttcatacggtgccacgcgcgagcaagccatcaaacgcatgcagattgcattgtcggaaatggtcgtcgaaggtatttcgaccaacattccgttgcatcgcgaactgatggtggatgcccgcttcatcgaaggcggcaccaacatccattatctcgagcaaaagctggcaaacaagcctgacctgccaaaagaaccaaaagcctag

SEQ ID NO: 9717 - protein, 456 aa, Herminiimonas arsenicoxydans
MFEKILIANRGEIALRIQRACREMGIKTVVVHSEADRDAKYVKLADESVCIGPAPSTLSYLNMPAIISAAEVTDAEAIHPGYGFLSENADFAERVEQSGFVFIGPRSESIRMMGDKVTAKQTMIKAGVPCVPGSDGALPDDPKEIIQTARKVGYPVIIKAAGGGGGRGMRVVHTEAALLNAVTMTKTEAGSAFGNPEVYMEKYLENPRHVEIQILADEHKNAIWLGERDCSMQRRHQKVLEEAPAPGIPRKTIERIGDRCAEACRKMGYRGAGTFEFLYENGEFYFIEMNTRVQVEHPVTEMITGIDIVQEQIRIAAGEKLRYRQRDIVLNGHAIECRINAEDPFKFTPSPGKIVSWHAPGGPGIRVDSHAYAGYYVPPHYDSMVGKVISYGATREQAIKRMQIALSEMVVEGISTNIPLHRELMVDARFIEGGTNIHYLEQKLANKPDLPKEPKA

SEQ ID NO: 9718 - DNA, 1368 bp, Burkholderia vietnamiensis G4
  CDS (1)..(1368): transl_table=11
atgtttgaaaaaatcctcattgccaaccgcggtgaaatcgcgctgcgcattcagcgcgcgtgccgcgaactcggcgtcaagacggtggtcgtctactcggaagccgacaaggaagccaagtacgtgcgcctcgcggacgaagccgtctgtatcggcccggccccgtcgaacctcagctacctgaacatgccggcgctgatcagcgccgcggaagtcaccgacgccgaagcgatccaccccggctacggcttcctgtcggaaaacgccgatttcgccgaacgcgtcgagcagtcgggcttcacgttcatcggcccgcgcccggacacgatccgcctgatgggcgacaaggtcaccgcgaagcagacgatgatcaagaccggcgtgccgtgcgtgccgggctcggaaggcgcgttgccggacgatccgaaggagatcgtgaagattgcgcgcgcaatcggctatccggtcatcatcaaggcggccggcggcggcggcggacgcggcatgcgcgtcgtgcacaccgaggccgcgctcgtgaacgcggtcaacatgacccgcgaggaggccggccgtgcgttcggcaacccgcaggtgtacatggagaagttcctcgagaacccgcgccacatcgagatccaggtgctgtcggatgcgcacaagaacgcgatttggctcggcgagcgcgattgctcgatgcagcgccgtcaccagaaggtgatcgaggaagcgccggcgccgggcattccgcgccgcctgatcgaccgcatcggcgaccgctgcgcggacgcttgcaagaagatgggctatctcggcgccggcacgttcgaattcctgtacgaaaacaacgagttctacttcatcgagatgaacacgcgcgtgcaggtcgagcatccggtatcggagctgatcaccggcgtcgacatcgtgcaggaacagatccgcatcgcggccggcgagaagatggcgctgcgccagcgcgacgtgcagttccgcggacatgcgatcgaatgccggatcaacgcggaagatccgttcaagttcacgccgtcgccgggccgcatcacgtcgtggcatacgccgggcgggccgggcgtgcgcgtcgactcgcatgcgtacaacggctatttcgtgccgccgaactacgactcgatgatcggcaagctgatcacctacggcgcgacgcgcgaccaggcgatccgccggatgcggatcgcgctgtcggaaatggtcgtcgaaggcatccagaccaacatcccgctgcaccgcgagttgatgatcgattcgaagttcgtcgaaggcggcaccagcatccactacctcgaacaccggctcgcgcagaagcagcaggtcgcaccggaagaagcgtaa

SEQ ID NO: 9719 - protein, 455 aa, Burkholderia vietnamiensis G4
MFEKILIANRGEIALRIQRACRELGVKTVVVYSEADKEAKYVRLADEAVCIGPAPSNLSYLNMPALISAAEVTDAEAIHPGYGFLSENADFAERVEQSGFTFIGPRPDTIRLMGDKVTAKQTMIKTGVPCVPGSEGALPDDPKEIVKIARAIGYPVIIKAAGGGGGRGMRVVHTEAALVNAVNMTREEAGRAFGNPQVYMEKFLENPRHIEIQVLSDAHKNAIWLGERDCSMQRRHQKVIEEAPAPGIPRRLIDRIGDRCADACKKMGYLGAGTFEFLYENNEFYFIEMNTRVQVEHPVSELITGVDIVQEQIRIAAGEKMALRQRDVQFRGHAIECRINAEDPFKFTPSPGRITSWHTPGGPGVRVDSHAYNGYFVPPNYDSMIGKLITYGATRDQAIRRMRIALSEMVVEGIQTNIPLHRELMIDSKFVEGGTSIHYLEHRLAQKQQVAPEEA

SEQ ID NO: 9720 - DNA, 1350 bp, Bradyrhizobium sp. ORS278
  CDS (1)..(1350): transl_table=11
atgttcgacaagatcctgatcgccaaccgcggcgaaatcgccctccgcatcctccgagcctgcaaggagctcggcatctccacggtcgcggtgcattcgaccgcggacgccgatgccatgcatgtgcgccttgccgatgagagcgtctgcatcggtccgccgccgtcgaaggacagctatctcaatatccccgcgctgctcgcggcgtgcgagatcaccggcgccgacgcggtgcatccgggctacggcttcctgtccgagaacgcgcgcttcgcagagatcctctccgatcacaatctgcatttcatcgggccgaaggcggagcacatccgcctgatgggcgacaagatcgaggccaagaagaccgccaagcgtctgggcatcccggtcgtgcccggctccgacggcgcggtgacgccggaccaggatgcgatggcgatcgccaaggcgatcggcttcccggtgctggtgaaggcggccgccggcggcggcggccgcggcatgaaggtcgcgcacaccgaggcggacctgcagctggcgctgaccaccgcggccaacgaggccaagtcggcgttcggcgatgcgtcggtctatctggagaaatatctgcagaagccgcgacacatcgagatccaggtgctcggcgacggccgcggcggcgcgatccatctcggcgagcgcgactgctcgctgcagcgccgccaccagaaggtctgggaggaaggcccctcgccggtgctcgatgtcgcctcgcgggccaagatcggcaacactgtcgccaaggcgatgcaggagctgaaatatatcggcgtcggcacgatcgaattcctctacgaggacggcgagttctatttcatcgaaatgaacacccgcatccaggtcgagcatcccgtcaccgagatgatcaccggcatcgacctcgtgctggagcagatccgcatcgccgccggcggcgacctgccgatgacccaggaccaggtgaccatcaacggccactcgatcgagtgccgcgtcaacgccgagaacccggtcagcttccggccctctcccggcaagatccagcaataccacccgcccggcggcctcggcgtccgcatcgactccgccgtgtatcagggctacgtgatcccgccttattacgactcgctggtcggcaagctgatcgtgcacggcaagagccgggtcgagtgcctgatgcggctgcgccgcgcgctggacgagatggtggtcgacggcatcgagaccacgctgccgctgttccgcgcgttggtgcgcgagcccgcgatcatcgacggcgactatcacatccactggctcgagcagtatctggccggccagaaggcggactga

SEQ ID NO: 9721 - protein, 449 aa, Bradyrhizobium sp. ORS278
MFDKILIANRGEIALRILRACKELGISTVAVHSTADADAMHVRLADESVCIGPPPSKDSYLNIPALLAACEITGADAVHPGYGFLSENARFAEILSDHNLHFIGPKAEHIRLMGDKIEAKKTAKRLGIPVVPGSDGAVTPDQDAMAIAKAIGFPVLVKAAAGGGGRGMKVAHTEADLQLALTTAANEAKSAFGDASVYLEKYLQKPRHIEIQVLGDGRGGAIHLGERDCSLQRRHQKVWEEGPSPVLDVASRAKIGNTVAKAMQELKYIGVGTIEFLYEDGEFYFIEMNTRIQVEHPVTEMITGIDLVLEQIRIAAGGDLPMTQDQVTINGHSIECRVNAENPVSFRPSPGKIQQYHPPGGLGVRIDSAVYQGYVIPPYYDSLVGKLIVHGKSRVECLMRLRRALDEMVVDGIETTLPLFRALVREPAIIDGDYHIHWLEQYLAGQKAD

SEQ ID NO: 9722 - DNA, 1362 bp, Candidatus Protochlamydia amoebophila UWE25
  CDS (1)..(1362): transl_table=11
atgcaaaaagttcttatcgctaacagaggcgagattgccgttcgaattattcgtgcttgtcacgatttaggtcttcaaactgtggctgtttattcgcaagcagatgctgaagccttacacgttcttcatgctgacgaagccatttgtattggagaagccccttcccataaatcttatcttaaagtgccaaatatcctttctgcttgtgaaattaccggagctgatgcgatccatccgggttacggttttttaagcgaaaatgcaaattttgcctctatttgtgaaagctgtggcttaaactttattggaccggctccccaatctattgcattgcttggtgataaagctaaagctaaagcaacagcaaaaaaagctggttgtcctgttatcccaggctcagatggagtcgtagtggatattaaagaagctttgaaagacgcaaaaaaattaggtttccctattttcattaaagctgttgcgggaggtggcgggaaaggaattcggatagcttacaacgaagaagagtttactaagctatttgcagctgcacgagctgaagcagaggtaagttttgggaatccagacgtctatttagaaaaaatgattatgaatcctcgacatattgaagtgcaagtgttaggggataaatttggtcattatattcatttaggagaaagagattgcactactcaacgacgcagacaaaaactcattgaagagtctccaagtccggttctcagtcaaaaaatgcgccaaaagattggtcaagcagctgtcaatgttgttaaagaagcaaattatttttctgcgggaacagtagaattccttttagacaaagatcaaaacttttattttatggaagtaaatacacgtattcaagttgagcatacggtcacagaagaattaacaggtattgatcttgtaatggaacagctcaaaattgctcgtggagaaaaattgattttagaacaaaaggatgtaaaattcactggtcatgtaattcaatttagaattaatgcagaaaatcctagccacaattttgctccctctcctggaaaattagaatattatcttcctcctggtggcccccatgttagagttgacagcgcttgttattcaggatattccattcctcctaactatgattcaatgattgctaaattaattgtgaagggtaaagatcgtacagaaactattgcaataggaaaaagagctctaagtgaatttcatatcggaggagttaattccacaataccttttcacctttatatgctagaagatccaaaatttttaaatgcagattttgatctgacttatatcgataacctaattgcagaaggtaatcgctttgaattagaatag

SEQ ID NO: 9723 - protein, 453 aa, Candidatus Protochlamydia amoebophila UWE25
MQKVLIANRGEIAVRIIRACHDLGLQTVAVYSQADAEALHVLHADEAICIGEAPSHKSYLKVPNILSACEITGADAIHPGYGFLSENANFASICESCGLNFIGPAPQSIALLGDKAKAKATAKKAGCPVIPGSDGVVVDIKEALKDAKKLGFPIFIKAVAGGGGKGIRIAYNEEEFTKLFAAARAEAEVSFGNPDVYLEKMIMNPRHIEVQVLGDKFGHYIHLGERDCTTQRRRQKLIEESPSPVLSQKMRQKIGQAAVNVVKEANYFSAGTVEFLLDKDQNFYFMEVNTRIQVEHTVTEELTGIDLVMEQLKIARGEKLILEQKDVKFTGHVIQFRINAENPSHNFAPSPGKLEYYLPPGGPHVRVDSACYSGYSIPPNYDSMIAKLIVKGKDRTETIAIGKRALSEFHIGGVNSTIPFHLYMLEDPKFLNADFDLTYIDNLIAEGNRFELE

SEQ ID NO: 9724 - DNA, 1365 bp, Listeria monocytogenes str. 4b F2365
  CDS (1)..(1365): transl_table=11
atgattaaaaaagtactggtagcgaaccgtggagaaatcgctgtccgtatcattcgcgctgcaaaagaacttggagtggagacagtggcgatttattcggaagcagataaagaagcgctacatattcagctggcggatgaagcttattgtgtaggtcccgcagcaacaaaagatagttatttaaatatgtccaacattattagtcttgcagttttaacgaactgtgatgctattcacccaggctatggtttcttagccgaaaatgcagatttcgcggagttatgcgaagactgtaatattacttttatcggaccaagtgcttccgctatttcgcaaatgggaacaaaagatgttgctcgcgaaacgatgcgtaaagcaggtgttccaatcgttcctggttcgcagggaatcgttaaggatgtagaagatggcaaaaaaatcgctaagaaaatcggttatccggttatcattaaagcaacagctggcggtggcggtaaaggtatccgtgtagcagaaaatgaagaaaaattaatttctggcattcaaactacccaacaagaagccgaagccgcatttggtgatcctggcgtttacttagaaaagtatattcaagatttccgccatgtagaaattcaagtgcttgctgataaccatggtaacgttattcatttaggagaacgtgattgtagtattcaacgtcgcttacaaaagctaattgaagaatcaccatcacctgccattgatgaaaaaactcgccaaaaaatgggaaaagctgctgttaaagctgccaaagccgtgaattattctggcgcaggaacgattgaattcattttcgatcaccatgaaaataatttttactttatggaaatgaatacgcgtatccaagtagaacacccggtaaccgagcttgttactggtgttgatttagtgaaacaacaatttctagttgcttctggggaagaactacaaattaaacaagcagatgtgaaattaacaggttgggcgatggaatgtcgaattaacgctgaaaatccagagaaaaactttatgccagctccaggtgaaattaaattttatcttcctccaggtggcttaggtgttcgaattgactcagcagcatatccaaactacaaaatcccaccatactatgattcgatgattgccaaagtaatctgttatgcggaaacacgggaagaagtgattcaaaaaatgaaacgtgcgttgtccgaatttgccattgatggcattccttcaacgattccgttccatttacgtgtattagataatgatgtgtttttatcaggcgacttcaataccaaattcttggagcaaaacgatgtaatgaatctttctaaggagggctaa

SEQ ID NO: 9725 - protein, 454 aa, Listeria monocytogenes str. 4b F2365
MIKKVLVANRGEIAVRIIRAAKELGVETVAIYSEADKEALHIQLADEAYCVGPAATKDSYLNMSNIISLAVLTNCDAIHPGYGFLAENADFAELCEDCNITFIGPSASAISQMGTKDVARETMRKAGVPIVPGSQGIVKDVEDGKKIAKKIGYPVIIKATAGGGGKGIRVAENEEKLISGIQTTQQEAEAAFGDPGVYLEKYIQDFRHVEIQVLADNHGNVIHLGERDCSIQRRLQKLIEESPSPAIDEKTRQKMGKAAVKAAKAVNYSGAGTIEFIFDHHENNFYFMEMNTRIQVEHPVTELVTGVDLVKQQFLVASGEELQIKQADVKLTGWAMECRINAENPEKNFMPAPGEIKFYLPPGGLGVRIDSAAYPNYKIPPYYDSMIAKVICYAETREEVIQKMKRALSEFAIDGIPSTIPFHLRVLDNDVFLSGDFNTKFLEQNDVMNLSKEG

SEQ ID NO: 9726 - DNA, 1359 bp, Bartonella henselae str. Houston-1
  CDS (1)..(1359): transl_table=11
atgattcgaaaaatcctcattgctaatcggggagaaattgctcttcgcgttttgcgagcctgcaaagaacttggaataaaaaccgtagccgttcactcaactgctgacgctgatgcaatgcacgttcgtcttgctgacgaaagtgtctgtattggacctcccccagttcgcgattcttatttaagtattcaacaaattattgctgcctgtgagatcacaggtgctgatgcggttcatccgggctatggttttctttctgagaatgcaaaatttgcagatgttctagaagcccataagattacattcattggcccaacggctgcgcatattcgcatcatgggtgataaaattgaagcaaaaaaaaccgctaaaaaacttggaattcctgtagtccctggttcagatggggcaattactgaagaagcagaggctctgcgtattgcccatgaaattggttatcccgttattattaaagcttctgccggcggtggcggacgcggtatgaaagtggttcgttctgaacaagagtttgctatagctcttgaaacaacacgttcagaagcagcagcagcttttggtgatgatgcagtttatatcgaaaaatatttagaaaagccacgtcatattgaaattcaagttataggtgatggagctgggaatgctattcacttaggggaacgcgattgttcacttcaacggcgtcatcaaaaaatatgggaagaagcaacttcacctgcacttaatgaaattgaacggaaaaaaattggcgatattgtcgcaaatgcttgtgcacaactaggatatcgtggagcgggtactattgaatttctttatgaaaatggcaaattctattttattgaaatgaatacgcgtttacaagttgaacaccctgtaactgaagcgattacgggcatagatttagtccatgagcaaattcatattgcatcaggttgtaggctttcagttgtacaagaggatatctgcttctctggtcatgctattgaatgtcgtattaatgcggaagatcctattaactttacaccatcaccgggaactattacacattttcatacacctggaggtttaggaatacgtgtcgattcaggtgcttattcaggttactgtattcctccttattacgatagtatgattggaaagcttattgttcatggacgtacccgtttagaatgcatgatgcgtttacggcgtgctttagatgagtttgtagttgatgggataaaaactacattacctctctttcgcgatctcattaacaatcaagatattgcagatggtaattataatattcattggctagaaaaatatctttctagccaatcaacttcttcagactcgtga

SEQ ID NO: 9727 - protein, 452 aa, Bartonella henselae str. Houston-1
MIRKILIANRGEIALRVLRACKELGIKTVAVHSTADADAMHVRLADESVCIGPPPVRDSYLSIQQIIAACEITGADAVHPGYGFLSENAKFADVLEAHKITFIGPTAAHIRIMGDKIEAKKTAKKLGIPVVPGSDGAITEEAEALRIAHEIGYPVIIKASAGGGGRGMKVVRSEQEFAIALETTRSEAAAAFGDDAVYIEKYLEKPRHIEIQVIGDGAGNAIHLGERDCSLQRRHQKIWEEATSPALNEIERKKIGDIVANACAQLGYRGAGTIEFLYENGKFYFIEMNTRLQVEHPVTEAITGIDLVHEQIHIASGCRLSVVQEDICFSGHAIECRINAEDPINFTPSPGTITHFHTPGGLGIRVDSGAYSGYCIPPYYDSMIGKLIVHGRTRLECMMRLRRALDEFVVDGIKTTLPLFRDLINNQDIADGNYNIHWLEKYLSSQSTSSDS

SEQ ID NO: 9728 - DNA, 1389 bp, Acinetobacter sp. ADP1
  CDS (1)..(1389): transl_table=11
atgttgcaaaaagttttaattgcaaaccgtggtgaaatcgcgttacgaattacccgggcttgcaaaacattaggaatcaagaccgttggtatctattcagatgctgacaaagacttaatgcatttacgttttgttgatgaagcggtatgtattggaccgggtgcaagtagtgatagctatttaaatatccccgcaattattactgcagcagaaatcacaggcgcagatgccatccatccaggttacggtttcctttctgaaaatgctgagtttgcagaaattgtcgaaacttctggttttattttcattggtccacgtccagaacatatccgcctcatgggtaataaagtatctgcgattattgccatgaaaaaagctggtgttccaacagttccaggttgtgatcacgctgtaaccattcacaacgcgcttgcagaagcaaaagagattggctttccattgattgtcaaagctgcttctggtggtggtggtcgtggtatgcgtattgttgaacgcgttgatacacttcttgaatctgttcaggcagcacaacgtgacgcagaaatgtggtttggtgatgatacggtctatatggaacgtttcttacaaaagccacgtcatattgaagttcaggtattgggcgatggaaatggtcatgctgtgcatctttacgaccgtgactgttctttgcaacgccgccaccaaaaagtactagaagaagctcctgcaccaaatcttccagagcaagcacgtgccgatattctagaagcatgtgtgaatgcgtgtaagttaatgcaataccgcggcgctggtacttttgagtttctatttgaagatggtgaattcttctttattgaaatgaatacacgtgttcaggtagagcatcctgttactgaaatggtgacaggaattgacattatcgagcaacaattgcgtattgctgctggtcttggtttagagcttcaacaagaagatattgaagttcgtggtcatgccatcgaatgccgtatcaatgctgaagatccaaccacatttttgccatcaccaggtaaaattgagacgttctatgcgccaggtggagcgggtatccgtttagattcgcatatctattcaggctatagcattccaccttactatgattcaatgattgcaaaactcatttcacatggtaaagatcgtgaaacgtcaatggcacgtatgcgtcaagcactggatgaaactattctcactggtgttaaaaccaatattccattacataaagatctgatcttacaagataaaaacttcttaaaagaagcgatggacatccattatcttgaaaagcatcttttaaaacaattggaagctgaaaaagcagctccagcagctgaaaccacagaaaaagcctaa

SEQ ID NO: 9729 - protein, 462 aa, Acinetobacter sp. ADP1
MLQKVLIANRGEIALRITRACKTLGIKTVGIYSDADKDLMHLRFVDEAVCIGPGASSDSYLNIPAIITAAEITGADAIHPGYGFLSENAEFAEIVETSGFIFIGPRPEHIRLMGNKVSAIIAMKKAGVPTVPGCDHAVTIHNALAEAKEIGFPLIVKAASGGGGRGMRIVERVDTLLESVQAAQRDAEMWFGDDTVYMERFLQKPRHIEVQVLGDGNGHAVHLYDRDCSLQRRHQKVLEEAPAPNLPEQARADILEACVNACKLMQYRGAGTFEFLFEDGEFFFIEMNTRVQVEHPVTEMVTGIDIIEQQLRIAAGLGLELQQEDIEVRGHAIECRINAEDPTTFLPSPGKIETFYAPGGAGIRLDSHIYSGYSIPPYYDSMIAKLISHGKDRETSMARMRQALDETILTGVKTNIPLHKDLILQDKNFLKEAMDIHYLEKHLLKQLEAEKAAPAAETTEKA

SEQ ID NO: 9730 - DNA, 1344 bp, Erwinia carotovora subsp. atroseptica SCRI1043
  CDS (1)..(1344): transl_table=11
atgctagataaaatcgttatcgctaaccgcggagaaatcgcgctgcgtattttgcgtgcctgtaaagaactgggcatcaaaaccgtcgccgttcactccagtgcggatcgcgatttgaaacacgtattgctggcggacgaaaccgtgtgtattggcccggcgccgtcaacaaaaagctatctgaatatcccagcgattatttccgcagcggaaatcacgggtgctgtagctattcaccctggctacggtttcctgtccgaaaacgcagattttgccgaacaagttgaacgttccggctttatcttcatcggcccacgtgcagataccattcgcctgatgggcgataaagtctctgcgatcagcgcgatgaaaaaagcgggtgtgccgtgcgtaccgggttctgatggcccattagacggcgacatggacaaaaaccgcgcctttggcaaacgtatcggctatccggtcatcatcaaagcctctggcggcggcggtggtcgtggtatgcgcgtggtacgtagcgacaaagagctggaacaatccatcaacatgacccgtgcggaagccaaagcggctttcaacaacgacatggtctacatggaaaaatacctggaaaatccgcgccacgtggaaattcaggttatggctgacggtcagggtaacgccgtctatctggccgagcgcgactgctctatgcagcgtcgccaccagaaagtggtggaagaagcgccagcacccggcattaccgacgaactgcgtcgcaatatcggtgagcgctgcgccaaagcctgtatcgatatcaactatcgcggtgcgggtacgttcgaattcctgtacgaaaacggtgagttctacttcattgaaatgaacacccgtattcaggtggagcatccggtaaccgagatgattaccggcgtggatctgattaaagagcagttacgcattgctgctggtcagccgctgtccatcaagcagaaagacgtcaaggtgcgcggccatgcggtggaatgccgtatcaacgcggaagatccgaattcgttcctgccaagcccgggtaaaatcacgcgtttccacgcgccgggcggctttggtgtccgttgggaatcgcatatttacgccggttataccgtaccgccgtattacgattccatgatcggcaagctgatcacctacggcgaaacccgcgaaatcgcgatttcacgtatgaagaacgcgctggctgaactgatcatcgatggcatcaaaaccaacatcgaacttcagatgaagatcatgagcgacgaaaacttccagagaggtggcactaacatccactatctggagaagaaactcggcttgcagtaa

SEQ ID NO: 9731 - protein, 447 aa, Erwinia carotovora subsp. atroseptica SCRI1043
MLDKIVIANRGEIALRILRACKELGIKTVAVHSSADRDLKHVLLADETVCIGPAPSTKSYLNIPAIISAAEITGAVAIHPGYGFLSENADFAEQVERSGFIFIGPRADTIRLMGDKVSAISAMKKAGVPCVPGSDGPLDGDMDKNRAFGKRIGYPVIIKASGGGGGRGMRVVRSDKELEQSINMTRAEAKAAFNNDMVYMEKYLENPRHVEIQVMADGQGNAVYLAERDCSMQRRHQKVVEEAPAPGITDELRRNIGERCAKACIDINYRGAGTFEFLYENGEFYFIEMNTRIQVEHPVTEMITGVDLIKEQLRIAAGQPLSIKQKDVKVRGHAVECRINAEDPNSFLPSPGKITRFHAPGGFGVRWESHIYAGYTVPPYYDSMIGKLITYGETREIAISRMKNALAELIIDGIKTNIELQMKIMSDENFQRGGTNIHYLEKKLGLQ

SEQ ID NO: 9732 - DNA, 1350 bp, Symbiobacterium thermophilum IAM 14863
  CDS (1)..(1350): transl_table=11
atgttcaagaaggttctgatcgcgaaccggggcgagatcgccatccggatcatccgggcctgccgggagctggggatcaagacggtggccgtgttctccgaggccgaccgggaggcgctgcacgtgcgcatggccgacgaggcccactacatcgggcccgcgccctccaaccagtcgtacctctcggtgccggcgatcatcaccgcggcgacggccagcggggcggatgccatccatcccggctacggcttcctggcggagaacccgttcttcgccgaggcctgccgccagtggaacatcgccttcatcgggccccaccccgaggcgatccgggcgatggggatgaaggacgcctccaaggccctcatgaagaaggccggggtgccaaccatccccggctcggacggtgtggtggagagcgaggccgaggccctcagggtcgcggaggagatcggctacccggtgatggtgaaggcgacggccggcggcggcggccggggcatccgcatcgccaacagccccgatgagctggtgcaggccctgcagaaggccgccagcgaggccggggcggcctttggcaacgccgccgtgttcgtggagaagtacatccaggtggggcggcacatcgaggtgcaggtgctgggcgaccagcacggcaacatcatccacctgggggagcgggagtgctcgatccagcggcgccggcagaagatgctggaggaggcgccggctccgttccttcccgaggagacccggcagcggattcgggaggccggcgtgcgggccgcccgggcggtgggctacgacaacgccggcacggtggagatgatctacgacgagatgaccggggagttctacttcctggagatgaacacccggattcaggtggagcacccggtgaccgaggcggtgacgggcatcgacctggtcaaggcccagatccgcgtcgcggccggcgagcccctgccgtggaagcaggaggacatcgtgattcgcggccacgccatcgagtgccgggtcaacgccgaggatcccgacaacaagctgtacccctcgacggggacggtcacggccctggagatccccggcggcccctggacccgctgggacggcatgctctacccaggctaccagatgaagccgttctacgactcgctggtgggcaagatcatcgtctggggcgaggacaggagcgacgccatcgccaagatgcagcgggcgctggccgagttccgggtggagggcatcaagaccacggtgccggtccaccagcgcatcctggcgtcgtccgagttccgggagggccggtactccgtcgagtggctggagggtttcctgggcataaagtag

SEQ ID NO: 9733 - protein, 449 aa, Symbiobacterium thermophilum IAM 14863
MFKKVLIANRGEIAIRIIRACRELGIKTVAVFSEADREALHVRMADEAHYIGPAPSNQSYLSVPAIITAATASGADAIHPGYGFLAENPFFAEACRQWNIAFIGPHPEAIRAMGMKDASKALMKKAGVPTIPGSDGVVESEAEALRVAEEIGYPVMVKATAGGGGRGIRIANSPDELVQALQKAASEAGAAFGNAAVFVEKYIQVGRHIEVQVLGDQHGNIIHLGERECSIQRRRQKMLEEAPAPFLPEETRQRIREAGVRAARAVGYDNAGTVEMIYDEMTGEFYFLEMNTRIQVEHPVTEAVTGIDLVKAQIRVAAGEPLPWKQEDIVIRGHAIECRVNAEDPDNKLYPSTGTVTALEIPGGPWTRWDGMLYPGYQMKPFYDSLVGKIIVWGEDRSDAIAKMQRALAEFRVEGIKTTVPVHQRILASSEFREGRYSVEWLEGFLGIK

SEQ ID NO: 9734 - DNA, 1404 bp, Mannheimia succiniciproducens MBEL55E
  CDS (1)..(1404): transl_table=11
gtgggtttatcccacctttttacatttgttgatcaaatttcgaattggaatactcttatgttagaaaaagtggttattgctaaccgtggtgaaattgcattgcgtattttacgtgcctgtaaagaattgggcattaaaaccgttgcggttcactctacggcagatcgtgacttaaaacacgttttattagcggatgaaacggtttgtatcggtcctgcgccttcggtaaaaagttatttgaacgtgccggcgattattgcggctgcggaagtaacgggtgccgacgcgattcatccgggctatggttttttatccgaaaatgcggattttgccgaacaggttgaggtttccggttttacctttatcggtccgactgcggatgttattcgtttaatgggtgataaagtttcagcgattaatgccatgaaaaaagcgggcgtgccgtgcgtaccgggttccgacggccctttaggcacggatatggtgaaaaataagcaaatcgccaatcgtatcggttatccggttattattaaagcctcgggcggcggcggtggtcgcggtatgcgagtggtgcgtaacgacgagtcattggaagaatctattgccatgaccaaagcggaagcgaaagcggcatttaataacgacatggtttacatggaaaaatacctggaaaacccgcgccacgtagaaatccaggttattgctgatacccacggaaatgctgtgtatctggcggaacgcgattgctcaatgcagcgccgtcaccaaaaagtattggaagaagcgccggcgccgggtattacggaagaaatccgtcgcgatatcggacagcgttgcgccaatgcctgcattgaaatcggctatcgcggcgcaggtacgttcgagtttttatatgaagacggcaaattctatttcattgaaatgaatacccgtgttcaggttgaacatccggtaacggaaatgattaccggcgtcgatattgtaaaagaacaattacgcgttgcttcaggcttgccgctttcggtgaaacaggaagacattaaagttcacggtcatgccattgaatgccgtatcaatgcggaagatcctaaaaccttcctgccgtcgcctggcaaaatcgcgcatttgcattcgccgggcggtttaggcgtgcgttgggattctcacgtttatgccggttatacagtgcctccgcattatgattccatgattgcgaagttaattgtgcatgcggatacccgtgagggagcgattcgtcgcatgcaaaacgcattggccgaaacgattatcgacggtattaaaaccaatattccgttgcaaaatctgattttggaagatgaaaatttccaaaaaggcggtaccaatattcattacctggaaaaaaaattaggtatgggtgaatag

SEQ ID NO: 9735 - protein, 467 aa, Mannheimia succiniciproducens MBEL55E
MGLSHLFTFVDQISNWNTLMLEKVVIANRGEIALRILRACKELGIKTVAVHSTADRDLKHVLLADETVCIGPAPSVKSYLNVPAIIAAAEVTGADAIHPGYGFLSENADFAEQVEVSGFTFIGPTADVIRLMGDKVSAINAMKKAGVPCVPGSDGPLGTDMVKNKQIANRIGYPVIIKASGGGGGRGMRVVRNDESLEESIAMTKAEAKAAFNNDMVYMEKYLENPRHVEIQVIADTHGNAVYLAERDCSMQRRHQKVLEEAPAPGITEEIRRDIGQRCANACIEIGYRGAGTFEFLYEDGKFYFIEMNTRVQVEHPVTEMITGVDIVKEQLRVASGLPLSVKQEDIKVHGHAIECRINAEDPKTFLPSPGKIAHLHSPGGLGVRWDSHVYAGYTVPPHYDSMIAKLIVHADTREGAIRRMQNALAETIIDGIKTNIPLQNLILEDENFQKGGTNIHYLEKKLGMGE

SEQ ID NO: 9736 - DNA, 1353 bp, Bacillus licheniformis ATCC 14580
  CDS (1)..(1353): transl_table=11
atgatcaaaaagctattaattgcgaacaggggagaaattgctgtcaggattatcagagcttgtaaagaactggggattgaaacggtagccgtcttttccgaggccgacagagaggcgctccatgttcagatggctgatgaagcattttgcatcggacctaagctttcaaaagacagctacttgaatataacgaacatcgtcagcgtcgccaaaatgaccggtgctgatgcgattcaccccggctacggcttcctggcagaaaacgccgattttgccgagctttgcgaagaggtaaatgtaacctttgtcgggccgacagcagacgcgatttccaagatggggacaaaggatgttgcaagggaaacaatgcagcaggccggtgttccgatcgtaccgggctccaaaggaattattgaagatattgaagatgcggtttcattggcccgcgatatagggtatcctgtcattataaaggcaactgccgggggcggcggaaaaggaatcagggtcgcccggacggaagaagagctgatcaacggcattaaaatcactcagcaggaagctgccaccgctttcggcaacccgggtgtgtacattgaaaaatacattgaagatttcagacacgtcgaaatccaagtgcttgcagacacacacggaaacacgattcatttgggggaacgcgactgctcaatccaaagaaggctccaaaagctgcttgaagaaaccccttcacctgctctggatgaaggaatcagggagcagatggggcaggccgctgtcaaagcggctgaagccgtgaagtacacgggagcgggaacggtagaatttatttacgattaccgcgagcagaagttctactttatggaaatgaacacgcgcattcaggttgagcatccggtgacagagatggtgacgggcgttgatttgattaaagagcagatcagagtggcgtcaggcgaaaaattaaccctcacccaggatgaagtcacctttaacggatgggcaatcgaatgccggattaatgcggaaaaccctgagaaaaacttcatgccttctccgggaaaaatcgagatgtatctgcctccgggagggctcggcgtcagagtggactccgcggcttatccgggatactcgattcccccttattacgacagcatgattgccaaagtcatcacttacggaaagacgagggaagaagctgtttcaaggatgaaaagagcgctgagcgaattcgtcatcgaaggcgttcatacgacgataccgttccatctgaagctgcttgagcacgaaacattcgtaagcggagaatttaatacgaagtttttagaaatatatgatgtaatggggtcgtaa

SEQ ID NO: 9737 - protein, 450 aa, Bacillus licheniformis ATCC 14580
MIKKLLIANRGEIAVRIIRACKELGIETVAVFSEADREALHVQMADEAFCIGPKLSKDSYLNITNIVSVAKMTGADAIHPGYGFLAENADFAELCEEVNVTFVGPTADAISKMGTKDVARETMQQAGVPIVPGSKGIIEDIEDAVSLARDIGYPVIIKATAGGGGKGIRVARTEEELINGIKITQQEAATAFGNPGVYIEKYIEDFRHVEIQVLADTHGNTIHLGERDCSIQRRLQKLLEETPSPALDEGIREQMGQAAVKAAEAVKYTGAGTVEFIYDYREQKFYFMEMNTRIQVEHPVTEMVTGVDLIKEQIRVASGEKLTLTQDEVTFNGWAIECRINAENPEKNFMPSPGKIEMYLPPGGLGVRVDSAAYPGYSIPPYYDSMIAKVITYGKTREEAVSRMKRALSEFVIEGVHTTIPFHLKLLEHETFVSGEFNTKFLEIYDVMGS

SEQ ID NO: 9738 - DNA, 1350 bp, Legionella pneumophila subsp. pneumophila str. Philadelphia 1
  CDS (1)..(1350): transl_table=11
ctgtttatgctcagtaaaatagttattgctaatcgaggcgaaattgcgcttcgtatactgcgtgcttgtaaagaacttggcattcagactgttgctgttcactctgatgtagacaaagatttattgcacgttcgcctggctgatgaaaccgtatgcataggccctgcacctgcccaaaaaagctatctcaatattcctgcaattatatctgcggcagaaattactgatgcagtagcgatacatccaggttatggatttttatcagaaaatgccgattttgcagatattgttgagcaaagcggtttccgttttattggcccacgcggcgactccattcgtcttatgggggataaagtttccgcgattgctgccatgaaagcggcaggagtaccctgtgttcccggttcagacggtcctttaggagatgacgacaacaaaaatctcgagttggcgcgaaaaattggttatccaatcattatcaaagcagccggcggcggtggtggacgtggcatgagagtcgttcatagcgaatccaatttacttagtgctattgcgttaacccgaagcgaagcaaaagccgctttcaataacccgatagtttacatggaaaaatttctggaaaatcctcgccatgttgaattccaagtccttggtgatgggaaagggcatgctatacatttgggtgagcgtgattgctcgatgcaaagacgacatcaaaaagtcgtagaagaagctccggctccaggaatcactcctgaattaagagaagaaattggcgcgtcagtgattaaagcttgcaaagagttacaataccgaggtgctggaacctttgaatttttatttcaagatggttgtttttatttcatcgaaatgaatacgcgcattcaggttgagcatccagtaactgaaatgatcactgggattgatttaattaaggaacaaatcaaaattgccagcgatattcctctgacattaacccaaaaagatattaaattacgcggccatgctattgaatgccgaatcaatgcggaagatccaaggaattttatgccctctcctggaaccataaaattacttcatcaaccaggaggcccaggcattcgttttgattctcacatctacagcagctatgttgttccacctaattacgattccatgataggaaaattaataagttatggggcaacaagagcagaagcgattgccaggatgcgtaatgcccttgatgaaattatcattgatggcataaagacaaatattgaattacaccaacgtattcttcatgacaaatcttttatggaaggtggcacaaacattcactatctagaaaaaatgctcaaggattcatag

SEQ ID NO: 9739 - protein, 449 aa, Legionella pneumophila subsp. pneumophila str. Philadelphia 1
MFMLSKIVIANRGEIALRILRACKELGIQTVAVHSDVDKDLLHVRLADETVCIGPAPAQKSYLNIPAIISAAEITDAVAIHPGYGFLSENADFADIVEQSGFRFIGPRGDSIRLMGDKVSAIAAMKAAGVPCVPGSDGPLGDDDNKNLELARKIGYPIIIKAAGGGGGRGMRVVHSESNLLSAIALTRSEAKAAFNNPIVYMEKFLENPRHVEFQVLGDGKGHAIHLGERDCSMQRRHQKVVEEAPAPGITPELREEIGASVIKACKELQYRGAGTFEFLFQDGCFYFIEMNTRIQVEHPVTEMITGIDLIKEQIKIASDIPLTLTQKDIKLRGHAIECRINAEDPRNFMPSPGTIKLLHQPGGPGIRFDSHIYSSYVVPPNYDSMIGKLISYGATRAEAIARMRNALDEIIIDGIKTNIELHQRILHDKSFMEGGTNIHYLEKMLKDS

SEQ ID NO: 9740 - DNA, 1995 bp, Burkholderia mallei ATCC 23344
  CDS (1)..(1995): transl_table=11
atgttcgacaagatcctgatcgccaatcgcggcgaaatcgcctgccgggtcgccgcgacctgccgacgtctcggcatcgcgagcgtcgcggtctattcggatgccgacgcgcatgcgaaacatgtcgccgcgtgcgacgaggccgtgcacatcggcggcgcggcggccgccgacagctacctgcggatcgagcgcatcatcgacgccgcgcgcgcgaccggcgcgcaggcgatccacccgggctacggcttcctgtccgagaacgaagacttcgcgcgcgcgtgcgaggacgcgggcatcgtgttcgtcgggccgcccgtcgaggcgatcgccgcgatgggctcgaaggcggcggcgaaggcgctgatgcacgcggccgccgtgccgctcgtgcccggctattacggcgacgatcagtcccccgaactgctgcagcgcgaagcggaccgcatcggctacccggtgctgctgaaggcgagcgcgggcggcggcggcaaggggatgcgcgtcgtcgagcgcgcggccgatttcgcggcggcgctcgcgtcgtgccagcgcgaggcggcggcgagcttcggcaacgaccgcgtgctgatcgagaagtacctgcagcggccgcgccacgtcgaagtgcaggtgttcggcgacacgtacggcaacgcggtctatctgttcgaccgcgattgctcggtgcagcgccgccaccagaaagtgctcgaggaggcgcccgcgccgggcctcgcggacgcgctgcggcaggcgatgggcgaggcggccgtcgcggccgcgcgcgcggtcggctatgtcggcgcgggcaccgtcgaattcatcatgacgggcgacgcgttctacttcatggagatgaacacgcgcctgcaggtcgagcatccggtcacggaaatggtgacggggctcgatctcgtcgaatggcagttgcgcgtcgcggcgggcgagccgttgccgctgcggcagccggagctgcacgtgcgcgggcacgcgatcgaggcgcgcctgtatgcggagcatccggcgcgcggcttcctgccgtcgaccgggcgcctcaagcatttgcgctttccggcgggcgccgaattcgccgcgggcgcggccgtgcggatcgacagcggcgtgcgcgagggcgatgcgatcacgccgttctacgatccgatgattgcgaagctgatcgtgcacgccgacacgcgcgcgcaggcgctcgcgacgctcggccgcgcgctgcgcgaatgcgaggtggtcggcctgcacacgaacgcggaattcctgcagcggatcgtcgcgagccggccgttcgccgacgcggatctcgacaccggcctgatcgagcgccatcgcgacgcgctgttcgcgccgcggcccgcgcccgcggcggcgctcggcctcgcgtgcgcggcgctgttcgcgcgcgagcaggcgggcgcgggcggtgtggcgtcgccgtgggccgcgctgccgaactggcggctgaacgccggctatcggcgcacgatcgaatggcgcgcgctcgacgacgacacggcgctcgaagtccgctacctggagcacggcggcgcgcagtcgctcgaaatcggcggcgtcgcgcagccgttcgcgtggtcgcgcggtgcggggccgctcgatttcgacgtgacgctcggcggcgtgcgcgcgagcgggcgcgtgcacgtggacggcgacaccttccacgtgttctgccagggcgtcgcgcgcgcgttcgagtggcgcaacctgctcgcgcacgcggccgattcgacggaaggcgagggctggctcaccgcgccgatgccgggcaaggtgatcgcggtgctcgtcgagccggggcgcaaggtcgagcagggcgatccgttgatcgtgatggaggcgatgaagatggagcacacgatcggcgcgccggcggcgggcgtcgtcgccgaggtgctgtacgcggtcggcgatcaggtcgcggacggcgcgcaactgctcgtgatggggccggcctga

SEQ ID NO: 9741 - protein, 664 aa, Burkholderia mallei ATCC 23344
MFDKILIANRGEIACRVAATCRRLGIASVAVYSDADAHAKHVAACDEAVHIGGAAAADSYLRIERIIDAARATGAQAIHPGYGFLSENEDFARACEDAGIVFVGPPVEAIAAMGSKAAAKALMHAAAVPLVPGYYGDDQSPELLQREADRIGYPVLLKASAGGGGKGMRVVERAADFAAALASCQREAAASFGNDRVLIEKYLQRPRHVEVQVFGDTYGNAVYLFDRDCSVQRRHQKVLEEAPAPGLADALRQAMGEAAVAAARAVGYVGAGTVEFIMTGDAFYFMEMNTRLQVEHPVTEMVTGLDLVEWQLRVAAGEPLPLRQPELHVRGHAIEARLYAEHPARGFLPSTGRLKHLRFPAGAEFAAGAAVRIDSGVREGDAITPFYDPMIAKLIVHADTRAQALATLGRALRECEVVGLHTNAEFLQRIVASRPFADADLDTGLIERHRDALFAPRPAPAAALGLACAALFAREQAGAGGVASPWAALPNWRLNAGYRRTIEWRALDDDTALEVRYLEHGGAQSLEIGGVAQPFAWSRGAGPLDFDVTLGGVRASGRVHVDGDTFHVFCQGVARAFEWRNLLAHAADSTEGEGWLTAPMPGKVIAVLVEPGRKVEQGDPLIVMEAMKMEHTIGAPAAGVVAEVLYAVGDQVADGAQLLVMGPA

SEQ ID NO: 9742 - DNA, 1446 bp, Burkholderia pseudomallei K96243
  CDS (1)..(1446): transl_table=11
atgaacgacctcgattcgacccacgcttcgttttaccggccgtcccggatcggtacggtgctcgtcgccaatcgcggcgagatcgcggtgcgcgtgattcgcgccgcgcacgagctcgggatgcgcgcggtcgccgcggtcagcgacgcggaccgcgacagcctcgccgcgcggatggccgacgaagcggtgcacatcggcccgtcgcacgcggcgaagagctatctggatccggccgcgatgctcgccgccgcgcggcaatgcggcgccgacgcgattcatccgggctacggctttctgtcggagaacgcggacttcgccgcgcaggtcgaagccgccggcctgatcttcgtcggtccgcccgcgcgcgtgatcgcgacgatgggcgacaaggcccgcgcgcgcgaaaccgcgcggcgcgccggcgtgccgacggtgccgggcagcgaaggcgtcgtcgcgtcgctcgacggcgcgcgcgaggtggccgcgcgcatcggctacccggtgatgatcaaggcggccgcgggcggcggcgggcgcggtatccgcgtcgcgcacgacgccgcgcagctcgccgcgcagctaccgctcgcgcagcgcgaggcacaggccgcgttcggcgacggcggcgtctatctcgaacgcttcatcgcgcgcgcgcggcacatcgaagtgcagatcctgggcgacggcgagaacgttattcatctgttcgaacgcgaatgctcgctgcagcggcggcgccagaagattctcgaggaagcgccgtctccgtcgctcacgcccgcgctgcgcgatacgctgtgcgcatcggcgacgcgtctcgcgcggcaggtgagctatcgcggcgcgggcacgctcgagtatctgttcgacgacgcgcgcggcgagctctacttcatcgagatgaacacgcgcatccaggtcgagcatccggtgacggaggcggtcacgggcgtcgatctcgtgcgcgagatgttgcgcatcgcggacggcgagccgctgcgcttcgcgcagggcgacatcgcactgcgcggcgccgcgctcgaatgccggatcaacgcggaggacccgctgcaggatttccggcccaaccccggccgcatcgatgcgctcgtctggcccgcgggccccggcgttcgaatcgattcgctgctctatccgggctacacggtgccgccgttctacgattcgctgctcgcgaagctgatcgtgcacgacgaaagccggccggccgcgctcgcgcgcgcggcgcgcgcgctgcgcgagctgcgcatcgacggcgtgaagaccaccgcgccgctgcatcgcgcgctgctcgacgacgccgacgtgcgcgcgggccgctatcacacgaactatctggaggcctggatgcgcgactggctcgcacggctcgacgcccgcgcgagcgcgccgcgtggcctgggagaggcagcatga

SEQ ID NO: 9743 - protein, 481 aa, Burkholderia pseudomallei K96243
MNDLDSTHASFYRPSRIGTVLVANRGEIAVRVIRAAHELGMRAVAAVSDADRDSLAARMADEAVHIGPSHAAKSYLDPAAMLAAARQCGADAIHPGYGFLSENADFAAQVEAAGLIFVGPPARVIATMGDKARARETARRAGVPTVPGSEGVVASLDGAREVAARIGYPVMIKAAAGGGGRGIRVAHDAAQLAAQLPLAQREAQAAFGDGGVYLERFIARARHIEVQILGDGENVIHLFERECSLQRRRQKILEEAPSPSLTPALRDTLCASATRLARQVSYRGAGTLEYLFDDARGELYFIEMNTRIQVEHPVTEAVTGVDLVREMLRIADGEPLRFAQGDIALRGAALECRINAEDPLQDFRPNPGRIDALVWPAGPGVRIDSLLYPGYTVPPFYDSLLAKLIVHDESRPAALARAARALRELRIDGVKTTAPLHRALLDDADVRAGRYHTNYLEAWMRDWLARLDARASAPRGLGEAA

SEQ ID NO: 9744 - DNA, 1347 bp, Methylococcus capsulatus str. Bath
  CDS (1)..(1347): transl_table=11
atgctaggtaaagtcgtcatcgccaatcgcggtgaaatcgccctgcgcatcctccgggcctgccgcgagctcggcatcaaggccgtcgccgtgcattccgaggcggatcgcgatctcaagcacgtgcgcctggccgacgagtcggtctgcatcgggccggcgccatcgcgcgacagctatctgaatgttccggcgatcatcagtgccgccgaggtcaccgatgctctggccatccatcccggctatggctttttgtcggaaaacgccgatttcgctgaaaaggtgattcagagcggattcatcttcatcggcccgaggccggaaaccatccggatgatgggcgacaaggtcgcggccatcgaagcgatgaaaaaggccggaattcccactctgccgggctcggacggtccgctgggagacgacgaggaagagaatctggcaatcgccagacggatcggttttcccatcatcatcaaggccgccggcggcggcggcgggcgcggcatgcgggtcgtgcacagcgaggccagtcttgccgcttccatcgaactgacccggagcgaggccggtgccgcgttcgggaatgacatggtgtacatggagaagtttctggagaatccgcgtcacatcgagttccaggtgatcgcggattcacacggcaacgtggttcatctgggtgagcgtgattgctccacccagcgccgccaccagaaggtcgtggaagaagcgccggcacccggcatcacccaggcgcagcgggatgagatgggcatgcgttgcgtgcaggcatgcagggagatcggttatctcggcgccggtacgttcgaattcctctatcaggacggtcagttctatttcatcgaaatgaacacccgggtccaggtcgagcatcccgtgaccgagatggtcaccggcttcgacatcgtcaaggaacagctgcggatcgccgctggcgagccgctttcgatccgccaggccgaagtggaaatgcgcgggcatgccatcgaatgccggatcaatgcggaggatcccgtcaatttcatgccatcgccggggttgatcgagcagttccacatgccgggcgggccgggtatccgcgtcgagacccacatctataacggctaccgcgtgccgccgtattacgactcgatgatcggcaagctgatcgcccatggcgagacccgcgccggagcgatcgcccggatgcgtacggccttgaacgagatggtgatcggcggaatcaagtgcaacattccgctgctgctcgatatcgtcaacgacagcgctttcgaagcgggcgggcagaacattcattacctggagcagaagctgggactcaagcactag

SEQ ID NO: 9745 - protein, 448 aa, Methylococcus capsulatus str. Bath
MLGKVVIANRGEIALRILRACRELGIKAVAVHSEADRDLKHVRLADESVCIGPAPSRDSYLNVPAIISAAEVTDALAIHPGYGFLSENADFAEKVIQSGFIFIGPRPETIRMMGDKVAAIEAMKKAGIPTLPGSDGPLGDDEEENLAIARRIGFPIIIKAAGGGGGRGMRVVHSEASLAASIELTRSEAGAAFGNDMVYMEKFLENPRHIEFQVIADSHGNVVHLGERDCSTQRRHQKVVEEAPAPGITQAQRDEMGMRCVQACREIGYLGAGTFEFLYQDGQFYFIEMNTRVQVEHPVTEMVTGFDIVKEQLRIAAGEPLSIRQAEVEMRGHAIECRINAEDPVNFMPSPGLIEQFHMPGGPGIRVETHIYNGYRVPPYYDSMIGKLIAHGETRAGAIARMRTALNEMVIGGIKCNIPLLLDIVNDSAFEAGGQNIHYLEQKLGLKH

SEQ ID NO: 9746 - DNA, 1383 bp, Azoarcus sp. EbN1
  CDS (1)..(1383): transl_table=11
atgaccatccgccgcattctcatcgccaaccgcggcgagatcgcggtgcgcatcgtgcgcacctgccagcgtctcggaatcgtaaccgtcctcgccgcctccgaggccgatctcgattcgcaggccgcgcgcctggctgaccagacgatctgcatcggaccgccgaaatcatccgccagctacctcagtgtcgacgccgtcgttggcgccgcgcttgcggcaaaagtcgatgcgatccatcctggatacggtttcctgtccgaaaatcagcgcctcgcccaggcttgttccgctgtcgggattattttcatcggaccgaccgaagctcagctcgatgccgttggcgacaagctcaaggcgcgcagccacgccctggccgccgggctcccggtcgtgccgggtggcgaagtcgacagcgtcgaggacgcgcgtgccctagccgaaaaaacaggctggccgattctgatcaaggccgtcagcggcggcggcggccgcggcatgaagctggtgcatgaaccggaccaactcgccgcgacgatcgaactggcgatggccgaagcgcacgcctcattcggcgatccccgggtctatctggagcgctacgtcgcgtccggacgccatgtggaagtgcaggtgctgggagacggcgagaacgtgattcatctcggaacgcgggattgttcgattcaacgtcgctaccagaagctggtcgaggaagcgcctgccccgaacctgcgcgacggcctgcgggccgacatgcactgtgccgcgatcaccttcgcgaagcacctcgaataccgcggactcggcaccgtcgagttgctggtcgactgcgagcgggacacgttctacttcctggaaatgaacgcgcgcatccaggtcgaacacccggtcaccgaggcgatctgcgggctcgacttggtcgccgaacaaatcgcggtcgccgaaggaaaaccgctgcgcttgacgcaggacgacgtgcacctcaccggtcacgccatcgagtgccgcatcaacgccgaagactggacacaggatttccgccccagccccggcacggtgagccgcgcagtgtttccgctgggcgaaggcgtgcgtgtggatacgcacatccagaccggcgcccgcgtgcccccattctacgattccctccttgccaagctgatcgtccacggtaccgaccgcacccaagccctcgagcgcctgcgccatgcgctggcgcagtgcgtaatttccggcgtgagcaccaacctgccgatgcacgtcgaactgatgcagcaggaggagttcgcccgcggcggcgtgaacactgcgtatttcccgtggttcctggaaaaccgggcgaccgcattgcgcgaccagcgtgtcgcgaaaggaaactga

SEQ ID NO: 9747 - protein, 460 aa, Azoarcus sp. EbN1
MTIRRILIANRGEIAVRIVRTCQRLGIVTVLAASEADLDSQAARLADQTICIGPPKSSASYLSVDAVVGAALAAKVDAIHPGYGFLSENQRLAQACSAVGIIFIGPTEAQLDAVGDKLKARSHALAAGLPVVPGGEVDSVEDARALAEKTGWPILIKAVSGGGGRGMKLVHEPDQLAATIELAMAEAHASFGDPRVYLERYVASGRHVEVQVLGDGENVIHLGTRDCSIQRRYQKLVEEAPAPNLRDGLRADMHCAAITFAKHLEYRGLGTVELLVDCERDTFYFLEMNARIQVEHPVTEAICGLDLVAEQIAVAEGKPLRLTQDDVHLTGHAIECRINAEDWTQDFRPSPGTVSRAVFPLGEGVRVDTHIQTGARVPPFYDSLLAKLIVHGTDRTQALERLRHALAQCVISGVSTNLPMHVELMQQEEFARGGVNTAYFPWFLENRATALRDQRVAKGN

SEQ ID NO: 9748 - DNA, 1365 bp, Azoarcus sp. EbN1
  CDS (1)..(1365): transl_table=11
atgtttgaaaagatcctgattgccaaccgcggcgaaatcgcgctgcgcgtgctgcgcgcgtgccgcgagctgggtatccgcaccgttgcggtgcactcggtcgcggacaccgaagcgaagtacgtcaagctcgccgacgagtcggtgtgcatcggtccggcgcaatcggcgctgagctacctgaacgtccccgcgatcatttcggcagccgaagtcaccgacgccgaagccatccatccgggctacggtttcctgtccgagaacgccgacttcgccgaacgcgtcgagcagtccggcttcgtcttcatcggcccgcgctccgacacgatccggctgatgggcgacaaggtcagcgccaaggatgcgatgaaggccgccggagtgccgtgcgtgccgggttcggaaggcgcgctgcccgaggaaccgaaggagatcgtcaagatcgcccgcaccgtcggctaccctgtcatcatcaaggcggccggcggcggcggcggtcgcgggatgcgggtcgtccacaccgaggcggcgctgctcaacgcggtcgcgacgacccgtgccgaagccgaggcggcgttcggcaacccgatcgtctatatggaaaaattcctcgagaacccgcgtcacatcgagatccaggtgctcgccgacgaacatggcaacgcggtctatctcggcgaacgcgactgctcgatgcagcgccgccaccagaaagtcatcgaggaagctcctgcgccgggcatcgatcgcaaggccatcgcgaaagtcggcgagcgctgcgccgaagcctgccgcacgatcggttaccgcggcgcgggcacgttcgagttcctctacgagaacgacgagttctacttcatcgagatgaacacgcgcgtgcaggtcgagcatcccgtcaccgagatgatcaccggcatcgacatcgtgcaggcgcagatccgcatcgcgaccggcgaaaagctgtggttccgccagcgtcacgtcgaattccacggccacgcgatcgagtgtcgcatcaacgccgaggatccgttcaaattcacgccctgcccgggaaagatcacgaactggcacacgccgggcggacctggcattcgcgtcgattcgcacgtctataacggctacacgatcccgtcgcattacgattcgatgatcggcaagctgatcgcgttcggcgacacgcgcgaacaggcgatccgacggatgcggatcgcgctgtcggaaatggcggtcgaaggcatcaagacgaacgtgccgctgcaccaggagctgatgctcgatgcacgtttcgtcgagggcggcacgagcatccattacctggagcacaagctcgccgaacgcaacgaagtcaagaatcttgcctga

SEQ ID NO: 9749 - protein, 454 aa, Azoarcus sp. EbN1
MFEKILIANRGEIALRVLRACRELGIRTVAVHSVADTEAKYVKLADESVCIGPAQSALSYLNVPAIISAAEVTDAEAIHPGYGFLSENADFAERVEQSGFVFIGPRSDTIRLMGDKVSAKDAMKAAGVPCVPGSEGALPEEPKEIVKIARTVGYPVIIKAAGGGGGRGMRVVHTEAALLNAVATTRAEAEAAFGNPIVYMEKFLENPRHIEIQVLADEHGNAVYLGERDCSMQRRHQKVIEEAPAPGIDRKAIAKVGERCAEACRTIGYRGAGTFEFLYENDEFYFIEMNTRVQVEHPVTEMITGIDIVQAQIRIATGEKLWFRQRHVEFHGHAIECRINAEDPFKFTPCPGKITNWHTPGGPGIRVDSHVYNGYTIPSHYDSMIGKLIAFGDTREQAIRRMRIALSEMAVEGIKTNVPLHQELMLDARFVEGGTSIHYLEHKLAERNEVKNLA

SEQ ID NO: 9750 - DNA, 1983 bp, Silicibacter pomeroyi DSS-3
  CDS (1)..(1983): transl_table=11
atgatgcgatttgacactctgctgatcgccaaccggggcgaaatcgcggtgcggatcatccgcaccgcccgcgagatggggctgcgcactgtggcggtctacaccaccgccgatgccggtgcgccgcatgtggcgctggccgatcatgccgtctggatcggcgaaggcccggtgggcgacagctatctgaatgccgaccgtatccttgatgccgcccggcaaagtggcgccggggccatccatcccggctatggtttcctgtctgaaaacgccgggtttgcccgcgccgtggcggcggcggggctggtctttgtcgggccggacgcggcggcgatcgaggcgatgggcaacaaggccgaggccaagcggttgatgctggccgccggggttccttgcgtgccgggctatcagggcgccgatcaatccgatgccgcgctgacgcgcgaggccgaacagatcggctatccgctgatggtcaaggctgccgccgggggcggcgggcgcggtatgcggctggtagaggggccgggggccctgagcgaggcgctggcccgcgcccgggccgaggcgctgggcgctttcggctcggacgagttgatcctggaacgcgcggtcgtcgagccgcgtcatgtggagtttcaggtctttggcgatgcccatggcgcggtgatccatctgggcgagcgggactgctcggtccagcgccggcaccagaaggtgatcgaagaggcgccctgtccggtgatgacacccgagttgcgcgatgcgatgggcgccgcagccgtggccgccgcccgcgcggtggactatcgcggcgccggcacggtcgagtttctgctggacgcgtcggggggcttctatttcctcgagatgaacacccggcttcaggtcgaacatccggtgaccgagatggtcaccggccttgatctggtggcgctgcagttgcaggtggcgcagggcgacccgctgccgctgacgcaggacgatctgcgtatcgacggccatgcgatcgaggtccggctttatgccgaggatccggcggcgggcttcctgcccgccatcgggccggttctccgctggcgcccggctgccggggcgggcctgcgtgtcgacgcgggcatcgcgcagggtcagcagatcgcgccccattacgacccgatgctggccaagatcatcgcccatggtcccagccggacggtggctctggcccgccttgcgcgcgcggtggccgatacggtgctgctgggcaccgcgaccaacagcgcctttctggccgatctgctggcactgcccgagtttgccgagggccaggcgaccacgggcctgttggcgcgcagctatcccgagggctatggcgcaggcgcgcccgatccgcgcgcggtggcgctgatggtggcggtactgatgcagcatgaccgcgatacggcgctggcggctgccgggccgatcccgcccgagcttctgggctggtccagcgctccggttctcccgcgcagcctgcgggtcgagaccggcggacaggtctttgactgcaccgcgggcgccgttccgggcggctggcggatcggcgttgcggatgcgcagttcgaaatcgcgctggtccaccgcgaagatgggctgcgggcgcggctgggtggtgaaacccatgacctgctggcccatgtgtcaggtgacacggtgcacatggcatctggcgcgcaacgattgagcctgcgccgtcagcgtcccggcgcccccgatgccgaggcgctgggcggtggccgcgtcaccgcgccgatgcccggactggtacaggctgtgtcggtgtccgaaggggccgaagtcgccaagggccaaacgcttgcagtgctggaggcgatgaagatgcagcaccagatcaccgccccggtcgcgggccgggtggcccggcaacatgtggcgccgggtgcgcaactggcagctggcgatgtgatgttcgagatcgaagaggaagagagcgcatga

SEQ ID NO: 9751 - protein, 660 aa, Silicibacter pomeroyi DSS-3
MMRFDTLLIANRGEIAVRIIRTAREMGLRTVAVYTTADAGAPHVALADHAVWIGEGPVGDSYLNADRILDAARQSGAGAIHPGYGFLSENAGFARAVAAAGLVFVGPDAAAIEAMGNKAEAKRLMLAAGVPCVPGYQGADQSDAALTREAEQIGYPLMVKAAAGGGGRGMRLVEGPGALSEALARARAEALGAFGSDELILERAVVEPRHVEFQVFGDAHGAVIHLGERDCSVQRRHQKVIEEAPCPVMTPELRDAMGAAAVAAARAVDYRGAGTVEFLLDASGGFYFLEMNTRLQVEHPVTEMVTGLDLVALQLQVAQGDPLPLTQDDLRIDGHAIEVRLYAEDPAAGFLPAIGPVLRWRPAAGAGLRVDAGIAQGQQIAPHYDPMLAKIIAHGPSRTVALARLARAVADTVLLGTATNSAFLADLLALPEFAEGQATTGLLARSYPEGYGAGAPDPRAVALMVAVLMQHDRDTALAAAGPIPPELLGWSSAPVLPRSLRVETGGQVFDCTAGAVPGGWRIGVADAQFEIALVHREDGLRARLGGETHDLLAHVSGDTVHMASGAQRLSLRRQRPGAPDAEALGGGRVTAPMPGLVQAVSVSEGAEVAKGQTLAVLEAMKMQHQITAPVAGRVARQHVAPGAQLAAGDVMFEIEEEESA

SEQ ID NO: 9752 - DNA, 1350 bp, Silicibacter pomeroyi DSS-3
  CDS (1)..(1350): transl_table=11
atgttcgacaagatcctgattgcgaaccgaggcgagatcgccctgcgtgtgatccgcgccgcgcgcgagatggggatcgccacggttgccgtgcactccaccgccgacagcgacgcgatgcatgtgcgcatggcagacgaatcggtctgtatcggccccccgcccggcaaccagagctatctttcggtgcccgccataatctcggcctgcgagatcaccggtgctcaggcgatccatcccggctatggctttctgtccgaaaacgccggtttcgtgcagatagtcgaagaccacggcatcaccttcatcggcccttcggccgagcatatccgcatcatgggcgacaagatcaccgccaaggacaccgccaaggaactgggtatccccgtggtccccggctcggatggtggtgtggcagatgtggccgaggcgcgccgggtcggcgagcacatcggctatccggtgatcatcaaggccaccgccggtggtggcggtcgcggcatgaaggtcgcccgcaatgccaaggagatggagcacgccttttccaccgcgcgctccgaggccaaggccgcctttggcaatgacgaggtctatatcgagaaatacctgaccacgccgcgccatatcgagatccaggtgtttggcgacggcaagggcaacgcggtgcatctgggcgaacgtgactgctcgctgcaacgccgtcaccagaaagtgttcgaagaggcccccggcccctgcatcacccccgaggaacgcgcgcggatcggcaagatctgtgccgatgcggtggcccggatcaactatatcggcgccggtaccgtggaattcctctacgagaatggtgagttctacttcatcgagatgaacacccgcctgcaggtggagcatccggtgaccgagggcatctttggcgtcgatctggtgcgcgagcagatccgggttgccgctggcctgccgatgtcctttacccaggacgatctgcagatcaacggccacgcgatcgaggtgcggatcaacgccgagaaactgccgaatttctcgccctgccccggcaagatcaccgcctatcacgcgcccggcggtctgggtgtgcggatggattctgcgctttataccggctattcgatcccgccctattacgacagcctgatcgccaagttgatcgtgcagggccgcgaccgccccgaggcgctggcgcgtctgcaacgggcgctgagcgagctgatcgtggacggcatcgacaccacggtgccgctgtttcacgcgctgctgcaagagcctgacgtccagagcggtacctataacatccactggctggagcgctggcttgcggagaatctggccgactga

SEQ ID NO: 9753 - protein, 449 aa, Silicibacter pomeroyi DSS-3
MFDKILIANRGEIALRVIRAAREMGIATVAVHSTADSDAMHVRMADESVCIGPPPGNQSYLSVPAIISACEITGAQAIHPGYGFLSENAGFVQIVEDHGITFIGPSAEHIRIMGDKITAKDTAKELGIPVVPGSDGGVADVAEARRVGEHIGYPVIIKATAGGGGRGMKVARNAKEMEHAFSTARSEAKAAFGNDEVYIEKYLTTPRHIEIQVFGDGKGNAVHLGERDCSLQRRHQKVFEEAPGPCITPEERARIGKICADAVARINYIGAGTVEFLYENGEFYFIEMNTRLQVEHPVTEGIFGVDLVREQIRVAAGLPMSFTQDDLQINGHAIEVRINAEKLPNFSPCPGKITAYHAPGGLGVRMDSALYTGYSIPPYYDSLIAKLIVQGRDRPEALARLQRALSELIVDGIDTTVPLFHALLQEPDVQSGTYNIHWLERWLAENLAD

SEQ ID NO: 9754 - DNA, 1332 bp, Campylobacter jejuni RM1221
  CDS (1)..(1332): transl_table=11
atggaaattaaaagcatattaattgctaatcgtggagaaatagcactgcgtgctttaagaacgattaaagaaatgggtaaaaaagcaatttgtgtgtattctgaagcagataaagatgctttgtatttaaaatacgctgatgcaagcatttgtataggcaaagcaagaagttctgaaagctatttaaatatcccagctattattacagcagctgaaattgctgaagcagatgcgatttttccaggatacggatttttaagcgaaaatcaaaattttgttgaaatttgtgctaaacataacatcaaatttataggtccttctgtggaagctatgaatttaatgagtgataaatcaaaagcaaaacaagtcatgcaaagagcaggcgtacctgtgatcccaggaagcgatggggctttggcaggagctgaagcagctaaaaaacttgccaaagaaataggttatcctgtgattttaaaagcagctgcaggtggtggtggtcgtggtatgcgtgtggttgaaaatgaaaaagatcttgaaaaagcgtattggtcggctgaaagcgaggctatgacagcatttggcgatggaactatgtatatggaaaaatacatacaaaatccacgccatatagaagtacagattataggagatagttttgggaatgtgattcatgtgggcgaaagagattgttctatgcaaagacgccatcaaaaacttatagaagaatcccctgcgattttgcttgatgaaaaaacacgcactaggcttcatgaaactgctattaaggcagctaaagccataggatatgaaggtgcgggaacttttgagtttttagtagataaaaatttggatttttattttatagaaatgaatacgcgtttgcaagttgaacactgtgtaagtgaaatggtaagtgggattgatatcatagaacaaatgattaaagtagcagaaggttatgctttaccatctcaagaaagtattaaattaaatgggcactctatagaatgtagaatcacagccgaagattccaaaactttcttgccaagtccaggtaagattactaaatacattccaccagcaggacgcaatgtcagaatggaaagtcattgttatcaagactatagcgtgcctccttattatgattctatgataggcaaacttgtagtttgggcagaagatcgcaataaagctattgcaaaaatgaaagtagctttagatgagttgcttataagtgggataaaaacaaccaaagattttcatctttctatgatggaaaatcctgattttattaataataattacgatacaaattatcttgcaagacattaa

SEQ ID NO: 9755 - protein, 443 aa, Campylobacter jejuni RM1221
MEIKSILIANRGEIALRALRTIKEMGKKAICVYSEADKDALYLKYADASICIGKARSSESYLNIPAIITAAEIAEADAIFPGYGFLSENQNFVEICAKHNIKFIGPSVEAMNLMSDKSKAKQVMQRAGVPVIPGSDGALAGAEAAKKLAKEIGYPVILKAAAGGGGRGMRVVENEKDLEKAYWSAESEAMTAFGDGTMYMEKYIQNPRHIEVQIIGDSFGNVIHVGERDCSMQRRHQKLIEESPAILLDEKTRTRLHETAIKAAKAIGYEGAGTFEFLVDKNLDFYFIEMNTRLQVEHCVSEMVSGIDIIEQMIKVAEGYALPSQESIKLNGHSIECRITAEDSKTFLPSPGKITKYIPPAGRNVRMESHCYQDYSVPPYYDSMIGKLVVWAEDRNKAIAKMKVALDELLISGIKTTKDFHLSMMENPDFINNNYDTNYLARH

SEQ ID NO: 9756 - DNA, 1497 bp, Dehalococcoides ethenogenes 195
  CDS (1)..(1497): transl_table=11
atgctaaataaaatactggttgccaacaggggtgagatagccatacgtattatgcgcgcctgccgtgagctgggcataaagactgttgccgtttattccgatgctgacaaaggcgctctttttgtaaagtatgcagacgaagcttatcatattggcccttcccagctgtctgagagctatctgaatataaaaaagatagtctcggctgccaaaaaagcgggggtagacggggttcaccccggatacggttttttatctgaaaaccccggttttgcactggctctggaaaaggccggcatcaagtttataggccccagcagccgggttatagagctgatgggcaacaagattgccgccagacgtgaaatgaaaaaagcgggtgtgccggtactgcccggtaccgagggctgtgtttccggtattgagcaggccaccgaagcggccgcggctatcggttacccggttattatcaaacccagcggcggcggcggcggtatcggtatgcgggtggcaaacggcccggacgagcttaaagatgccatagaatcctcccagaaagtagccggaaatacctttggtctggccgaagtctatattgaaaaatacatatccaatccccgccatatagagatacagataatgggtgattcacaggggaatgtggtttatctgggtgagagggaatgttctatccagcggcgttatcagaaacttattgaagaagccccttcaccggtcatcacccccgaactccgcaagaaaatgggcgaagtggctatcaaggccggcaagtgggttaactatgagggtgccggtactattgaatttatcttttcaaacggccagttttacttccttgaggccaatacccgggtgcaggtggaacaccctgttaccgaaatggttaccggcatagatatagtcaaagaacagataatggtagcctccggagatgagctttctttcaaacaggaagacgtccagatgcggggttgggctatagagtgccgcataaacgccgaagaccccttgaatgagtttgccccctcggcggccaaactaaagggttaccgttcacccggcggtatcggggtgcgggtggacagcggcgttcatacccgctataacataccttacctgtatgaccccatgatatccaagctgattgtctggggacgtacccgcgaagaagccatagcccgtatgcggcgcgccctttacgaatacattatagtaggggtgaagaccaatatccccttccacaaggcggttctggttaatcccaattttgtggccgggaatttgcatacccatttcattgaaaaagaaaccaccctgcttgatgagatgaagcgtatcatgagtgaagaacagccgctggaagagaagctgtccgaaatatttgacgatacccggaggattgccgctattgcggcggttgccgctctgacccagcttccggctgaaattgatgaagatgagataaccggcgtttaa

SEQ ID NO: 9757 - protein, 498 aa, Dehalococcoides ethenogenes 195
MLNKILVANRGEIAIRIMRACRELGIKTVAVYSDADKGALFVKYADEAYHIGPSQLSESYLNIKKIVSAAKKAGVDGVHPGYGFLSENPGFALALEKAGIKFIGPSSRVIELMGNKIAARREMKKAGVPVLPGTEGCVSGIEQATEAAAAIGYPVIIKPSGGGGGIGMRVANGPDELKDAIESSQKVAGNTFGLAEVYIEKYISNPRHIEIQIMGDSQGNVVYLGERECSIQRRYQKLIEEAPSPVITPELRKKMGEVAIKAGKWVNYEGAGTIEFIFSNGQFYFLEANTRVQVEHPVTEMVTGIDIVKEQIMVASGDELSFKQEDVQMRGWAIECRINAEDPLNEFAPSAAKLKGYRSPGGIGVRVDSGVHTRYNIPYLYDPMISKLIVWGRTREEAIARMRRALYEYIIVGVKTNIPFHKAVLVNPNFVAGNLHTHFIEKETTLLDEMKRIMSEEQPLEEKLSEIFDDTRRIAAIAAVAALTQLPAEIDEDEITGV

SEQ ID NO: 9758 - DNA, 1359 bp, Staphylococcus epidermidis RP62A
  CDS (1)..(1359): transl_table=11
atgaaaaagattttaatcgctaatcgtggtgaaatcgcagtaagaataataagagcggcacacgatttaggtattcaaacagtagctatatactcagaaggtgacaaagatgcattacatactcaaattgctgatgaagcatactgcgtcggtcctactttatcaaaagattcttatttaaatataccaaatattttatctatcgctacttctacaggatgtgatggtgttcatcctggatacggctttttggctgaaaatggtgattttgctgaattgtgtgaagcatgccaattaaaatttattgggccaagctatcaatcaattcagaaaatgggaataaaagatattgctaaagctgaaatgattaaagccaatgtacctgtagtaccaggaagtgaaggacttattcaaagtatagatgacgctaaaaaaatagctaaaaaaatcggctatccagttatcatcaaagccacagcaggtggtggtggaaaaggtattcgggttgctcgtgatgagaaagaacttgaaactggttaccgtatgacacaacaagaagctgaaaccgcgttcggaaatggtggtttatacttagaaaaatttatagaaaactttagacatatagagattcaaattattggcgatacttatggaaacgttatacatttaggtgaacgtgattgtacaattcaaagaagaatgcaaaagctcgttgaagaagcaccctcaccagttttaagtgaagataaacgccaagaaatgggtaatgctgcaattagagccgcaaaagctgtaaattatgaaaacgcaggtacaattgaatttatatatgatttagatgataaccaattttatttcatggaaatgaatacacgtattcaagttgaacacccagtaactgaaatggtaacaggagtagatttagtaaaattacaactcaaagttgctatgggtgaggcgttaccttttaaacaagaagatatttccattaacggtcacgctattgaatttcgaatcaatgctgaaaatccttacaaaaactttatgccatcaccaggcaagattacccaatatcttgctccaggcggttttggagtgagaattgaatcagcatgttatactaattatacgataccaccttactatgactccatggtggcaaaacttatagttcacgaacctacacgtgaagaatcaattatgacaggcattcgtgctttaagtgaatatcttgttttaggtatcgacactacgattccattccacttaagacttctaaataatcatatttttagaagtggggaatttaatacaaaattcctagaaaagtataatattatggacgataataaccaatag

SEQ ID NO: 9759 - protein, 452 aa, Staphylococcus epidermidis RP62A
MKKILIANRGEIAVRIIRAAHDLGIQTVAIYSEGDKDALHTQIADEAYCVGPTLSKDSYLNIPNILSIATSTGCDGVHPGYGFLAENGDFAELCEACQLKFIGPSYQSIQKMGIKDIAKAEMIKANVPVVPGSEGLIQSIDDAKKIAKKIGYPVIIKATAGGGGKGIRVARDEKELETGYRMTQQEAETAFGNGGLYLEKFIENFRHIEIQIIGDTYGNVIHLGERDCTIQRRMQKLVEEAPSPVLSEDKRQEMGNAAIRAAKAVNYENAGTIEFIYDLDDNQFYFMEMNTRIQVEHPVTEMVTGVDLVKLQLKVAMGEALPFKQEDISINGHAIEFRINAENPYKNFMPSPGKITQYLAPGGFGVRIESACYTNYTIPPYYDSMVAKLIVHEPTREESIMTGIRALSEYLVLGIDTTIPFHLRLLNNHIFRSGEFNTKFLEKYNIMDDNNQ

SEQ ID NO: 9760 - DNA, 1362 bp, Neisseria gonorrhoeae FA 1090
  CDS (1)..(1362): transl_table=11
atgctgaaaaaagttttaatcgccaaccggggcgaaatcgccttgcgcgtactccgtgcctgccgcgaaatgggcattgccaccgttgccgtgcattccgaaaccgacaaaggcagcctgcacgtcaaactcgccgacgaatccgtgtgcatcggtcctgccgcttctgcgcaaagttatctgaacattcccgccatcattgccgccgccgaagtaacctgcgcggacgctgtccacccgggctacggcttccttgccgaaaacgccgatttcgccgaacaggtcgaacagtccggctttaccttcatcggcccgaaacccgacaccatccgcctgatgggcgacaaagtctccgccaaacacgcgatgatagcggcaggcgtgccctgcgtccccggctctgacggcgcattgcccgacgatgatgccgaaatcctcaaaatcgccgacaaagtcggttatcccgtgattatcaaagcatcgggcggcggcggcgggcgcggtatgcgcgtggtcgagaaaaaagaagacctcctccagtctgtcgaaatgaccaaggctgaagcgggcgcggcgttcggcaacccgatggtttatatggaacgctacctgcaacgcccgcgccacgtcgaaatccaagtgcttgccgacgaacacggcaacgccgtctatcttgccgagcgcgactgttcgctgcaacgccgccaccagaaagtcatcgaggaagcacccgccccgtttatcgatgaaaaggcacgcaaaaaaatcggcaaagcctgtaccgacgcgtgcaaacgcatcggctaccggggcgcgggcacgtttgaatttttatacgaagacggcgaatttttctttatcgagatgaacacgcgcgttcaggtcgagcatccggttaccgaactcattaccggcgtggacatcgtccaagagcaactccgcatcgcatccggcctgccgctgcaatacaaacagaaagacatcaaaatcgaaggccacgccttcgagtgccgcatcaatgccgaagacccgtacaacttcatccccagcccgggcccgattgaaagctgccacctgcccggcggcttcggcatccgcgtggacagccacatctaccaaggctaccgcatcccgccgtactacgacagcctgatcggcaaaatctgcgtacacggcaaaacgcgtgaacaggcaatggcgaaaatgcgcgtcgcactcgccgagctggcggtaaccggcatcaaaaccaatacgccgttgcaccgcgacctgttcgccgatgcgggtttccaagaaggcggagtgagcatccattacctggagcactggctggaagcgcgcaaaaccaaacaggacaaataa

SEQ ID NO: 9761 - protein, 453 aa, Neisseria gonorrhoeae FA 1090
MLKKVLIANRGEIALRVLRACREMGIATVAVHSETDKGSLHVKLADESVCIGPAASAQSYLNIPAIIAAAEVTCADAVHPGYGFLAENADFAEQVEQSGFTFIGPKPDTIRLMGDKVSAKHAMIAAGVPCVPGSDGALPDDDAEILKIADKVGYPVIIKASGGGGGRGMRVVEKKEDLLQSVEMTKAEAGAAFGNPMVYMERYLQRPRHVEIQVLADEHGNAVYLAERDCSLQRRHQKVIEEAPAPFIDEKARKKIGKACTDACKRIGYRGAGTFEFLYEDGEFFFIEMNTRVQVEHPVTELITGVDIVQEQLRIASGLPLQYKQKDIKIEGHAFECRINAEDPYNFIPSPGPIESCHLPGGFGIRVDSHIYQGYRIPPYYDSLIGKICVHGKTREQAMAKMRVALAELAVTGIKTNTPLHRDLFADAGFQEGGVSIHYLEHWLEARKTKQDK

SEQ ID NO: 9762 - DNA, 1512 bp, Bacteroides fragilis NCTC 9343
  CDS (1)..(1512): transl_table=11
atgataaaaaagatattagttgcgaatcgtggcgaaatagccatgcgtattttccgtacctgccgggtaatgaatattgccacagtggctatctacacccgggtagatcggggtgccttgcatgtgcgttatgccgaagaggcttattgtatttccgattctccggaagatacgtcttatctgaaaccggaaaagattctgcaaatagccaaaaagacaggagctgccatccatccgggatatggctttctgtctgagaatgcggacttcgcccgtcgttgtgaggaagaaggggtaatctttattggtccgagtgccgatattattgcccgaatgggtatcaagactgaggcccgccggattatgcgtgaagccggtttaccgatcgtaccgggcacggaagatccgatgaaaggcattgccgaagccaaaaaggtggctgccgaagtaggctatcccatcatgctgaaagcactggccgggggtggtggaaaaggtatgcgtctggtacgcagtgaagaagaaatggagacggcattgcgcctttcacagtctgaagccggaacgtcgtttggcaacgatgctgtttatattgaaaaatatatcgagaatccccatcacatcgaagtacagatactgggagataaatatggaaatgtaattcatctttatgaacgggaatgttccattcagcgacgcaatcagaaagtaattgaagaatcgccttctccttttgtgaagcccgaaacacgtgccaagatgctgaaggttgcagtggaggcctgtaagcggattaattattacagtgccggaacgctggagttcatgatggataaagaccagaatttttattttctggaaatgaatactcgcctgcaggtggaacatccggtgacggaagagtgtaccggggtcgatctggtacgcgacatgatactggtagctgccggcaatcgtctgccttacaggcaagaagatgtcgagttccggggagctgccattgaatgtcgcatttatgccgaagatcccgagaataacttcatgccttcgcccggggtgataaccgttcgtgaagctcccgaaggacgtaatgtccgtttggacagtgcggcttatgcgggatttgaggtttcgctgcattatgatccgatgattgcaaagctctgttgttggggacgtaatcgtgattcggctatttcgaacatggcccgtgcgttgcgcgaatataagattctgggtatcaagactacgattcctttccatcagcgtgtgttgaagaatgcggctttcctgaaaggagagtacgatactacctttatcgatacgcgcttcgataaggaagacctgaaacgcaggcagaataccgatccgacagtagcggtgattgctgctgcgctgaaacattacgaagaagagaaagaggctgcttcacgcgccactacgcttccggtagtaggagattcgctttggaaatattacggcaagttgcaaatgactgccaataactattaa

SEQ ID NO: 9763 - protein, 503 aa, Bacteroides fragilis NCTC 9343
MIKKILVANRGEIAMRIFRTCRVMNIATVAIYTRVDRGALHVRYAEEAYCISDSPEDTSYLKPEKILQIAKKTGAAIHPGYGFLSENADFARRCEEEGVIFIGPSADIIARMGIKTEARRIMREAGLPIVPGTEDPMKGIAEAKKVAAEVGYPIMLKALAGGGGKGMRLVRSEEEMETALRLSQSEAGTSFGNDAVYIEKYIENPHHIEVQILGDKYGNVIHLYERECSIQRRNQKVIEESPSPFVKPETRAKMLKVAVEACKRINYYSAGTLEFMMDKDQNFYFLEMNTRLQVEHPVTEECTGVDLVRDMILVAAGNRLPYRQEDVEFRGAAIECRIYAEDPENNFMPSPGVITVREAPEGRNVRLDSAAYAGFEVSLHYDPMIAKLCCWGRNRDSAISNMARALREYKILGIKTTIPFHQRVLKNAAFLKGEYDTTFIDTRFDKEDLKRRQNTDPTVAVIAAALKHYEEEKEAASRATTLPVVGDSLWKYYGKLQMTANNY

SEQ ID NO: 9764 - DNA, 1344 bp, Pseudomonas fluorescens Pf-5
  CDS (1)..(1344): transl_table=11
ttggaaaaagtcctgatcgccaaccgcggcgaaatcgccctgcggatcctgcgtgcctgcaaggaaatggggatcaagaccgtcgccgtctactccaaggccgacaaggagctgatgcacctgggcctggcggacgaatccgtctgcatcgggcctgcgcaagccgcgcagtcctacctgcacatcccggccatcatcgcggccgctgaagtcactggcgctacggcaatccaccctggctacggcttcctggcggaaaacgccgacttcgccgaacaggtggaaaactccggcttcgccttcatcggcccgaaagccgagaccatccgcctgatgggcgacaaggtttccgccaagcacgccatgatcgctgccggcgtaccgacggttccaggttccgacggcccgctgccggaagacgaggaaaccgccctgcgcatcggccgtgaagtcggctacccggtgatcatcaaggccgccggtggcggtggtggtcgcggcatgcgcgtagtgcacaaggaagaagacctgatcgcctcggcgaagctgacccgctccgaagccggcgcggcgttcggcaacccgatggtctacctggaaaagttcctgaccaacccacgtcacgtggaagttcaggtgctgtccgacggccagggcaatgccatccacctgggtgaccgcgactgctcgctgcagcgtcgtcaccagaaggtcctcgaagaagcgccggcaccgggcatcgacgagaccgcccgccaggaagtcttcgcccgctgcgtcaaggcgtgcatcgacatcggctaccgtggcgccggcacgttcgagttcctctacgagaacggccgcttctacttcatcgagatgaacactcgcgtgcaggtagagcacccggtatcggaaatggtgaccggtatcgacatcgtcaaggaaatgctcagcattgccgccggcaacaagctgtccttcacccaggacgacgtcgtgatccgcggccacgcgctggaatgccggatcaacgccgaagacccgaaaaccttcatgccaagcccaggcacggtcaagcatttccatgccccgggcggcaacggcgtgcgcgtcgactcgcacctgtacagcggttacgcggttccaccgaactacgattcgttgatcggcaagctgatcacctacggggccacccgtgacgaagccatggcgcgcatgcgcaatgcgctggacgaaatcgtcgtcgacgggatcaagaccaacatcccgctgcaccgcgacctgacccgtgacgaaggcttctgcaaagggggcgtgaacattcactacctcgagcacaagctggccgagcaacactga

SEQ ID NO: 9765 - protein, 447 aa, Pseudomonas fluorescens Pf-5
MEKVLIANRGEIALRILRACKEMGIKTVAVYSKADKELMHLGLADESVCIGPAQAAQSYLHIPAIIAAAEVTGATAIHPGYGFLAENADFAEQVENSGFAFIGPKAETIRLMGDKVSAKHAMIAAGVPTVPGSDGPLPEDEETALRIGREVGYPVIIKAAGGGGGRGMRVVHKEEDLIASAKLTRSEAGAAFGNPMVYLEKFLTNPRHVEVQVLSDGQGNAIHLGDRDCSLQRRHQKVLEEAPAPGIDETARQEVFARCVKACIDIGYRGAGTFEFLYENGRFYFIEMNTRVQVEHPVSEMVTGIDIVKEMLSIAAGNKLSFTQDDVVIRGHALECRINAEDPKTFMPSPGTVKHFHAPGGNGVRVDSHLYSGYAVPPNYDSLIGKLITYGATRDEAMARMRNALDEIVVDGIKTNIPLHRDLTRDEGFCKGGVNIHYLEHKLAEQH

SEQ ID NO: 9766 - DNA, 1347 bp, Psychrobacter arcticus 273-4
  CDS (1)..(1347): transl_table=11
atgttcacaaaaattttaattgccaatcgtggcgagattgctctacgtattatccgagcttgtaagcagctgggtattcagtcagtcattgcacattctgaatcagacaaagaatcgttacccgtacgcctagccgatgaaaaaatatgtatcgggcctgccaatgccacacatagctaccttaatcaacgagcacttgtttctgctgccaaaatcaccaacgcgcaggccatccatccaggctatggctttttgtctgaaaacgcagactttgctgccttagttgaagactcaggtctcacatttattggcccaacggccgacaatatcagaaatatgggcgacaaggttgaagccaaaaaacaaatgacaatggctggcgtgccctgtgttcctggttccgatggcgctttacccgctgattcagagcaagttatcaagattgctagtgacgttggttatccggtcattattaaagcggcaagtggcggcggcggtcgtggtatgcgcgtggtcgaaaaagaaactgatttactatctgctatctctatgacgcaaacagaggccaaagccaatttcggtagcgcgattgtttatcttgaaaaatacttacaagcacctcgtcatatcgaagtgcaagtcatgtctgacacccacggcaatgccatttatttaggcgagcgtgattgttctatgcagcgccgtcatcaaaaagtcattgaagaagccccagcacccggtattaccgaagagcaacgtcagaaaatagggcaagcatgcgtaacggcttgcgagcaaatgcagtatagaggcgcaggcacgtttgagtttttatatgaaaatggcgagttcttttttatcgagatgaatacccgtgtgcaagtcgaacacaccattactgagatggtaacaggcgtcgatattgtgcaagagcaaataagagtagctgcaggacttgcgctagcacacaaacagagtgatgtcgctattactggacacgcttttgagtgtcgtattaatgctgaaaacgcgcagacatttttaccgaatgctggacgaatagactactgccacatgccagcagggtttggtattcgagtagatagccatgctgagtcgaactacaccgtgccgccctcttatgacagtttgatcgccaagatatgtgtacaagatcgctcaagagaacaagcgatagaaaaaatgcgtgcggccttatcagaagcgcaaattacgggcattgataccaatattggtttgcatcaacgactctttgaagatgaggtgttttgtcagggtcaaataagcattcattatctagaaaaatggatacaagacaatatataa

SEQ ID NO: 9767 - protein, 448 aa, Psychrobacter arcticus 273-4
MFTKILIANRGEIALRIIRACKQLGIQSVIAHSESDKESLPVRLADEKICIGPANATHSYLNQRALVSAAKITNAQAIHPGYGFLSENADFAALVEDSGLTFIGPTADNIRNMGDKVEAKKQMTMAGVPCVPGSDGALPADSEQVIKIASDVGYPVIIKAASGGGGRGMRVVEKETDLLSAISMTQTEAKANFGSAIVYLEKYLQAPRHIEVQVMSDTHGNAIYLGERDCSMQRRHQKVIEEAPAPGITEEQRQKIGQACVTACEQMQYRGAGTFEFLYENGEFFFIEMNTRVQVEHTITEMVTGVDIVQEQIRVAAGLALAHKQSDVAITGHAFECRINAENAQTFLPNAGRIDYCHMPAGFGIRVDSHAESNYTVPPSYDSLIAKICVQDRSREQAIEKMRAALSEAQITGIDTNIGLHQRLFEDEVFCQGQISIHYLEKWIQDNI

SEQ ID NO: 9768 - DNA, 1347 bp, Colwellia psychrerythraea 34H
  CDS (1)..(1347): transl_table=11
atgttagataaagttgttatcgccaaccgtggcgaaattgccttaagaatattacgtgcttgtaaagagttaggtattaaaactgtagcggttcactcaactgctgacaaaaatcttaaacacgtattattagctgatgaaaccatttgtattggtaaagcaccagcgccagatagctaccttaatattcctgcaatcataacggcagcagaattaactaatgctgtagcgattcatccaggttatggatttttagcagaaaatgctgattttgctgagcaagttgaaaactctggttttgcctttatcggtccaaaagcagaaagcatccgtattatgggtgataaagttcaagctatcaaagcaatgaaagttgcaggtgtaccttgcgtaccaggttctgatggcccattggatgacgatgaagaagcaaacaaagcccatgctaaacgtattggttaccctattatcgttaaagctgctggtggcggtggtggtcgtggcatgcgcgttgtccgtagcgaagctgaattagttgagtcaattgctttaaccaaaaaagaagccggcacaattttcaaaaatgatatggtttacatggaaaaattccttgaaaatccacgtcatgttgaaattcaaataatggctgacggcaaaggcgctgcaattcacttaggtgaacgtgattgttcaatgcaacgtcgtcatcaaaaagtagtagaagaagctcctgcacctggtattacgcctgaaatgcgcgctaaaattggtgagcgttgttgtaaagcttgtgttgacattaactatcgcggtgctggtacctttgaatttttgtatgaaaatggtgaattctatttcattgaaatgaatacacgtattcaggttgaacatccagtaactgaaatgatcactggtgttgatttgatcaaagaacaacttcgtgttgctgctggtcaaccgttatcttatacccaagatgacatcaaggtttcaggtcactctattgaatgtcgtattaatgcggaagatcctcgtacctttatcccttcaccgggtaaaattacgcgtttccacccaccaggtggtttaggcgtacgttgggattctcatatttatgctgattactctgtacctccacattatgactctatgattggtaaattaattacttggggtgataaccgtgatgtagcgattgcacgtatgcgtaatgctttatcagagttagtgattgatggcatcaaaactaacattactttgcatcaagacattttaaatgatcaaggttttgttaatggcggcgctaacattcattatttagagcaaaagttagctgaacttggctag

SEQ ID NO: 9769 - protein, 448 aa, Colwellia psychrerythraea 34H
MLDKVVIANRGEIALRILRACKELGIKTVAVHSTADKNLKHVLLADETICIGKAPAPDSYLNIPAIITAAELTNAVAIHPGYGFLAENADFAEQVENSGFAFIGPKAESIRIMGDKVQAIKAMKVAGVPCVPGSDGPLDDDEEANKAHAKRIGYPIIVKAAGGGGGRGMRVVRSEAELVESIALTKKEAGTIFKNDMVYMEKFLENPRHVEIQIMADGKGAAIHLGERDCSMQRRHQKVVEEAPAPGITPEMRAKIGERCCKACVDINYRGAGTFEFLYENGEFYFIEMNTRIQVEHPVTEMITGVDLIKEQLRVAAGQPLSYTQDDIKVSGHSIECRINAEDPRTFIPSPGKITRFHPPGGLGVRWDSHIYADYSVPPHYDSMIGKLITWGDNRDVAIARMRNALSELVIDGIKTNITLHQDILNDQGFVNGGANIHYLEQKLAELG

SEQ ID NO: 9770 - DNA, 1359 bp, Dechloromonas aromatica RCB
  CDS (1)..(1359): transl_table=11
atgtttgaaaaaatcctcattgccaaccggggcgaaatcgcgctgcgtatccagcgtgcctgccgcgagcttggcatcaagactgtggtcgtgcactccgaggccgatcgtgatgccaagtacgtcaaactggccgacgagtcggtctgtatcggcccggcttcttctgccctcagctacctgaacgttccggcgatcatttcggcggcagaagtcaccgatgcccaggcgattcacccgggttatggcttcctgtccgagaatgccgactttgccgagcgcgttgaaacctccggcttcgtctttatcggcccgaaggccgaaaccattcgcctgatgggcgacaaggtgtcggccaaggatgcgatgaaagtggccggtgtgccctgcgttccaggttccgagggcgagttgccggatgaccctaaggaaatcgtcaagatcgcccgtgcggtgggttatccagtgatcatcaaggccgccggtggtggcggtggtcgcggcatgcgcgtcgttcataccgaggctgccctggtcaatgccgtgcaaatgaccaagcaggaagccggcagctttttcggcaaccctgcggtctatatggaaaagtatctggaaaatccgcgtcacgtggaaatccaggtgctggccgaccagcatggcagcgccatttatctgggcgagcgcgattgctccatgcagcgtcgtcaccagaaggtgattgaagaggcaccggcaccgcacatcgcgccgcgcctgatcaaccgtattggcgagcgctgcgccgaagcctgtcgcaagatcggttaccgtggtgcaggtaccttcgaattcctttacgagaacaacgagttctatttcatcgaaatgaacacccgtgttcaggttgagcatccggtgaccgagatgatcactggcgtcgatatcgttcaggaacagattcgcgtcgcctttggcgaaaagctgcgctacaagcagaaggacattgtctgccgtggccatgccatcgagtgccgtattaacgccgaagatcccttcacgttcgtgccatctcccggcaatatcacgttttatcacccaccgggtggcccaggtatccgcgttgattcgcacatttatcagggttacaaggtgccgtcgcattacgactcgatggttgccaaggtgatttcctatggtgatactcgcgagcaggccattcgtcgcatgcgcatcgccttgtccgagatgagcatccagggcatcaagaccaacatcccgttgcaccaggaactgatgcaggacgcccgttttgttgagggcggcaccagcatccactaccttgaacagaaactcgccgacaagggcgaagtgaaggcttag

SEQ ID NO: 9771 - protein, 452 aa, Dechloromonas aromatica RCB
MFEKILIANRGEIALRIQRACRELGIKTVVVHSEADRDAKYVKLADESVCIGPASSALSYLNVPAIISAAEVTDAQAIHPGYGFLSENADFAERVETSGFVFIGPKAETIRLMGDKVSAKDAMKVAGVPCVPGSEGELPDDPKEIVKIARAVGYPVIIKAAGGGGGRGMRVVHTEAALVNAVQMTKQEAGSFFGNPAVYMEKYLENPRHVEIQVLADQHGSAIYLGERDCSMQRRHQKVIEEAPAPHIAPRLINRIGERCAEACRKIGYRGAGTFEFLYENNEFYFIEMNTRVQVEHPVTEMITGVDIVQEQIRVAFGEKLRYKQKDIVCRGHAIECRINAEDPFTFVPSPGNITFYHPPGGPGIRVDSHIYQGYKVPSHYDSMVAKVISYGDTREQAIRRMRIALSEMSIQGIKTNIPLHQELMQDARFVEGGTSIHYLEQKLADKGEVKA

SEQ ID NO: 9772 - DNA, 1353 bp, Ralstonia eutropha JMP134
  CDS (1)..(1353): transl_table=11
atgtttgaaaaaattctgatcgcgaaccgcggtgaaattgcccttcgcatccagcgcgcctgccgcgagctgggcatcaagaccgtggtggtgtactcggaagccgacaaggaagccaagtacgtgaagctggccgacgaagccgtgtgtatcggcccggccccgtcgccgctgtcctacctgaacatgcctgccatcatttcggccgccgaagtgaccgacgcgcaggcgatccacccgggctacggcttcctgtccgaaaacgccgactttgccgagcgcgtggagaagtccggcttcgtcttcatcggcccgaccgccgagagcatccgcctgatgggcgacaaggtctcggccaagcaggccatgatcaaggccggcgtgccgtgcgtgccgggctcggaaggcgcactgcctgacgatcccgccgaaatcgtcgcggcggcgcgccgcgtgggctacccggtcatcatcaaggctgccggcggtggtggcggccgcggcatgcgcgtggtgcacaccgaggccgcgctggtcaacgccgtcaacatgacgcgcgaagaagccggccgtgccttcggcaaccccgaggtctacatggagaagttcctggagaatccgcgccacgtggagatccagatccttgccgaccagcacaagcaagctatctggctgggcgagcgcgactgctcgatgcagcgacgccaccagaaggtgatcgaggaagcgcccgcgccgcacattccgcgccgcctgatcgaacgcatcggcgaccgctgcgcggaggcttgccgcaagatgggctaccgtggcgccggcacgttcgaattcctgtacgagaacaacgagttctacttcatcgagatgaacacgcgcgtgcaggtcgagcacccggtcaccgaaatgatcacgggcatcgacatcgtgcaggaacagatccgcatcgcatttggcgagaagctgcgctaccgccagaaggatgtgcagttccgtggccatgcgatcgaatgccgcgtgaatgccgaggacccgttcaagttcattccgtccccgggccgcatcaccgcctggcacatgcccggtggccccggcgtacgcgtcgactcgcacgcgtatgatggttacttcgtcccgccgaattatgattcgatgatcggcaagatcatcacctacggcgctacccgcgagcaggcgattgcccgcatgcggatcgcgctgtcggagatggtggtggacggtatccagaccaacgtgccgctgcaccgggagctgatgatggacgccaacttcgtcgaaggcggcaccagcatccactatctcgagcatcgcctcgcgcagcgcgagaaagcctga

SEQ ID NO: 9773 - protein, 450 aa, Ralstonia eutropha JMP134
MFEKILIANRGEIALRIQRACRELGIKTVVVYSEADKEAKYVKLADEAVCIGPAPSPLSYLNMPAIISAAEVTDAQAIHPGYGFLSENADFAERVEKSGFVFIGPTAESIRLMGDKVSAKQAMIKAGVPCVPGSEGALPDDPAEIVAAARRVGYPVIIKAAGGGGGRGMRVVHTEAALVNAVNMTREEAGRAFGNPEVYMEKFLENPRHVEIQILADQHKQAIWLGERDCSMQRRHQKVIEEAPAPHIPRRLIERIGDRCAEACRKMGYRGAGTFEFLYENNEFYFIEMNTRVQVEHPVTEMITGIDIVQEQIRIAFGEKLRYRQKDVQFRGHAIECRVNAEDPFKFIPSPGRITAWHMPGGPGVRVDSHAYDGYFVPPNYDSMIGKIITYGATREQAIARMRIALSEMVVDGIQTNVPLHRELMMDANFVEGGTSIHYLEHRLAQREKA

SEQ ID NO: 9774 - DNA, 1971 bp, Ehrlichia canis str. Jake
  CDS (1)..(1971): transl_table=11
atgataaagaaaatattgatagcgaatagaggtgaaattgcgtgtagagtaatgagaactgctagtaaaatgggaatatcttgtgtttctgtatattcaagtgcagatgtatactcattacatgttttatcagctgaagaagcagtgaatattggtcctgctccagtaaatcagagttatttaaatatggagaaaatttgtgaagtagcacataatgcaggtgtggatgctgtgcatcctgggtatgggtttttgtctgaaaatgctgagtttcctgaaaagcttcaagaatataatattcaatttattggtccaagtccttcttcaataagaatgatggctgataaaattacttctaaaaagatagctgaatctgctcaagtgaacattattccaggatatatgggaatagttgattctgttgatgaggcgaaaagtatagctaggtctataggatttccggtcatgataaaagctactgctggtggtggtggtaaagggatgagaattgtaaaatcatgtgaggaaatggaccaagcttttacttctgcaacaaatgaagctgcgaaaaattttaaggatggaagaatttttattgaaaaatatattgaattaccaaggcacattgaaatccaaatcatagctgataagtatggtaatattgtttgtttgggtgaaagggaatgttctatacagcggcataatcaaaaagttatagaagaaacgcctagtccgtttcttaatgaggaaacaagacaaaaaatgtatcagcagtgtgtaaatttggcaaaaaaagtaggatattattctgctggtactatagaatttatagttgatcagaataggcaattttattttttggaaatgaatactagattacaagttgagcatcctgtaacagagcttgttactggtattgatattgtggaagaaatgattagaattgctgatggtgaaaaattaagatttactcaacaagatgttaaatttattggttcagcaatagaatctagaatttatgcagaagatcctgtgaagaattttttaccttctagtgggagaattgtttattattctgcacctatgcctaatgataatttgaggattgatagtggagtttttgaaggtgcagaagttagtatgttttacgatcctatgattgctaaagtttgtacttatggtaaaaatagagatgaagcagtgagctttatgcaaaaatatttaaatgaattttatataggtggaatagctcataatatagattttctattgtcagtatttcatcatcctgtatttatgtctgggaatattaatactagatttgttgaacaattttattctggtgggtttgaatatgatcctctgacggaagactgcatagaactttttgtgttaacttcgttatgtatattttttcaaagtgaatatgataacagtttaaatcattcatgtaatagtatggacttatctgtttatgttgatggtcaagaatatttcgttaatgctaagtatcaaaatggtaaagttttagcaatttataaccaaaatgagtatttggtttcaggtacatggaatacaaactttaaaatatttaagctacaaatcagtgaagaattatttcatgtaaaagttgatagtaggttaaataaatataagttgaggtattctactatgagtgcattatgtgtggtatataggtcttgtatatctaacttgctacctataatgcctcaagttagtactgaggaattatgttgtaataatgtttgttctcctatttctggtatgatagttaaaatttatgttaaggaaggagaaaaagttcaaccagggcaatctttgttagtcattgaagctatgaaaatggaaaatgtaatatattcaaatgtaaaatcagttgttaaatctgtgtttttttcagaaggaaatagtgtgattgttggtgatgttattatagaatttagtgaatga

SEQ ID NO: 9775 - protein, 656 aa, Ehrlichia canis str. Jake
MIKKILIANRGEIACRVMRTASKMGISCVSVYSSADVYSLHVLSAEEAVNIGPAPVNQSYLNMEKICEVAHNAGVDAVHPGYGFLSENAEFPEKLQEYNIQFIGPSPSSIRMMADKITSKKIAESAQVNIIPGYMGIVDSVDEAKSIARSIGFPVMIKATAGGGGKGMRIVKSCEEMDQAFTSATNEAAKNFKDGRIFIEKYIELPRHIEIQIIADKYGNIVCLGERECSIQRHNQKVIEETPSPFLNEETRQKMYQQCVNLAKKVGYYSAGTIEFIVDQNRQFYFLEMNTRLQVEHPVTELVTGIDIVEEMIRIADGEKLRFTQQDVKFIGSAIESRIYAEDPVKNFLPSSGRIVYYSAPMPNDNLRIDSGVFEGAEVSMFYDPMIAKVCTYGKNRDEAVSFMQKYLNEFYIGGIAHNIDFLLSVFHHPVFMSGNINTRFVEQFYSGGFEYDPLTEDCIELFVLTSLCIFFQSEYDNSLNHSCNSMDLSVYVDGQEYFVNAKYQNGKVLAIYNQNEYLVSGTWNTNFKIFKLQISEELFHVKVDSRLNKYKLRYSTMSALCVVYRSCISNLLPIMPQVSTEELCCNNVCSPISGMIVKIYVKEGEKVQPGQSLLVIEAMKMENVIYSNVKSVVKSVFFSEGNSVIVGDVIIEFSE

SEQ ID NO: 9776 - DNA, 1350 bp, Thiobacillus denitrificans ATCC 25259
  CDS (1)..(1350): transl_table=11
atgtttgaaaagattctgatcgccaaccgcggcgagatagccctgagaatccagcgcgcctgccgcgaaatggggatcaagacggtcgcggtctactcggaggccgaccgcgacgccaaatacgtcaagctcgccgacgaatcggtgtgcatcggacccgccccgtccgcgcaaagctatctgcacgtgccgtcgatcatcgctgccgccgaagtcaccgacgccgccgccatccatcccggctacggcttcctttccgagaacgccgacttcgccgaacgcgtcgaatcgtcgggtttcacgttcatcggcccgcgccccgacaacatccgcctgatgggcgacaaagtcgcggccaagcaggccatgatcgacgccaaggtgccctgcgtgcccggctcggacggcgcactcgccgatgacccgcaggagatcctcaagaccgcgcgcgcgatcggctacccggtcatcatcaaggccgcgggcggcggcggcggacgcgggatgcgcgtcgtccacaccgaagccgcgctgctcaacgccgtcacgatgaccaagaccgaagccggcgccgccttcggcaatccgatggtctacatggaaaagtttctcgagacgccgcgccatatcgagatccagatccttgccgacgaacacggcaatgccgtccatctcggcgagcgcgactgctcgatgcagcgccgccaccagaaggttctcgaggaagcgccggcgcccggactcgacccgaagctgcgcgacaagatcggcgagcgctgcgccgaagcctgccgcaagatcggctaccgcggcgcgggcaccttcgaattcctgtacgagaacggcgagttctacttcatcgagatgaacacgcgcgtccaggtcgagcatccggtcaccgaactcattaccggcatcgacatcgtgcagacgcagatccgcgtcgccgccggcgagaagctgcccttccagcagaaggacatccgctttcgcgggcacgcggtcgagtgccgcatcaatgccgagcacccgacgaccttcgtgccgagcccgggcaaactcaccaattaccacgccgcgggcggccccggcatccgcgtcgactcgcacgtctaccacggctattacgtgccgccgcattacgactcgatgatcggcaagctcatcgcctacggcgacacccgcgaccaggccatcgcccgcatgcgcggggcgctcatggaaatggtcgtcgaaggcatccagagcaatattccgctgcatcaggagctgatgaatgacgcggcgttcatcgccggcgggacgagcatccactacctcgagcacaagctcgcgggggagaaagggtga

SEQ ID NO: 9777 - protein, 449 aa, Thiobacillus denitrificans ATCC 25259
MFEKILIANRGEIALRIQRACREMGIKTVAVYSEADRDAKYVKLADESVCIGPAPSAQSYLHVPSIIAAAEVTDAAAIHPGYGFLSENADFAERVESSGFTFIGPRPDNIRLMGDKVAAKQAMIDAKVPCVPGSDGALADDPQEILKTARAIGYPVIIKAAGGGGGRGMRVVHTEAALLNAVTMTKTEAGAAFGNPMVYMEKFLETPRHIEIQILADEHGNAVHLGERDCSMQRRHQKVLEEAPAPGLDPKLRDKIGERCAEACRKIGYRGAGTFEFLYENGEFYFIEMNTRVQVEHPVTELITGIDIVQTQIRVAAGEKLPFQQKDIRFRGHAVECRINAEHPTTFVPSPGKLTNYHAAGGPGIRVDSHVYHGYYVPPHYDSMIGKLIAYGDTRDQAIARMRGALMEMVVEGIQSNIPLHQELMNDAAFIAGGTSIHYLEHKLAGEKG

SEQ ID NO: 9778 - DNA, 1344 bp, Anabaena variabilis ATCC 29413
  CDS (1)..(1344): transl_table=11
atgaagtttgacaaaatattaattgccaatcggggagaaatagcgcttcgcattctccgcgcctgtgaggaaatggggattgcgacgatcgcagttcactcgactgttgaccggaatgctcttcatgtccaacttgctgacgaagcggtttgtattggcgaacctgctagcgctaaaagttatttgaatattcccaatattattgctgcggctttaacgcgcaatgccagtgctattcatcctgggtatggctttttatctgaaaatgccaaatttgcggaaatctgtgccgaccaccacattgcgtttatcggccctaccccagaagctatccgcttgatgggggacaaatccacagccaaggaaaccatgcaaaaggctggtgtacctacagtaccgggtagtgagggtttggtagagacggagcaagaaggattagaactggcgaaagatatcggctacccagtaatgatcaaagccacagctggtggtggcggccggggtatgcgactggtgcgatcgccagatgaatttgtcaaacttttcttagccgcccaaggtgaagcaggtgcagcctttggtaatgctggcgtttatattgaaaaatttattgaacgtccgcgccacattgaatttcaaattttggctgatagttacggcaatgtcattcacttgggtgagcgggattgctcaattcagcgccgtaaccaaaagttactagaagaagcccccagtccagccctggactcagacctacgggagaaaatgggacaagctgcggtgaaagcggctcagtttattaattacaccggggcaggtactatcgagtttcttctagatagatccggtcagttttactttatggagatgaacacccggattcaggtagaacatcccgtaactgagatggttactggagtggatttattagttgagcaaatcagaattgcccaaggggaaagacttagactaactcaagaccaagtagttttacgcggtcatgcgatcgaatgtcgcatcaatgccgaagacccagaccacgatttccgcccagctcccggacgcattagcggttatcttccccctggtggtcctggtgtgcggattgactcccacgtttacaccgattaccaaattccgccctactacgattccctaattggtaagttgatcgtttggggacctgatcgcgctactgccattaaccgcatgaaacgcgccctcagagaatgcgccatcaccggattacctacaacaattgggtttcatcaaagaattatggaaaatacccaatttttacaaggtaacgtgtctactagctttgtgcaggagatgaataaatag

SEQ ID NO: 9779 - protein, 447 aa, Anabaena variabilis ATCC 29413
MKFDKILIANRGEIALRILRACEEMGIATIAVHSTVDRNALHVQLADEAVCIGEPASAKSYLNIPNIIAAALTRNASAIHPGYGFLSENAKFAEICADHHIAFIGPTPEAIRLMGDKSTAKETMQKAGVPTVPGSEGLVETEQEGLELAKDIGYPVMIKATAGGGGRGMRLVRSPDEFVKLFLAAQGEAGAAFGNAGVYIEKFIERPRHIEFQILADSYGNVIHLGERDCSIQRRNQKLLEEAPSPALDSDLREKMGQAAVKAAQFINYTGAGTIEFLLDRSGQFYFMEMNTRIQVEHPVTEMVTGVDLLVEQIRIAQGERLRLTQDQVVLRGHAIECRINAEDPDHDFRPAPGRISGYLPPGGPGVRIDSHVYTDYQIPPYYDSLIGKLIVWGPDRATAINRMKRALRECAITGLPTTIGFHQRIMENTQFLQGNVSTSFVQEMNK

SEQ ID NO: 9780 - DNA, 1359 bp, Pseudomonas fluorescens PfO-1
  CDS (1)..(1359): transl_table=11
atgactgcgaagttggaaaaagttctgatcgctaaccgcggtgagatcgccctgcggattctgcgtgcctgcaaagagatgggcatcaagaccgtcgccgtttactccaaggccgacaaagagctgatgcacctgggtctggcagacgaatccgtctgcatcggcccggcttctgccgcgcactcctacctgcacatcccggcaatcattgcggccgctgaagtgactggcgctaccgccattcacccaggctacggtttcctcgcggaaaacgccgactttgccgagcaggtcgagaactccggcttcgccttcatcggcccgaaagccgaaaccattcgcctgatgggcgacaaggtatcggccaagcacgcgatgatcgaagcgggcgtgccaaccgttccaggttccgacggcccgctgccggaagacgaggaaacggcgctgcgcatcggtcgtgaagtcggctatccggtgatcatcaaggccgccggcggcggtggtggtcgcggcatgcgtgtggtgcacaaggaagaagacctgatcgcctcggcaaagctgacccgctccgaagctggcgcggcgttcggcaacccgatggtctatctggaaaaattcctgaccaatccgcgtcacgtcgaagtgcaggttctgtccgacggccagggcaacgccatccatctgggcgaccgcgattgctcgctgcaacgccgtcaccagaaagttctcgaagaagcaccggcaccgggcatcgatgagaacgcgcgcaaggaagtcctggcccgctgcgtcaaggcgtgcatcgacatcggctaccgtggcgccggcaccttcgagttcctgtacgagaacggtcgtttctacttcatcgaaatgaacacccgtgttcaggtggagcacccggtttcggaaatggtcaccggtatcgacatcgtcaaggagatgctcagcatcgccgctggcaacaagctgtcgtatacccaggatgatgtggtgatccgcggtcactcgctggaatgccggatcaacgccgaagacccgaaaaccttcatgccgagcccgggcacggtcaagcatttccacgcaccaggcggcaacggcgttcgcgtcgattcgcacctgtacagcggttatgccgttccgccgaactacgactcgctgatcggcaagctgatcacttacggcgcgacccgcgacgaagccatggcccgcatgcgcaatgccctggacgaaatcgtggtcgacgggatcaagaccaacatcccgctgcaccgtgatctgacccgcgacgaaggcttctgcaaagggggcgtgaacattcactacctcgagcacaagctggctggcgagaagcactaa

SEQ ID NO: 9781 - protein, 452 aa, Pseudomonas fluorescens PfO-1
MTAKLEKVLIANRGEIALRILRACKEMGIKTVAVYSKADKELMHLGLADESVCIGPASAAHSYLHIPAIIAAAEVTGATAIHPGYGFLAENADFAEQVENSGFAFIGPKAETIRLMGDKVSAKHAMIEAGVPTVPGSDGPLPEDEETALRIGREVGYPVIIKAAGGGGGRGMRVVHKEEDLIASAKLTRSEAGAAFGNPMVYLEKFLTNPRHVEVQVLSDGQGNAIHLGDRDCSLQRRHQKVLEEAPAPGIDENARKEVLARCVKACIDIGYRGAGTFEFLYENGRFYFIEMNTRVQVEHPVSEMVTGIDIVKEMLSIAAGNKLSYTQDDVVIRGHSLECRINAEDPKTFMPSPGTVKHFHAPGGNGVRVDSHLYSGYAVPPNYDSLIGKLITYGATRDEAMARMRNALDEIVVDGIKTNIPLHRDLTRDEGFCKGGVNIHYLEHKLAGEKH

SEQ ID NO: 9782 - DNA, 1347 bp, Rhodobacter sphaeroides 2.4.1
  CDS (1)..(1347): transl_table=11
atgttcgaaaagatcctgatcgccaaccgcggcgagatcgccttgcgcgtgatccgcgcctgccaggagatggggatcaagtcggtcgccgtccattcgaccgcggacgccgatgccatgcatgtccgcatggccgatgagagcgtctgcatcggcccggcctcctcgaccgacagctatctcaacaaggcctcgatcatctcggcctgcgagatcaccggggccgaggccgtccatccgggttacggcttcctctccgagaacgcggccttcgcccaggcgctgcaggaccacgggatcgagttcatcggcccgaccgcggaccatatccgcatcatgggcgacaagatcaccgccaaggacacgatgaaggctctgggcgtgccctgcgtgcccggctccgacggcggcgtgcccgactacgagacggccatcgccacggccagagacatcggcttcccggtcatcatcaaggccacggcgggcggcggcgggcgcggcatgaaggtcgcgcggaacgagcaggaactcgagatcgccttccgcaccgcgcgttcggaagccaaggccgccttcggcaacgacgaagtctatatggagaaatatctccagaagccgcggcacatcgagatccaggtgttcggcgacggcaagggccgcgcggtccatctgggcgagcgtgactgctcgctgcagcggcggcaccagaaggtgttcgaggaagccccgggtccggtcatcacccccgagatgcgtgcggagatcggcaggatctgcgccgacgcggtggcgcggatcaactacatcggcgcgggcacgatcgaattcctctacgaggacggccagttctacttcatcgagatgaacacccgcctgcaggtggagcatccggtgaccgaggcgatcttcggcgtcgatctcgtgcgcgagcagatccgggtcgcggcgggcctgccgatgagcttcaatcaggatgcgctggagatcaacggccacgccatcgaggtgcggatcaacgccgagaagctgccgaacttttcgccctgccccggcaaggtgcgggtcttccacgcgccgggcggcctcggggtgcggatggattcggccctctatggcggctattccatcccgccctattacgacagcctgatcggcaagctgatcgtgcacggccgcgaccggcccgaggcgctggcgcgcctgcaccgcgccctgggcgagctgatcgtggacgggatcgacacgacggtgccgctgttccacgcgcttctggccgagcccgacatccagaatggcgactacaatatccactggctggaaaaatggctcgccgcccagttcggctga

SEQ ID NO: 9783 - protein, 448 aa, Rhodobacter sphaeroides 2.4.1
MFEKILIANRGEIALRVIRACQEMGIKSVAVHSTADADAMHVRMADESVCIGPASSTDSYLNKASIISACEITGAEAVHPGYGFLSENAAFAQALQDHGIEFIGPTADHIRIMGDKITAKDTMKALGVPCVPGSDGGVPDYETAIATARDIGFPVIIKATAGGGGRGMKVARNEQELEIAFRTARSEAKAAFGNDEVYMEKYLQKPRHIEIQVFGDGKGRAVHLGERDCSLQRRHQKVFEEAPGPVITPEMRAEIGRICADAVARINYIGAGTIEFLYEDGQFYFIEMNTRLQVEHPVTEAIFGVDLVREQIRVAAGLPMSFNQDALEINGHAIEVRINAEKLPNFSPCPGKVRVFHAPGGLGVRMDSALYGGYSIPPYYDSLIGKLIVHGRDRPEALARLHRALGELIVDGIDTTVPLFHALLAEPDIQNGDYNIHWLEKWLAAQFG

SEQ ID NO: 9784 - DNA, 1350 bp, Carboxydothermus hydrogenoformans Z-2901
  CDS (1)..(1350): transl_table=11
atgtttaaaaaagttcttgtagccaatcggggagaaattgccgtccggattattcgagcattacgagaaatgggaatttcaagtgttgcggtttattctgaagcggaccgggaaagtttgcatgtaaagcttgccgatgaggcgatttgcattggcccgaaagaatcaaaccgaagctacttaaatataccggcgattatcagtgctgctctggtcaccggagccgaagctattcacccgggctacggctttttggcggaaaatgcggcttttgccgaagcggtagaagcaagcggattgacttttattggtccgccaccccgggccatcgagttaatgggagataaggctacggcccgtcaaaccatgattgcagcgggagttccggtagtgcccggttccaaaaaagttgttgaaaatgtggaagaagctgtggctatagcccgggagattgggtatccggtaatgttaaaggcttcggcggggggcggtggtaaagggatgaggattgcccagaacgatgatgatttggccaaagcttttattaccgcccgtactgaagctcaaaatgcctttggcaatcccgatgtttatttagaaaaatacgtggaagaaccgcggcacatcgagattcaagttttaggagacaagcacggaaattatgtttatttatttgagcgggattgctctattcagcggcgtcaccagaagttaattgaagaggcaccttctccctttgttgacccgattctgcgggaaaaaatgggggaggccgctttaaaggcctgccgggccgttgattactacagtgccggaacggtggagtttttagtggatagaaataaaaacttttattttatggagatgaacacccgtattcaagtggaacatccggttacggagtttattaccggtgtagaccttattaaagaacaaattaaaattgccgccggagaaaagctgtccataagtcaaaaagatttaaaaatcaacggttgggctatagaatgccggattaatgctgaggatccggagaagaattttatgcccagtcccggaacggtaaccgaatatttgcctcccggtggtaatggggtgcgggtcgacagttttctttattccggctataaagttgtaccctattacgactcgctggtggccaaggtgataacctgggggcaaaaccgggaagaagcaatttcccggatgcagagggctcttctggaaatgcgtgtcgaaggaattaaaacaacaattccttttcatttaaaggtattggaaaatgcctttttccgtaagggtgaagtttacacaaattttgtgcagagaagaattttggccgaagagtaa

SEQ ID NO: 9785 - protein, 449 aa, Carboxydothermus hydrogenoformans Z-2901
MFKKVLVANRGEIAVRIIRALREMGISSVAVYSEADRESLHVKLADEAICIGPKESNRSYLNIPAIISAALVTGAEAIHPGYGFLAENAAFAEAVEASGLTFIGPPPRAIELMGDKATARQTMIAAGVPVVPGSKKVVENVEEAVAIAREIGYPVMLKASAGGGGKGMRIAQNDDDLAKAFITARTEAQNAFGNPDVYLEKYVEEPRHIEIQVLGDKHGNYVYLFERDCSIQRRHQKLIEEAPSPFVDPILREKMGEAALKACRAVDYYSAGTVEFLVDRNKNFYFMEMNTRIQVEHPVTEFITGVDLIKEQIKIAAGEKLSISQKDLKINGWAIECRINAEDPEKNFMPSPGTVTEYLPPGGNGVRVDSFLYSGYKVVPYYDSLVAKVITWGQNREEAISRMQRALLEMRVEGIKTTIPFHLKVLENAFFRKGEVYTNFVQRRILAEE

SEQ ID NO: 9786 - DNA, 1368 bp, Burkholderia sp. 383
  CDS (1)..(1368): transl_table=11
atgtttgaaaaaatcctcattgccaatcgcggtgaaatcgcgctgcgcatccagcgtgcgtgccgcgagctcggcgtcaagacggtggtcgtctactcggaagccgacaaggaagccaagtacgtccgcctcgcggacgaagccgtctgtatcggcccggcccagtcgaacctgagctacctgaacatgccggcgctgatcagcgccgcggaagtcaccgatgccgaggcgatccaccccggctacggcttcctgtcggagaatgccgatttcgcggaacgcgtcgagcagtcgggcttcacgttcatcggcccgcgcccggaaacgatccgcatgatgggtgacaaggtcaccgcgaagcagacgatgatcaagaccggcgtgccttgcgtaccgggctcggaaggcgcgttgccggacgatccgaaagagatcgtcaagattgcgcgcgcgatcggctatccggtcatcatcaaggcggcaggcggcggtggcgggcgcgggatgcgcgtcgtgcacaccgaggccgcgctcgtcaacgcggtcaacatgacccgcgaggaagccggccgtgcgttcggcaacccgcaggtgtacatggagaagttcctcgagaacccgcgccacatcgaaatccaggtgctgtccgacgcgtacaagaacgcgatctggctcggcgagcgcgattgctcgatgcagcgccgccaccagaaggtgatcgaggaagcgccggcacccggcattccgcgccgcctgatcgaccgcatcggcgaccgctgcgcggacgcctgcaagaagatgggctacctcggcgcgggcacgttcgaattcctgtacgagaacaacgagttctacttcatcgagatgaacacgcgcgtgcaggtcgagcacccggtatcggagctgatcacgggcgtcgacatcgtgcaggaacagatccgcatcgcggccggcgagaagctcacgctgcgccagcgcgacattgaattccgcggacatgcgatcgaatgccggatcaacgcagaagatccgttcaagttcacgccgtcgccgggccggatcacgtcgtggcatacgccgggcggtcctggcgtgcgcgtcgattcgcacgcctacaatggctatttcgtgccgccgaactatgattcgatgatcggcaagctgatcacctacggcgcgacgcgcgagcaggcaatcagccggatgcgcatcgcgctgtcggaaatggtcgtcgaaggcattcagaccaacatcccgctgcaccgcgagctgatgatcgattcgaagttcgtcgaaggcggcaccagcatccactacctcgaaaaccggctcgcccagaagcagcaggtcgcaccggaagaagcgtaa

SEQ ID NO: 9787 - protein, 455 aa, Burkholderia sp. 383
MFEKILIANRGEIALRIQRACRELGVKTVVVYSEADKEAKYVRLADEAVCIGPAQSNLSYLNMPALISAAEVTDAEAIHPGYGFLSENADFAERVEQSGFTFIGPRPETIRMMGDKVTAKQTMIKTGVPCVPGSEGALPDDPKEIVKIARAIGYPVIIKAAGGGGGRGMRVVHTEAALVNAVNMTREEAGRAFGNPQVYMEKFLENPRHIEIQVLSDAYKNAIWLGERDCSMQRRHQKVIEEAPAPGIPRRLIDRIGDRCADACKKMGYLGAGTFEFLYENNEFYFIEMNTRVQVEHPVSELITGVDIVQEQIRIAAGEKLTLRQRDIEFRGHAIECRINAEDPFKFTPSPGRITSWHTPGGPGVRVDSHAYNGYFVPPNYDSMIGKLITYGATREQAISRMRIALSEMVVEGIQTNIPLHRELMIDSKFVEGGTSIHYLENRLAQKQQVAPEEA

SEQ ID NO: 9788 - DNA, 1341 bp, Geobacter metallireducens GS-15
  CDS (1)..(1341): transl_table=11
atgttccataaagttctgattgcaaaccggggggagattgccctgcgggtcatccgggcctgcaaggagttggggatcaagacggtggccgtctattccgtcgccgacaaggattcccttcacgtcaagctggccgacgaaagcgtctgcatcggaccggcgccaagcctccagagctacctcaatatcaacgccatcatcagcgccgccgaagtgaccgacgccgaagcaatccatcccggctacggttttctctctgaaaatgccgcctttgccgagatctgcgaaaactgcggcatcaccttcatcggtccctcctccgagagtatgcggatcatgggggacaagatcagtgcccgtcaggcggtgatcaaggaggatgtgccgatcctccccggcaccaaggagggggtaaacgacgtcaacgaggccataaagattgccaaggggatcggcttcccggtcatcatcaaggcgacggccggtggtggcggacggggaatgaagatcgttcactctccggcaaccctccccaacgcctttgccacggcacgggccgaggcccaggccggcttcggcaaccccgaggtctacatcgagaagtactgcgaagagccccgccacgtggagattcagatcatggccgacaagcacggcaacgtgatccacctgggcgagcgggactgctccatccagcggcgccaccagaagatcatcgaggaggccccgtgcccggtcatgaccccgaacctccgcaaggccatgggcgatgcagcggtcagggccgcaaaggccgttggctatgacagtgtcggtacggtcgaattcctggtggacaagaacctcaacttctacttcatggagatgaacacccgggtccaggtggagcatccggtcaccgagatgattaccggcgtcgatattgtccgtgagcagatacgctccgcggcggggcacaaactccgctacaagcagggcgatgtgaagatccaggggcacgccatcgagtgccgcatcaacgccgaggacccggtgaagttcactccgtgccccggcaagatcaccggctatcacacccccggcggccttggggtgcgggtcgattcctttgtgtacgaccagtattcggtggtcccccactatgattcactcatttccaagctcatcgtccatgccgaaacccgcgaagatgccatccgccgcatggcccgggcactggacgagtacatcatcgaagggatcaagacgacgatcccgttccacaagcggatcatggccaacaaggacttcatggaagggaacgtggataccgccttccttgagaagatcgtgctggagtaa

SEQ ID NO: 9789 - protein, 446 aa, Geobacter metallireducens GS-15
MFHKVLIANRGEIALRVIRACKELGIKTVAVYSVADKDSLHVKLADESVCIGPAPSLQSYLNINAIISAAEVTDAEAIHPGYGFLSENAAFAEICENCGITFIGPSSESMRIMGDKISARQAVIKEDVPILPGTKEGVNDVNEAIKIAKGIGFPVIIKATAGGGGRGMKIVHSPATLPNAFATARAEAQAGFGNPEVYIEKYCEEPRHVEIQIMADKHGNVIHLGERDCSIQRRHQKIIEEAPCPVMTPNLRKAMGDAAVRAAKAVGYDSVGTVEFLVDKNLNFYFMEMNTRVQVEHPVTEMITGVDIVREQIRSAAGHKLRYKQGDVKIQGHAIECRINAEDPVKFTPCPGKITGYHTPGGLGVRVDSFVYDQYSVVPHYDSLISKLIVHAETREDAIRRMARALDEYIIEGIKTTIPFHKRIMANKDFMEGNVDTAFLEKIVLE

SEQ ID NO: 9790 - DNA, 1362 bp, Synechococcus elongatus PCC 7942
  CDS (1)..(1362): transl_table=11
atgcgtttcaacaagatcctgatcgccaatcgcggcgaaatcgccctgcgcattctccgcacttgtgaagaactcgggatcggcacgatcgccgttcactccactgtggatcgcaacgcgctccatgtgcagttagcggacgaagcggtctgtattggcgaagcggccagcagcaaaagctatctcaatatccccaacatcattgcggcggccctgacccgtaatgccagcgccattcaccccggctatggcttcttggcggagaatgcccgctttgcagaaatctgcgccgatcaccatctcacctttattggccccagccccgattcgattcgagccatgggcgataaatccaccgctaaggaaacaatgcagcgggtcggcgttccgacgattccgggcagtgacggtctgctgacggatgttgattcggctgccaaagttgctgccgagatcggctatcccgtcatgatcaaagcgacggcggggggcggtggtcgcggtatgcggctggtgcgtgagcctgcagatctggaaaaactgttccttgctgcccaaggagaagccgaggcagcttttgggaatccaggactgtatctcgaaaaatttatcgatcgcccacgccacgttgaatttcagatcttggccgatgcctacggcaatgtagtgcatctaggcgagcgcgattgctccattcaacgtcgtcaccaaaagctgctcgaagaagcccccagtccggcgctatcggcagacctgcggcagaaaatgggcgatgccgccgtcaaagtcgctcaagcgatcggctacatcggtgccggcaccgtggagtttctggtcgatgcgaccggcaacttctacttcatggagatgaatacccgcatccaagtcgagcatccagtcacagaaatgattacgggactggacttgattgcggagcagattcggattgcccaaggcgaagcgctgcgcttccggcaagccgatattcaactgcgcggccatgcgatcgaatgccgtatcaatgcggaagatccggaatacaatttccggccgaatcctggccgcattacaggctatttaccgcccggcggccccggcgttcgtgtcgattcccatgtttataccgactacgaaattccgccctattacgattcgctgattggcaaattgattgtctggggtgcaacacgggaagaggcgatcgcgcggatgcagcgtgctctgcgggaatgcgccatcaccggcttgccgacgacccttagtttccatcagctgatgttgcagatgcctgagttcctgcgcggggaactctataccaactttgttgagcaggtgatgctacctcggatcctcaagtcctag

SEQ ID NO: 9791 - protein, 453 aa, Synechococcus elongatus PCC 7942
MRFNKILIANRGEIALRILRTCEELGIGTIAVHSTVDRNALHVQLADEAVCIGEAASSKSYLNIPNIIAAALTRNASAIHPGYGFLAENARFAEICADHHLTFIGPSPDSIRAMGDKSTAKETMQRVGVPTIPGSDGLLTDVDSAAKVAAEIGYPVMIKATAGGGGRGMRLVREPADLEKLFLAAQGEAEAAFGNPGLYLEKFIDRPRHVEFQILADAYGNVVHLGERDCSIQRRHQKLLEEAPSPALSADLRQKMGDAAVKVAQAIGYIGAGTVEFLVDATGNFYFMEMNTRIQVEHPVTEMITGLDLIAEQIRIAQGEALRFRQADIQLRGHAIECRINAEDPEYNFRPNPGRITGYLPPGGPGVRVDSHVYTDYEIPPYYDSLIGKLIVWGATREEAIARMQRALRECAITGLPTTLSFHQLMLQMPEFLRGELYTNFVEQVMLPRILKS

SEQ ID NO: 9792 - DNA, 1989 bp, Rhodospirillum rubrum ATCC 11170
  CDS (1)..(1989): transl_table=11
atgttcgataagatcctgatcgcaaaccgcggcgaaatcgcctgccgcgttatcaagaccgcccgcaagatgggcatcaagacggtgtcggtttacagcgacgccgaccgcaacgccgtccataccgacatggccgatgaaaaggtccatatcggcggctcggcctcggcccagtcctatctggtcatcgagcgcatcgtcgaagcctgcaagcgcaccggcgcccaggctgtccatcccggctatggtttcctgtcggaaaacaaggccttccagatcgccctggccaaggagggcattgccttcattggtcccgatgccctggccatccaggcgatgggcgacaagatcgaatcgaagaagctggcggccaaggccggggtcagcacggttccgggctatatgggcgtgatcaaggacgccgaggaggcggcccgcatcgcctccgagatcggcttcccggtgatgatcaaggcctcggccggcggcggcggcaagggcatgcgcgtcgcatggtcggtcgaagaggcccgcgagggcttcgtctcggccaccaacgaagccaaatcgagcttcggcgacgaccgggtgttcatcgagaagttcatcgagcagccgcgccacatcgaaatccagatcctggccgacggcgagacctatctttacgtcaacgagcgcgaatgctcgatccagcgccgcaatcagaaagtggtcgaagaggcgccctcgcccttcctcacccccgaggtccgcaaggccatgggcgagcaggcggtggccctggccaaggtggtcgattacaaaagcgccggcaccatcgaattcatcgtcgacgccgcgcgcaatttctacttcctggaaatgaacacccgccttcaggtcgagcatccggtgaccgaaatgatcaccggcctggatctggtcgaatggatgatccgcatcgcggcgggcgaaaagctgacgctgcgccaggaggacatcggcatcgacggctgggcgatggaatgccggatctatgccgaggatccctatcgcaacttcctgccctcgatcggtcgtctggtgcaatacgcgccgcccgaggagatcgagggtcaggtgcgcgttgataccggcgtcgagaacggcggcgagatcagcatgtattacgatccgatgatcgccaagctggtcacccatggcgccgaccgcgccgaggccatccaccgcatgcgcaacgcccttgacgccttcctcatccgcggcgtcgcccataacatccccttcctcgcctcgctgttgtcgcgcgagcgcttcgtcgaggggcggctgaccaccaatttcatcgccgaggaatacgccaacggcttcaacgcctcggatctgccgcccgaggatccgtcgatcctgatcgccgtggccgccaccgtccaccagaagggatcggaccgcaacgccaatatcaccggccagatcaggggccacgaaaagaagctcaagcacgattgggtggtgcggctgaacggcaccaaccatctggtcaatgtccgctcgatcgacggcggccacgaggtggtgctcgagcatggtccggtcaatgtgtatcacgactggaaattcggccattcgctgttccgctgcgccatcgacggccgcgaggtctgcgtgcagatcgagcgcgagggcgtgggctatcgcctgcaccacgccggcacccaggcctcggccctggtgctgaccccggaaaccgcccattacgcctcgctgatgctcaaaaaagagccgcccgatatgtcgctttacctgctgtcgccgatgcccggcctgctggtatcgctggcggtcgaagagggccacgaggtcaaggccggcgagaccctggcggtgatcgaggccatgaagatggagaacatcctcaaggcccagcatgacggcgtgatcgccaaggttcattccaagcccggcgacagcctgtcggtcgatcagaagatcctggaattcgcgccttaa

SEQ ID NO: 9793 - protein, 662 aa, Rhodospirillum rubrum ATCC 11170
MFDKILIANRGEIACRVIKTARKMGIKTVSVYSDADRNAVHTDMADEKVHIGGSASAQSYLVIERIVEACKRTGAQAVHPGYGFLSENKAFQIALAKEGIAFIGPDALAIQAMGDKIESKKLAAKAGVSTVPGYMGVIKDAEEAARIASEIGFPVMIKASAGGGGKGMRVAWSVEEAREGFVSATNEAKSSFGDDRVFIEKFIEQPRHIEIQILADGETYLYVNERECSIQRRNQKVVEEAPSPFLTPEVRKAMGEQAVALAKVVDYKSAGTIEFIVDAARNFYFLEMNTRLQVEHPVTEMITGLDLVEWMIRIAAGEKLTLRQEDIGIDGWAMECRIYAEDPYRNFLPSIGRLVQYAPPEEIEGQVRVDTGVENGGEISMYYDPMIAKLVTHGADRAEAIHRMRNALDAFLIRGVAHNIPFLASLLSRERFVEGRLTTNFIAEEYANGFNASDLPPEDPSILIAVAATVHQKGSDRNANITGQIRGHEKKLKHDWVVRLNGTNHLVNVRSIDGGHEVVLEHGPVNVYHDWKFGHSLFRCAIDGREVCVQIEREGVGYRLHHAGTQASALVLTPETAHYASLMLKKEPPDMSLYLLSPMPGLLVSLAVEEGHEVKAGETLAVIEAMKMENILKAQHDGVIAKVHSKPGDSLSVDQKILEFAP

SEQ ID NO: 9794 - DNA, 1338 bp, Rhodospirillum rubrum ATCC 11170
  CDS (1)..(1338): transl_table=11
atgttcgacaaaatcctcatcgccaaccggggcgagatcgcgctacgcatccatcgggcctgccgggagatgggcatcaagaccgtcgcggtgcattccaccgccgattccgaggccatgcatgtgcgtctggccgacgagtcggtgtgcatcggtccgccctcggcccgtgacagctatctgtccaaggcggcgatcatctcggcggcgaccatcaccaatgccgacgccatccaccccggctatggcttcttgtccgaaaacgccgatttcgccgagatggtccaggaccacggcttcaccttcatcggcccgtcgccgcgccatatccgcctgatgggcgacaagatcaccgccaagcaggcggcccttgaagccgggctgccctgcgtgcccgggtcggccggggcggtgaccagcgaagaggaaggcttgaaggtcgccgcggcctttggctatcccgtgctgttcaaggcgaccgccggcggcggcggtcgcggcatgaaggtcgccaccggtccccatgacctgggcgaggccttccgcacggcgcggacggaagcccaggcggcctttggcaattccgaagtctatatggagaaatatctccagaacccgcgccatatcgaggtgcaggtgcttggcgataattacggcggcgcggtctatcttggcgaacgcgattgctcgctccagcgcaagcaccagaaggtgcttgaagaagcccgctcgccggcgctcaacgacgaggcgcgcgcccgcatcggcgaaatcgcccgacgcgcggtcgaacgcctaggctacagcaacgccggcaccatggagttcctttacgaagagggcgagttctatttcatcgaaatgaacacccgccttcaggtggaacacccggtcaccgaaatgatcaccggcatcgatgtggtgcgcgagcagatccgcatcgccgccggggcgccgctgggttatgaccaatcggcgatccgcttccatggccatgccatcgaatgccgggtcaacgccgaggatccggtgaccttcgccccctcccccgggcgcgtgacctatttccaccagcccggcggcatgggcgtgcgcgtggattccgggctgtaccagggggtgatggtgcctccccattacgacagcatggtcgccaagctgatcgttcacggggcgacccgcaacgaatgcctgatgcggctgcgccgggcccttgatgaattcgtcatcgaggggattcaaaccaccttgccgctgcatcgccgcatcgtccgcgcccccgaattcgtcgatggcgcctatgacatccgctggctcgagaacttcgtggaccaatag

SEQ ID NO: 9795 - protein, 445 aa, Rhodospirillum rubrum ATCC 11170
MFDKILIANRGEIALRIHRACREMGIKTVAVHSTADSEAMHVRLADESVCIGPPSARDSYLSKAAIISAATITNADAIHPGYGFLSENADFAEMVQDHGFTFIGPSPRHIRLMGDKITAKQAALEAGLPCVPGSAGAVTSEEEGLKVAAAFGYPVLFKATAGGGGRGMKVATGPHDLGEAFRTARTEAQAAFGNSEVYMEKYLQNPRHIEVQVLGDNYGGAVYLGERDCSLQRKHQKVLEEARSPALNDEARARIGEIARRAVERLGYSNAGTMEFLYEEGEFYFIEMNTRLQVEHPVTEMITGIDVVREQIRIAAGAPLGYDQSAIRFHGHAIECRVNAEDPVTFAPSPGRVTYFHQPGGMGVRVDSGLYQGVMVPPHYDSMVAKLIVHGATRNECLMRLRRALDEFVIEGIQTTLPLHRRIVRAPEFVDGAYDIRWLENFVDQ

SEQ ID NO: 9796 - DNA, 1347 bp, Moorella thermoacetica ATCC 39073
  CDS (1)..(1347): transl_table=11
atgtttagaagggttttagttgccaaccgcggcgagattgccgtacggattatccgggcctgccgggaactggatattgaaacggtggccgtttattcagaggctgaccgggattccctgcatacccgcctggccgataaggccgtctgtatcgggccggccccggctaaccgcagctacctgcatattcccagcatcattaccgccgccaggatgagcggagccgacgccattcaccccggttacggtttcctggcggagaatccctacttcgccgagatgtgcgaaacgtcggggattaccttcatcggcccctcgcctcgttccatgcagcttatgggggataaggccacggcccgggcaaccatgatcgccgccggggtgccggtagtccccggctccgagggtgtaatcaaagacctggacgccgccctggcggtagccaaagagataggatacccggtgttgattaaagctgcggccggcggtggcggccgggggatccgcgtcgcccaggggcccagggagctacgccaggccgtttttaccgcccagcgggaagccgaggccgcctttggaaactcccaggtttacctggagaaatatattgaagaaccgcgccatatagagtttcaaataatcggcgacagggaaggaaatatcatccaccttggggagcgcgactgctccttgcagcggcgcaaccagaaaatcctggaggaggctccttcaggagcccttacccccgaactgcgccaggaaatgggcgccctggccctgaaggccgccagggccgccaattactacagcaccggcacggtagagtttttactggataaatacggccattactattttatagaaatgaatacccgcatccaggtggaacacccggttaccgaggccgtcaccggcatcgacctggttcaggaacagattaaaattgccgccggcgagccgctgcgcctggcccaggaggatgtccagatccgtggccatgccctggagtgccggatcaatgccgaggacccagcccataacttccggccggccccgggccgtattgaacgctatcacgcgccagggggattcggcatccgggtggagagcgctgtttacagcggttacaccatcccgcccttttatgactccttgattgccaaggttattgcctgggccccggacagggaagcagccatcaaccgcatgagcggggctttgaaagaaatggtgattgaaggggtgcctactaccattccctttcaccagcagattatggccaatgcctttttccggcgcggggagatctacaccaacttcatccagcgccgcttaatggccggttaa

SEQ ID NO: 9797 - protein, 448 aa, Moorella thermoacetica ATCC 39073
MFRRVLVANRGEIAVRIIRACRELDIETVAVYSEADRDSLHTRLADKAVCIGPAPANRSYLHIPSIITAARMSGADAIHPGYGFLAENPYFAEMCETSGITFIGPSPRSMQLMGDKATARATMIAAGVPVVPGSEGVIKDLDAALAVAKEIGYPVLIKAAAGGGGRGIRVAQGPRELRQAVFTAQREAEAAFGNSQVYLEKYIEEPRHIEFQIIGDREGNIIHLGERDCSLQRRNQKILEEAPSGALTPELRQEMGALALKAARAANYYSTGTVEFLLDKYGHYYFIEMNTRIQVEHPVTEAVTGIDLVQEQIKIAAGEPLRLAQEDVQIRGHALECRINAEDPAHNFRPAPGRIERYHAPGGFGIRVESAVYSGYTIPPFYDSLIAKVIAWAPDREAAINRMSGALKEMVIEGVPTTIPFHQQIMANAFFRRGEIYTNFIQRRLMAG

SEQ ID NO: 9798 - DNA, 1368 bp, Burkholderia thailandensis E264
  CDS (1)..(1368): transl_table=11
atgtttgaaaaaatcctcattgccaaccgcggggaaatcgcgctgcgcattcagcgcgcgtgccgtgagctcggcgtcaagacggtggtcgtctattccgaggccgacaaggaagccaagtacgtgaagttagccgacgaagcggtctgtatcggccccgctccgtcgaatctgagctatctaaacatgccggccctgatcagcgcggccgaagtcaccgacgccgaggcgatccacccgggctacggcttcctgtcggaaaacgccgatttcgccgagcgtgtcgagcagtcgggcttcacgttcatcggtccgcgcccggacacgatccgcatgatgggcgacaaagtcaccgcgaagcagacgatgatccgcaccggcgtgccctgcgtgccgggctcggacggcgcgttgccggatgatccgaaggagatcgtgaaaattgcgcgctcggtcggctatccggtgatcatcaaggcggcgggcggcggcggcggacgcgggatgcgcgtcgtccacaccgaagcggcgctcgtgaacgcggtcaacatgacgcgcgaggaagcgggccgcgcgttcggcaatccgcaggtctatatggagaagttcctcgaaaatccgcgccacatcgagatccaggtgctctccgattcgcacaagaacgcggtctggctcggcgagcgcgactgctcgatgcagcgccgtcaccagaaggtgatcgaggaagcgcccgcgcccggcatcgcacgccgcctgatcgaccggatcggcgaccgctgcgcggacgcgtgcaagaagatgggctacctcggcgcgggcacgttcgagttcctgtacgagaacaacgagttctacttcatcgagatgaacacgcgcgtgcaggtcgagcatccggtgacggagctgatcacgggcgtcgacatcgtccaggaacagatcaagatcgccgcgggcgagaagctgtcgttccgccagcgcgacatccagttccgcggccacgcgatcgaatgccggatcaacgccgaagatccgttcaagttcacgccgtcgccgggccggatcacgtcttggcacacgccgggcggcccgggcatccgcgtcgattcgcacgcgtacaatggctacttcgtcccgcccaactacgattcgatgatcggcaagctgatcgcctacggcgcgacgcgcgagcaggcgatcaaccggatgcgcatcgcgctgtcggaaatggtggtcgaaggcatcctgaccaacatcccgctgcatcgcgagctgatgctcgactcgaagttcgtcgaaggcggcccgagcatccactatctcgagaaccggctcgcgcagaagctgcaggccgcgccggaagaagcgtaa

SEQ ID NO: 9799 - protein, 455 aa, Burkholderia thailandensis E264
MFEKILIANRGEIALRIQRACRELGVKTVVVYSEADKEAKYVKLADEAVCIGPAPSNLSYLNMPALISAAEVTDAEAIHPGYGFLSENADFAERVEQSGFTFIGPRPDTIRMMGDKVTAKQTMIRTGVPCVPGSDGALPDDPKEIVKIARSVGYPVIIKAAGGGGGRGMRVVHTEAALVNAVNMTREEAGRAFGNPQVYMEKFLENPRHIEIQVLSDSHKNAVWLGERDCSMQRRHQKVIEEAPAPGIARRLIDRIGDRCADACKKMGYLGAGTFEFLYENNEFYFIEMNTRVQVEHPVTELITGVDIVQEQIKIAAGEKLSFRQRDIQFRGHAIECRINAEDPFKFTPSPGRITSWHTPGGPGIRVDSHAYNGYFVPPNYDSMIGKLIAYGATREQAINRMRIALSEMVVEGILTNIPLHRELMLDSKFVEGGPSIHYLENRLAQKLQAAPEEA

SEQ ID NO: 9800 - DNA, 1461 bp, Syntrophus aciditrophicus SB
  CDS (1)..(1461): transl_table=11
atggctgttacaaagaaaaagataaagaaggttctgattgccaacagaggtgagattgctctgcgaatcctccggacagtcaaggaactttccatggatagtgtcgtgatctatgaaaagccggacagcgaagcgtattatatccgtcttgccgacgacgctatcatgattggtgatggaccacggaaggattatctggatatcgataagatcatctgggcagcccggaaaagcggtgcggatgccattcatcccggctatgggtttctgtcggaaattccggaattttccgcggaatgtgcgcgggccgggattgtttttattggtccgcctcccgatgtcatccgcaatctgggtaataaagtcgtagcccgggatataatcgagaaggcgaaccttccctttattccgggaacaaaagatttattccgcggtgatgccggacttcgggaagctattgcctttggacgccgttatggttaccccgtgatgctgaaggcttcttcagggggtggtggccgtgggatcaggaaggtcatcaacgaggccgacctcgagattcagctgccccaggcgagagcggaggcactttccgcgttcggcgacgaaaacgtctatgtggaaaaatgcatcgaagcaccgcggcatgtggaaatacagatccttgccgactcttacggtaatgtcattcacctgggctcgcgggactgttccatccagagacgtcatcagaaactcctggaaatcgcaccggcagatcttccccctgacgtgctcaatgccatgtacggcgccgctatcgaagcagccagagtcgcgggatatgtcaatgccggaacggtcgagtttcttgtcgattcccgaacgaatgaattctggttcatggagatgaatacccgccttcaggttgagcatacggtgacggaagaattgaccggcgtggatatcgtccgggaacagatccggattgccgaaggtgagcatctgagtattcccctggaaagaattcatttaatgggtaaggctgttcaggtccggattaatgctgaagatcccaagaacaatttcatgccggaagggggaaaaagggtggaagtttatcagtccgccggcggtccgggagtgcgacttgatggcctggtttatcagggatataaaattcccacggaatacgattcgctgatggtgaaaatgaccgttcgcggattcaactgggagcagactattcaaagactgaaaagatccctcgaggggtttctcattgtcgggctcaaaagcacggtgccattttatcttgcgatctgtgacgaacccgatttccaggcggggaaattcgataccagttacatcgaaacgcaccctgaaattttcaattaccctgaagcagagcgggaaattgcaaaactttcaaggcttatcgccgaaacgcacgcaaagaagatcaatccttatgcctattag

SEQ ID NO: 9801 - protein, 486 aa, Syntrophus aciditrophicus SB
MAVTKKKIKKVLIANRGEIALRILRTVKELSMDSVVIYEKPDSEAYYIRLADDAIMIGDGPRKDYLDIDKIIWAARKSGADAIHPGYGFLSEIPEFSAECARAGIVFIGPPPDVIRNLGNKVVARDIIEKANLPFIPGTKDLFRGDAGLREAIAFGRRYGYPVMLKASSGGGGRGIRKVINEADLEIQLPQARAEALSAFGDENVYVEKCIEAPRHVEIQILADSYGNVIHLGSRDCSIQRRHQKLLEIAPADLPPDVLNAMYGAAIEAARVAGYVNAGTVEFLVDSRTNEFWFMEMNTRLQVEHTVTEELTGVDIVREQIRIAEGEHLSIPLERIHLMGKAVQVRINAEDPKNNFMPEGGKRVEVYQSAGGPGVRLDGLVYQGYKIPTEYDSLMVKMTVRGFNWEQTIQRLKRSLEGFLIVGLKSTVPFYLAICDEPDFQAGKFDTSYIETHPEIFNYPEAEREIAKLSRLIAETHAKKINPYAY

SEQ ID NO: 9802 - DNA, 1353 bp, Frankia sp. CcI3
  CDS (1)..(1353): transl_table=11
atggtcaccaccgtcctgatcgccaaccggggcgagatcgctctgcgggtcctgcgtacctgccgggagctcggcctgcgcaccgtcgccgtctactcggccgacgaccgcggcagcatggtgacccggctcgccgaccgggccgtccagatcggtccgggccccgccggccgcagctacctcaacatcccgacgatcatcgaggccgcccggctcgccggcgcggacgccatccatcccggatacggattcctttccgagaacgcggacttcgcggaggtctgcgagtccgagggcatcaccttcgtcggaccgcccgcctcggtcatggagaagctcggggacaaggccgtcgcccgctcgctgatggttgccgcgggccttccgctgctgcccggaagccacaccgcgatcgaccacgcggacgaggcagaggtgttcgccgacaggatcggctatcccgtgatcatcaaggccgccgccggcggcggcggtcgggggatgcgcatcgtcgagcagcccgaggagttcctgcgcgcctacaccgagacccgggctggcgcgcaggccgtcttcggcgacgggcgggtgtacgtcgagcggtacctgccctcggcccggcacgtggagatccaggtgctctgcgaccagtacggcaacggcgtgtacctgggggcccgggactgctcggtgcagcggcgccaccagaagctcatcgaagagacgccggcgccctgcctgcccgcggacctcatcgaggagatggggcgggccgcgctgcgcggggtcgccacggcgggctacgtcggcgcgggcaccgtcgagttcctggtcgacccggccggtgcgtactacttcatggaggtcaactgccggctgcaggtggagcatccggtgacggagatggtgaccggcatcgacctcgtcgccgagcagttccggatcgccgcgggggagaaactcgacctcacccaggacgcggtcgtcccgcgcggcgtcgcgatcgagtgccgcgtcaacgccgaggacccggtccggggattcgcccccgcgcccggaacgctcacggagtgccatttccccggcgggcccttcgtccgggtggacagccacgcgcaccccggctaccggataccgacccggtacgactccctgctggcgaaggtggtcgcctgggcgccggatcgcgacggcgcggtccggcggatgcgctcggccctgtcagagctgcgcatcgagggaccgggcgtggccacgaccgtgcccttcctcctgcgggtgctcgacgattcccggttccggaccgcgactcacgacacctctctcgtcgccgcgctcacctcgaccggctga

SEQ ID NO: 9803 - protein, 450 aa, Frankia sp. CcI3
MVTTVLIANRGEIALRVLRTCRELGLRTVAVYSADDRGSMVTRLADRAVQIGPGPAGRSYLNIPTIIEAARLAGADAIHPGYGFLSENADFAEVCESEGITFVGPPASVMEKLGDKAVARSLMVAAGLPLLPGSHTAIDHADEAEVFADRIGYPVIIKAAAGGGGRGMRIVEQPEEFLRAYTETRAGAQAVFGDGRVYVERYLPSARHVEIQVLCDQYGNGVYLGARDCSVQRRHQKLIEETPAPCLPADLIEEMGRAALRGVATAGYVGAGTVEFLVDPAGAYYFMEVNCRLQVEHPVTEMVTGIDLVAEQFRIAAGEKLDLTQDAVVPRGVAIECRVNAEDPVRGFAPAPGTLTECHFPGGPFVRVDSHAHPGYRIPTRYDSLLAKVVAWAPDRDGAVRRMRSALSELRIEGPGVATTVPFLLRVLDDSRFRTATHDTSLVAALTSTG

SEQ ID NO: 9804 - DNA, 1347 bp, Novosphingobium aromaticivorans DSM 12444
  CDS (1)..(1347): transl_table=11
atggccatcaagcgcctgctgatcgccaatcgcggcgagatcgcgctgcgcatccatcgcgcggctcacgaaatgggcatcgagacggtcgcggtgcactccaccgccgatgccgatgcgatgcacgtgcgccttgccgaccatgcggtctgcatcggcccgcccgccgcgaaggacagctatctcaacgtcgccgcgatcatctcggctgccgagatcacccatgccgacgcgatccatccgggctacggcttcctttcggaaaacgccaagttcgcggaaatcgtcgaagcgcacggtatcacctgggtcggtcccaagccagaacacatccgcacgatgggcgacaaggtcgaggccaagcgcaccgcgggcgcgctcggcctgccgctggtccccggttccgacggcgcggtgtccgaaatcgacgaggccaagaagatcgccgatgccatcggctatccggtgatcatcaaggcagcctcgggcggcggcggtcgcggcatgaaggtttgcaacagcgccgaccagctcgaaacgctgatgcagcaagccggcagcgaggcgaaggccgcgttcggcgatgccaccgtctatatcgagaagtatctcggcaacccgcgccacatcgaattccagatcttcggtgacggcaacggcaacgcgatccacctgggcgagcgcgactgctcgctccagcgccgccaccagaaggtgctcgaggaagcgccctcgcccgtcatctcggccgacgaacgtgcgcgcatgggcggcatcgtcgccaaggccatggccgacatggggtatcgcggcgcgggcacgatcgagttcctgtgggagaacggcgagttctacttcatcgagatgaacacccgccttcaggtggaacatccggtgaccgaggcgatcaccggcgtcgacctggtgcgcgaacagatccgcattgccgatggcaagccgctttcggtcacgcaggacgagatcgagttcaagggacacgcgatcgagtgccgcatcaatgcggaagacccgttcacatttgccccctcgccgggactggtgaagagctatcacgcagcgggcggcatgcacgtgcgcgtcgattcaggtctctacgccgggtacaagatcccgccgtactatgactcgatgattgccaagctgatcgtctacggccggacccgcgaaggctgcatcatgcggctgaagcgcgcgctcgaggaaatggtgatcgaaggccccaagacctcgatcccgctccaccagcgcctgctgagccagcccgacttcctcagcggcgactacacgatcaagtggctcgaggaatggctggccaaggacgcctga

SEQ ID NO: 9805 - protein, 448 aa, Novosphingobium aromaticivorans DSM 12444
MAIKRLLIANRGEIALRIHRAAHEMGIETVAVHSTADADAMHVRLADHAVCIGPPAAKDSYLNVAAIISAAEITHADAIHPGYGFLSENAKFAEIVEAHGITWVGPKPEHIRTMGDKVEAKRTAGALGLPLVPGSDGAVSEIDEAKKIADAIGYPVIIKAASGGGGRGMKVCNSADQLETLMQQAGSEAKAAFGDATVYIEKYLGNPRHIEFQIFGDGNGNAIHLGERDCSLQRRHQKVLEEAPSPVISADERARMGGIVAKAMADMGYRGAGTIEFLWENGEFYFIEMNTRLQVEHPVTEAITGVDLVREQIRIADGKPLSVTQDEIEFKGHAIECRINAEDPFTFAPSPGLVKSYHAAGGMHVRVDSGLYAGYKIPPYYDSMIAKLIVYGRTREGCIMRLKRALEEMVIEGPKTSIPLHQRLLSQPDFLSGDYTIKWLEEWLAKDA

SEQ ID NO: 9806 - DNA, 3453 bp, Staphylococcus aureus subsp. aureus NCTC 8325
  CDS (1)..(3453): transl_table=11
ttgaaacaaataaaaaagttacttgttgctaaccgtggagaaattgcaattcgtatattcagagcggcggcagaattagacatcagcacagttgcaatttattcgaatgaagacaaaagttcattacatagatataaagcagatgaatcctatttagttggaagtgatttaggtcctgctgaaagttatttaaatattgagcgtatcattgatgtagcaaaacaagcgaatgtggatgcgattcatcctggctatggatttttaagtgaaaatgaacaatttgcgcgtcgttgtgcagaagaaggaattaaatttattggtcctcatttagaacatttagatatgtttggagataaagttaaagctcgtacaacggctatcaaggcagatttaccagttattcctggtacagacggtccaattaaatcatatgaattagcaaaagaatttgcagaagaagctggtttcccgctaatgattaaagccacaagtggtggcggcggtaaaggtatgagaatcgttcgtgaagaaagtgaattagaagatgctttccatagagcaaaatcagaagctgaaaaatcatttggtaatagtgaagtttacatagaaagatacattgataatccaaagcatattgaagtacaagtcataggtgacgaacatggaaatatcgtacacttatttgaacgtgattgttcagtacaacgtcgtcatcaaaaagttgtagaagttgcaccatcagttggattatcatcaacattacgtcaacgtatttgtgatgctgcaattcaattgatggaaaatattaaatatgtcaatgcaggtactgttgaatttctagtatctggtgacgaattcttctttatagaagttaaccctcgtgtacaagtagagcatacaattacagagatggtaacaggaattgatattgttaagacacaaattttagttgcagcaggtgccgatttatttggtgaagagattaatatgccgcaacaaaaagatattacaacattaggctatgccatccaatgtcgtattacaacagaagatccgttaaatgatttcatgccggatactggaacaatcattgcttatcgttcaagcgggggctttggtgtacgtcttgatgctggagatggtttccaaggtgctgagatatcaccttattatgattcattactcgtaaaattatctacacacgcgatatcatttaaacaagcagaagaaaaaatggtacgctcattacgagaaatgcgtattcgtggtgttaaaactaatattccattcttaattaatgtaatgaagaataaaaagttcacaagtggtgattacacaactaaatttattgaagaaacaccagaacttttcgacattcagccgtctctagatagaggtactaaaacattagaatatataggtaatgtaacaattaatggtttcccaaatgttgagaaacgtccgaaaccagactatgaattagcatcaattccaactgtatcttcaagtaaaatcgcttcatttagtggtacgaaacaattgcttgatgaagtaggtccaaaaggtgtagctgaatgggttaaaaagcaggatgatgtcttactaacagatacaacctttagagatgcacaccaatcattattagctacacgagttagaactaaggatatgattaatatcgcatccaaaacagcggacgtatttaaagatggtttctcactagaaatgtggggcggtgctacatttgatgtggcatataatttcttgaaggaaaacccatgggaacgacttgaacgtctacgtaaagctattccaaatgtattattccaaatgttgttacgtgcttcaaacgcagttggttataaaaactatcctgataatgttattcataaattcgtacaagaaagtgctaaagcaggcatagatgtctttagaattttcgattcattaaactgggtagatcaaatgaaagttgccaatgaagcagtacaagaagcgggcaaaatctcagaaggtactatttgttatacaggtgacattttaaatcctgagcgatcaaacatttatactttagagtattatgtcaaactagctaaagagttagaacgtgaaggtttccatattttagcgattaaagatatggcaggcttattaaaacctaaagccgcttacgaattgattggtgagttaaaatcagctgtagatttaccaattcatcttcacactcatgatacaagtggtaatggtttattaacatacaaacaagcaatagatgctggtgtcgatatcattgatactgctgttgcttcaatgagtggtttaacaagtcagccaagcgccaattcgttatattatgcattaaatggcttcccacgccaccttagaactgatattgaaggtatggagtcacttagtcattattggtcaactgtacgtacttattattcagactttgaaagtgatatcaaatcaccgaatactgaaatttatcaacatgaaatgcctggtggacagtattcgaatttaagtcaacaagctaaaagtttaggtttaggcgaaagatttgatgaagtcaaagatatgtatcgcagagtgaatttcttatttggtgatatcgtaaaagtaacaccatcgtctaaagtagttggtgatatggcactttatatggtacaaaatgatcttgatgaacaatccgtgattacagatggctataaattagatttcccagaatcagtagtgtcgttcttcaaaggtgaaataggacaacctgtaaatggttttaataaagatttacaagcggttattttaaaaggccaagaagcactaacagctcgtccaggtgaatatctagagccagttgattttgaaaaagtccgtgagttgcttgaagaagagcaacaaggtcctgttacggagcaagatattattagttatgtactatatccaaaagtatatgaacaatatattcaaactagaaatcaatacggaaacttatcgttacttgatacgcctacattcttctttggaatgcgtaatggtgaaacagtagaaatcgaaatcgataaaggtaaacgattaattattaaactagaaacgattagtgaaccagatgaaaatggtaatagaacgatttactatgcgatgaatggtcaagcgagacgtatttacattaaagatgaaaatgtgcatacaaatgcgaacgttaagccaaaagcagataagagtaatccaagtcatatcggtgctcaaatgccaggttcagtaactgaagtcaaggttagtgtaggtgaaactgtgaaagctaatcagccgttgctaattactgaagctatgaaaatggaaacaacaattcaagcaccatttgacggtgtgattaaacaagtaactgtaaataatggtgacacaatagcgacaggcgatttattaatcgaaattgaaaaagcaactgactaa

SEQ ID NO: 9807 - protein, 1150 aa, Staphylococcus aureus subsp. aureus NCTC 8325
MKQIKKLLVANRGEIAIRIFRAAAELDISTVAIYSNEDKSSLHRYKADESYLVGSDLGPAESYLNIERIIDVAKQANVDAIHPGYGFLSENEQFARRCAEEGIKFIGPHLEHLDMFGDKVKARTTAIKADLPVIPGTDGPIKSYELAKEFAEEAGFPLMIKATSGGGGKGMRIVREESELEDAFHRAKSEAEKSFGNSEVYIERYIDNPKHIEVQVIGDEHGNIVHLFERDCSVQRRHQKVVEVAPSVGLSSTLRQRICDAAIQLMENIKYVNAGTVEFLVSGDEFFFIEVNPRVQVEHTITEMVTGIDIVKTQILVAAGADLFGEEINMPQQKDITTLGYAIQCRITTEDPLNDFMPDTGTIIAYRSSGGFGVRLDAGDGFQGAEISPYYDSLLVKLSTHAISFKQAEEKMVRSLREMRIRGVKTNIPFLINVMKNKKFTSGDYTTKFIEETPELFDIQPSLDRGTKTLEYIGNVTINGFPNVEKRPKPDYELASIPTVSSSKIASFSGTKQLLDEVGPKGVAEWVKKQDDVLLTDTTFRDAHQSLLATRVRTKDMINIASKTADVFKDGFSLEMWGGATFDVAYNFLKENPWERLERLRKAIPNVLFQMLLRASNAVGYKNYPDNVIHKFVQESAKAGIDVFRIFDSLNWVDQMKVANEAVQEAGKISEGTICYTGDILNPERSNIYTLEYYVKLAKELEREGFHILAIKDMAGLLKPKAAYELIGELKSAVDLPIHLHTHDTSGNGLLTYKQAIDAGVDIIDTAVASMSGLTSQPSANSLYYALNGFPRHLRTDIEGMESLSHYWSTVRTYYSDFESDIKSPNTEIYQHEMPGGQYSNLSQQAKSLGLGERFDEVKDMYRRVNFLFGDIVKVTPSSKVVGDMALYMVQNDLDEQSVITDGYKLDFPESVVSFFKGEIGQPVNGFNKDLQAVILKGQEALTARPGEYLEPVDFEKVRELLEEEQQGPVTEQDIISYVLYPKVYEQYIQTRNQYGNLSLLDTPTFFFGMRNGETVEIEIDKGKRLIIKLETISEPDENGNRTIYYAMNGQARRIYIKDENVHTNANVKPKADKSNPSHIGAQMPGSVTEVKVSVGETVKANQPLLITEAMKMETTIQAPFDGVIKQVTVNNGDTIATGDLLIEIEKATD

SEQ ID NO: 9808 - DNA, 1980 bp, Anaplasma phagocytophilum HZ
  CDS (1)..(1980): transl_table=11
atgataaaaaagatactaattgctaataggggggagattgcgtgtaggatagcacgcactgctcgtaagatggggataaagtgtgttggggtgtactcagatgccgatatgggggcgctgcacacgaggtgtgttgatgaagctgtttacattggcccaagtcctgcaagtcaaagttacttggatatagataaaatatgtaatgttgcagtggctacaggagctgacgcggtgcatcctggatatgggttcctttctgagaatgccgagttccctgataggttatctgagagcggcataggctttataggtccttcgtcggcttctatgaggatgatggctgataaggtcgtatcgaaaaagatcgctaaagatgcaggagtagctgttgtccctggatatatgggggttgtagagagcgcagcggaagctttaagcatagctgagtcaatgggttttccagtaatgataaaggctgctgctggtggcggtggtaagggcatgaggattgttcgttctgtaggggagatggaacaggcttttgtgtctgccacaaatgaagctgagaaaagctttagtgactgtaggatattcattgaaaaatacatagagtctcctaggcatatagagattcagataatagctgataagcacggcaatgtggtgtgtctcggagagagagagtgctcaatacagcgtaataatcagaaggttatagaagaaactcctagcccatttttggatgagaagactagacgggcaatgtatgcacagtgtgtgagtttagcagagaaggtgggttatttctccgcgggtactgtagagtttatagttaatgctgagagagagttttattttctagaaatgaacactaggttacaggtcgaacatccggtaactgagctggttacggggatagaccttgtagctgagatgatacatattgccgatggcaagactctttcattttctcaagaggacgtgcgttttgtaggggcagccattgaggcaagggtttatgcagaagaccctagaaaaggctttttgccttcaagtggtagaatatcacattatcatgagcctcctgctagcgtgaatcttaggatagacagtggggtgaccgagggttctgttgtcagcatgttttacgatcctatgatagctaaggtctcgtcctatgctgagactagagtaggggctatagaggttatgaagaagtccctttgtagtttttatgtagaaggtgttgtcaataacatagattttttattatcagttttttgcaagccagctttcgttgcaggagatatcagtactgggtttattgcgcagttttataaatcaggttttgagggtgatgagcttactcctgaaataggtgagattttcgcatttgcactgctgtatatatacttggaagatgaagccaggcagtatggtgagcactggagcatagatggtaaggtatgtgcacgagttggagagcttaagtacttgttgaatgcgcgtcgtgtagatggcaggatctttgctgctttggatggtcaagacgggtatgttgtattatctggggcatggcgcggcaattacaaaatgttggatgtcagcatagacagtaattcatactgcataaaagttaagaggagttccagtaggtatcatctaaggtatatggcggtttctgctgtatgtacggtttgtgaagagaacgtaggtcagtttcttgagttcatgcctgagcctcaggaggatgaaatattgcgtgatgccatagtatcccctatcgcgggtatgatcgttgatatatacgtgaagaagggagataaggtaagcgtaggtcagcctgttctcgtcatagaagctatgaagatggaaaatttgatatgctcggaagtagaggcggaagtagaagaagtgcttctatcgccgggaagcagcgttgctgatggggaaattatattgaagtttgttgcgagttag

SEQ ID NO: 9809 - protein, 659 aa, Anaplasma phagocytophilum HZ
MIKKILIANRGEIACRIARTARKMGIKCVGVYSDADMGALHTRCVDEAVYIGPSPASQSYLDIDKICNVAVATGADAVHPGYGFLSENAEFPDRLSESGIGFIGPSSASMRMMADKVVSKKIAKDAGVAVVPGYMGVVESAAEALSIAESMGFPVMIKAAAGGGGKGMRIVRSVGEMEQAFVSATNEAEKSFSDCRIFIEKYIESPRHIEIQIIADKHGNVVCLGERECSIQRNNQKVIEETPSPFLDEKTRRAMYAQCVSLAEKVGYFSAGTVEFIVNAEREFYFLEMNTRLQVEHPVTELVTGIDLVAEMIHIADGKTLSFSQEDVRFVGAAIEARVYAEDPRKGFLPSSGRISHYHEPPASVNLRIDSGVTEGSVVSMFYDPMIAKVSSYAETRVGAIEVMKKSLCSFYVEGVVNNIDFLLSVFCKPAFVAGDISTGFIAQFYKSGFEGDELTPEIGEIFAFALLYIYLEDEARQYGEHWSIDGKVCARVGELKYLLNARRVDGRIFAALDGQDGYVVLSGAWRGNYKMLDVSIDSNSYCIKVKRSSSRYHLRYMAVSAVCTVCEENVGQFLEFMPEPQEDEILRDAIVSPIAGMIVDIYVKKGDKVSVGQPVLVIEAMKMENLICSEVEAEVEEVLLSPGSSVADGEIILKFVAS

SEQ ID NO: 9810 - DNA, 1356 bp, Francisella tularensis subsp. holarctica
  CDS (1)..(1356): transl_table=11
atgattaaaaaagtactgattgccaatagaggtgaaatagctcttagaattttaagagcttgtagagagttgggaattaagacagtcgctgtgtattctacagctgatgctaaccttatgcatgtcaaactagctgatgaagcagtttgtataggtcctcctgctcctaatcttagttatctaaatatccaagctattataactgccgctgaaattactaatgctgatgcgatacatccaggttatggtttcttatcagaaaatgcaaaatttgctaaagctgttgaagaaagtggctttatatttatcggtccacgtgcagaaagcatagagataatgggcgataaagttgaagctattagatatatgaaaaaagctggtgttccatgtgtgccaggttcaggcggtccattaggcagcgatgaaaagaaaaacttagaaattgctgaaaaaatcggctatccagttattattaaagctgctggtggcggtggcggtcgcggaatgagtatcgttagaaagaaaaaagatcttattagcgctatttctataacaaagagtgaagcgagaatagctttcaataatgatatggtttatatggaaaaattcttagaaaaccctcgccatattgaaattcaagtttttggtgatggtgaaggtaatgccgtatatctatttgaaagagattgttctactcaaagaagacaccaaaaagttattgaagaagctccagcaatcggtctttccgacgaggaaagaaagcgtattggtgagcagtgtgttagcgcatgtaagatattaaaatatcgtggtgctggtacttttgagttcttatatgagaatggtgaattctactttattgagatgaatactagaattcaagtggagcatcctgttactgagtcaataacttctacagatcttatcaaagagcaaatcagagttgctaatggtgaaggtctaagttggaaacaagaagatattgctatagtaggtcatgcaattgagtgtagaataaacgccgaagatcctgaaagaatgattccttcacctggtaagatcgatatgtatcatccgccagcaggacctagagtgcgtgtggactcacatatatattcaggctatgttgttccgccaaattatgactcaatgatagctaaagttatcgtacgtggtcataatagagaaacagcattacagaaaatgcgcgcagctttagaagagatggtgattaatggtattaagacaaacatacctcttcatcaagaaattctaaataatgaagattttattaagggtagaactaatatccatttcttagagaaattcttagaacaaaaaaacaaagctaaataa

SEQ ID NO: 9811 - protein, 451 aa, Francisella tularensis subsp. holarctica
MIKKVLIANRGEIALRILRACRELGIKTVAVYSTADANLMHVKLADEAVCIGPPAPNLSYLNIQAIITAAEITNADAIHPGYGFLSENAKFAKAVEESGFIFIGPRAESIEIMGDKVEAIRYMKKAGVPCVPGSGGPLGSDEKKNLEIAEKIGYPVIIKAAGGGGGRGMSIVRKKKDLISAISITKSEARIAFNNDMVYMEKFLENPRHIEIQVFGDGEGNAVYLFERDCSTQRRHQKVIEEAPAIGLSDEERKRIGEQCVSACKILKYRGAGTFEFLYENGEFYFIEMNTRIQVEHPVTESITSTDLIKEQIRVANGEGLSWKQEDIAIVGHAIECRINAEDPERMIPSPGKIDMYHPPAGPRVRVDSHIYSGYVVPPNYDSMIAKVIVRGHNRETALQKMRAALEEMVINGIKTNIPLHQEILNNEDFIKGRTNIHFLEKFLEQKNKAK

SEQ ID NO: 9812 - DNA, 1371 bp, Desulfitobacterium hafniense Y51
  CDS (1)..(1371): transl_table=11
ttgaataatgaggagataggcagcatgtttaaaaaggtattaatagccaatcggggagaaattgccttacggatcatcagagcctgccgggagatggacattgagaccgtggccgtcttttccgaggcggatcgggatgccctgcatgtccgggaagcggatcaggccgtctgtatcggtccccatccttcgactaagagttatttaaatatccccaatatcatcagcgctgctgagttaaccggtgtggatgctattcaccccggttatgggttcttatcggagaatgcacggttcgccgagatttgtgagtcctgtggtataacctttatcggtccctcgccgcgagccattgaaaccatgggggataaggccacggcgcgcaagactatgatcgaggcgggagttccggtggttcccgggtccaaagaagtgctcaccgatgtggaatccgcctcagttctggccaaggagattggctaccccgtcatgatcaaagcctcagcaggaggcgggggtaaagggatgcgcattgcccaaaaccccaaagagctggctaaatctattcaagctgcccaaagcgaggctcaggctgcttttggcaattcggagatttatctggagaagtacgtggaggaacctcgtcatatcgagtttcaaattttagcggataaacacggcaatgtgatccatctcggagagcgggactgctccctgcaaagaagaaatcagaaattgctggaggaggctccttccagcgcccttacccctgaactgcgtaaagctatgggagaagctgcagtaaaggctgccaaggccgctgattattccagtgccggaaccatcgaatttcttttagataagcatggacattactatttcattgaaatgaatacccgtattcaggtggagcacccggtgactgagtttgtaacaggaattgatctgctgaaggctcagattcgcgttgctgcgggagagcctttggggattgaacaggaagatgtgcaaattcgcggctgggctatggagtgccgcatcaatgctgagaactcggaaaagaactttatgccctctccgggaaccattgagttctatcacccgcccggcggtcccggggttcgggtggacagtgccgcttatcaaggctacaccatccctccctattatgattccatgatcggcaaattgatcgtctggggtgctgaccgggaagaagcgatccaaagaatgaagcgtgctttggaagagttttatattgaaggagtacacaccaccattcccttccatcttaaagtactggataatgcctttttccgccgtggggaagtctatactaactttatccaaaggcggattttaggggaatag

SEQ ID NO: 9813 - protein, 456 aa, Desulfitobacterium hafniense Y51
MNNEEIGSMFKKVLIANRGEIALRIIRACREMDIETVAVFSEADRDALHVREADQAVCIGPHPSTKSYLNIPNIISAAELTGVDAIHPGYGFLSENARFAEICESCGITFIGPSPRAIETMGDKATARKTMIEAGVPVVPGSKEVLTDVESASVLAKEIGYPVMIKASAGGGGKGMRIAQNPKELAKSIQAAQSEAQAAFGNSEIYLEKYVEEPRHIEFQILADKHGNVIHLGERDCSLQRRNQKLLEEAPSSALTPELRKAMGEAAVKAAKAADYSSAGTIEFLLDKHGHYYFIEMNTRIQVEHPVTEFVTGIDLLKAQIRVAAGEPLGIEQEDVQIRGWAMECRINAENSEKNFMPSPGTIEFYHPPGGPGVRVDSAAYQGYTIPPYYDSMIGKLIVWGADREEAIQRMKRALEEFYIEGVHTTIPFHLKVLDNAFFRRGEVYTNFIQRRILGE

SEQ ID NO: 9814 - DNA, 1341 bp, Saccharophagus degradans 2-40
  CDS (1)..(1341): transl_table=11
atgttcgataaagtccttatcgcaaaccgcggcgaaattgcgctgcgtattctgcgtgcatgtaaggagctggatataaaaaccgtggcggtatactccaaagccgaccgcgacctgaagcacgtgcgccttgccgatgaatctgtatgcattggcccacacccttctaccgccagctacttaaacatccccgctattattgcggccatggaaatcaccgattctgttgccgtgcacccaggctatggttttctagctgaaaacgccgactttgcagagcaagtgcaaaaaagtggttttacgtttatagggccagacccagacgtaattcgcatgatgggcgacaaagtgtgcgcaattgaagccatgaaaaaagcaggcgtaccaactgtacccggctctgggggcgccctgcccgacgaccgcgaagaatgcattcgcattggcaaccgcattggcttccctgtaattattaaagctgctgccggtggcggtggtcgcggtatgcgtgttgtacacaccgaatccgcactttggaactccatccagctaaccaaagcagaagcgggcgcagcctttggcgacgacaccgtatacatggagaaatacctgcaaaacccacgtcacgtggaagttcaggtaatgtccgatggccaaggcaacgccgtgcacttttttgaccgcgactgctcactgcaacgtcgccaccaaaaagtattggaagaagctccagcgcctggcatagatatggccatccgcgaagaagtttacgcagcatgcgttaaagcctgtatcgaaattggctatcgcggtgccggtacatttgaattcctttacgaagacggcaacttctatttcattgaaatgaacacccgtattcaggttgaacaccctgtaacagaaatgattactggtttcgaccttattaaagagcaaattcgcgtgtgcgcaggccacaaattaagcgtaacccaagcggacattaagcttaacggtcacgcatttgagtgccgcattaacgctgaagacccaaaaacctttatgccttgcccaggtaaagtggaaaaattccacgcgccaggcggcttgggtgtacgtgtagattctcacctttacggtggctacagcgtaccgccttactacgattcaatgattgccaaaatcattacccacggcgaaacccgtgatattgcactgcgtcgtatgcgtgttgccttagatgagctcgtggtaggtggaattaaaaccaacacagacctgcaaaaagacttggtccgtgacagtgagttcgccaaaggcggtgtaaacattcactacttagagaaaaagcttgggctgtaa

SEQ ID NO: 9815 - protein, 446 aa, Saccharophagus degradans 2-40
MFDKVLIANRGEIALRILRACKELDIKTVAVYSKADRDLKHVRLADESVCIGPHPSTASYLNIPAIIAAMEITDSVAVHPGYGFLAENADFAEQVQKSGFTFIGPDPDVIRMMGDKVCAIEAMKKAGVPTVPGSGGALPDDREECIRIGNRIGFPVIIKAAAGGGGRGMRVVHTESALWNSIQLTKAEAGAAFGDDTVYMEKYLQNPRHVEVQVMSDGQGNAVHFFDRDCSLQRRHQKVLEEAPAPGIDMAIREEVYAACVKACIEIGYRGAGTFEFLYEDGNFYFIEMNTRIQVEHPVTEMITGFDLIKEQIRVCAGHKLSVTQADIKLNGHAFECRINAEDPKTFMPCPGKVEKFHAPGGLGVRVDSHLYGGYSVPPYYDSMIAKIITHGETRDIALRRMRVALDELVVGGIKTNTDLQKDLVRDSEFAKGGVNIHYLEKKLGL

SEQ ID NO: 9816 - DNA, 1350 bp, Methylobacillus flagellatus KT
  CDS (1)..(1350): transl_table=11
atgttcgataaagtccttattgccaaccgtggcgagattgcgctgcgcattcagcgtgcctgccgagagcttggcatcaaaacggtcgccgtccactcagaggctgaccgcgaagccaagtacgtcaagcttgccgacgaatccgtatgcatcggcccagcgccttccagccaaagctatctcaacattcctgccgtcatcagtgcagctgaggtcacggatgcggaagccatccatcctggctatggttttctctccgaaaatgccgattttgcagaacgcgtagagcagagcggcttcacattcatcggtccgcgcgccgagaccatccgcctcatgggcgataaagtcagtgccaaggacaccatgaaagccgcaggagtgccctgcgttcccggctccgaaggggccttgggcgacgataacgatgaaatcctgcgtatcgccaaggatattggttatcccgtcatcatcaaggcagccggtggtggtggtggccgcggcatgcgtgtggtgcatacagaagccgcactgctcaacgccgtcagcatgaccaaggcggaagcccaggccgcattcggcaaccccatggtctacatggagaagttccttgaacagccgcgccatatcgagatccagatactggcagaccagcatggcaacgccatatacctgggtgaacgcgactgctcaatgcaacgccgccaccaaaaggtgctggaggaggcgcctgctttcggcatctcgccgcaattgcgcgagaagatcggcaccgcctgtgccgaggcctgcaaacgcatcaactaccgcggcgccggcactttcgaattcctttacgaaaacggcgagttttatttcatcgaaatgaacacgcgcgtgcaggtagagcatcccgtcacggaaatggtcaccggcattgatatcgtccagcaacaaattctgattgcagccaataaaaagctcggcatcaagcagaaggatgtcaagatcaccggccactcgatcgagtgtcgtatcaatgcggaagaccctttcaacttcgtgccgtctcccggccgcatcacgacctttcatatgcccggcggccccggcatccgcgtcgacacccatgcgtatcaaggctatatggtgccacccaactacgactccatgatcggcaaactgatcgcctatggcgacacgcgtgaacaggccattgcacgcatgcagatcgccttatcggaaatggtgatcgaaggcatcaaaaccaatgtggccctgcacaaggaactgcttgccgatacagcattccatcaaggcggcaccagcatccactatctggaacaaaaactgggtatagcaagtaagtaa

SEQ ID NO: 9817 - protein, 449 aa, Methylobacillus flagellatus KT
MFDKVLIANRGEIALRIQRACRELGIKTVAVHSEADREAKYVKLADESVCIGPAPSSQSYLNIPAVISAAEVTDAEAIHPGYGFLSENADFAERVEQSGFTFIGPRAETIRLMGDKVSAKDTMKAAGVPCVPGSEGALGDDNDEILRIAKDIGYPVIIKAAGGGGGRGMRVVHTEAALLNAVSMTKAEAQAAFGNPMVYMEKFLEQPRHIEIQILADQHGNAIYLGERDCSMQRRHQKVLEEAPAFGISPQLREKIGTACAEACKRINYRGAGTFEFLYENGEFYFIEMNTRVQVEHPVTEMVTGIDIVQQQILIAANKKLGIKQKDVKITGHSIECRINAEDPFNFVPSPGRITTFHMPGGPGIRVDTHAYQGYMVPPNYDSMIGKLIAYGDTREQAIARMQIALSEMVIEGIKTNVALHKELLADTAFHQGGTSIHYLEQKLGIASK

SEQ ID NO: 9818 - DNA, 1386 bp, Burkholderia xenovorans LB400
  CDS (1)..(1386): transl_table=11
atgagtcgaaaacccgctatgtttgaaaaaatcctcattgccaatcgtggcgagatcgcgcttcgtatccagcgcgcctgccgcgagcttggcgtcaagaccgtcgtcgtctattcggaagccgacaaggaagccaaatacgtgaagctcgccgacgaggcggtctgtatcggcccggcgccttcgaacctgagctacctgaacatgcccgcgctgatcagcgcggcggaagtgaccgacgccgaagcgatccaccccggctacggcttcctctcggaaaacgccgacttcgccgaacgtgtcgaacagtccggcttcaccttcatcggcccgcgcccggaaaccatccggatgatgggcgacaaggtcacggccaagcagaccatgatcaagaccggcgtgccgtgcgtgccgggctcggaaggcgcgttgccggaagatccgaaagagatcgtgaagattgcccgccaggtcggctatccggtcatcatcaaggccgcgggcggcggcggcggccgcggcatgcgcgtggttcacacggaagccgcgctcgtcaacgcagtcaacatgacgcgcgaagaagccggccgcgcgttcggcaacccgcaggtctacatggagaaattcttggagaacccgcggcacatcgaaattcaggtgctggccgactcgttcaagaacgcagtctggctgggcgagcgtgactgctcgatgcagcgccgtcaccagaaagtgatcgaagaagcgccggcgccgggtatcgcgcgccgcctgatcgaccgcatcggcgatcgttgcgcggacgcctgcaagaagatgggctatctcggcgcgggcacgttcgagttcctgtatgagaacggcgagttctacttcatcgagatgaacacgcgcgtgcaggtcgagcacccggtgaccgaactgatcacgggcgtcgacatcgtgcaggaacagatccgcatcgcggccggcgaaaaactcgccttccgtcagcgcgatatcgtgttcaagggtcacgcgatcgaatgccggatcaacgcggaagatccgttcaagttcattccgtcgccgggacgcctgacgtcgtggcatatgccgggcggccccggcatccgcgtcgactcgcatgcctacaatggctacttcgtgccgccgaactacgattcgatgatcggcaagctgatcgcctacggcgcgacgcgcgagcaggcgatcaagcgcatgcgcatcgcgctgtcggaaatggtggtggaaggcattcagaccaacatcccgttgcaccgcgagctgatgctggacgcgaagttcgtcgaaggcggcaccagcattcactacctcgaaaaccggttggccgcgaagcagcaggccgcgccggaagaagcgtaa

SEQ ID NO: 9819 - protein, 461 aa, Burkholderia xenovorans LB400
MSRKPAMFEKILIANRGEIALRIQRACRELGVKTVVVYSEADKEAKYVKLADEAVCIGPAPSNLSYLNMPALISAAEVTDAEAIHPGYGFLSENADFAERVEQSGFTFIGPRPETIRMMGDKVTAKQTMIKTGVPCVPGSEGALPEDPKEIVKIARQVGYPVIIKAAGGGGGRGMRVVHTEAALVNAVNMTREEAGRAFGNPQVYMEKFLENPRHIEIQVLADSFKNAVWLGERDCSMQRRHQKVIEEAPAPGIARRLIDRIGDRCADACKKMGYLGAGTFEFLYENGEFYFIEMNTRVQVEHPVTELITGVDIVQEQIRIAAGEKLAFRQRDIVFKGHAIECRINAEDPFKFIPSPGRLTSWHMPGGPGIRVDSHAYNGYFVPPNYDSMIGKLIAYGATREQAIKRMRIALSEMVVEGIQTNIPLHRELMLDAKFVEGGTSIHYLENRLAAKQQAAPEEA

SEQ ID NO: 9820 - DNA, 1497 bp, Methanococcoides burtonii DSM 6242
  CDS (1)..(1497): transl_table=11
atgttcaagaaagtccttatagcaaacaggggtgagatcgctatccgtataatgcgtgcatgcagggaacttgatgtttccacagttgctgtatattcggatgctgacaagaatgccctttttccaaaatatgcagatgaagcatatcatatcggtccttcaccttcaagccagagttatctgaacatggacaagataatcgaagtggcaaaggagtcgggtgcggaagggatccatcctggatatggtttcctttcagagaatccggttttcgcaaagaagtgtaaggctgctgggatcgtgttcatcggtccttctagtgaggtcattgagaagatgggcagcaagatcgctgcaagaaaacttatgatagaagctggtgttccggtagttccgggatatgacaaggccattgaagatgtggatgaagccctcgagatggctgattccattggttatcctgtgatgataaaagcatctgcaggtggcggtggtattggtatgaaggtcgtctattcaaaggatgagttccagtcttctctggagtctatccaatcggtagcacaatctgcttttggtgatcctactgtgttcattgagaagtatgtggaggaacctcgccacatcgagttccagatacttgcagatagtcatggcaataccgtttatgtatcggacagggaatgttctatacagcgcaggcaccagaagctcatggaagaagctccatctccggtgctgagcccggagctgcgtaagaaaatgggtgaggctgctgtcaaagcggtaaagtccatcggttatgagaatgcaggtactgtcgagttcctttattccaagggagatttctatttcctcgaggtcaatacacgtcttcaggtggagcattgtatcacagagcttgttaccggcctcgatcttgtgaagcagcagttgcatattgcatgtggaaaagaacttcctttcaagcaggaagatatcaagatcacagggcatgcattcgagtgtcgtatcaatgccgaagaccctctcaatgattttgcaccttctccgggtaagatcaccaggtaccgctcaccagggggtccgggtgtacgtatagatagtggtgtctatatgggctatacgatccctcctttctacgattcgatgattgcaaagctttgtacctggggtgagactcgggaagaggctatcagtaggatgaagagagcactttatgagtttgtcattgttggtgtcactaccaatattccattccataaggctgtcctttccaatgaagcgttcgtacgtggggatctgacaactcatttcatcgaagaccataatatccttgaagcagtaaagggagtcgtggaggatgaaaaggaaaaaggtttcactcttgcatctgtacttggtaataattcacgtaagacagcagctgctactgcggtagtcagtgcttatgtaaatgctgcaaaacagcagtcaaatggtcaacagactaaataa

SEQ ID NO: 9821 - protein, 498 aa, Methanococcoides burtonii DSM 6242
MFKKVLIANRGEIAIRIMRACRELDVSTVAVYSDADKNALFPKYADEAYHIGPSPSSQSYLNMDKIIEVAKESGAEGIHPGYGFLSENPVFAKKCKAAGIVFIGPSSEVIEKMGSKIAARKLMIEAGVPVVPGYDKAIEDVDEALEMADSIGYPVMIKASAGGGGIGMKVVYSKDEFQSSLESIQSVAQSAFGDPTVFIEKYVEEPRHIEFQILADSHGNTVYVSDRECSIQRRHQKLMEEAPSPVLSPELRKKMGEAAVKAVKSIGYENAGTVEFLYSKGDFYFLEVNTRLQVEHCITELVTGLDLVKQQLHIACGKELPFKQEDIKITGHAFECRINAEDPLNDFAPSPGKITRYRSPGGPGVRIDSGVYMGYTIPPFYDSMIAKLCTWGETREEAISRMKRALYEFVIVGVTTNIPFHKAVLSNEAFVRGDLTTHFIEDHNILEAVKGVVEDEKEKGFTLASVLGNNSRKTAAATAVVSAYVNAAKQQSNGQQTK

SEQ ID NO: 9822 - DNA, 1434 bp, Ralstonia metallidurans CH34
  CDS (1)..(1434): transl_table=11
atgcgtcagcccgacgcgccgaaagccggtgcgccgggcccgcccctgttctcgcagagagagaccatgtttgataaaattctgatcgcgaaccgcggtgaaatcgcccttcgcatccagcgcgcctgccgcgagctgggcatcaagaccgtggtggtgtactcggaagccgacaaggacgccaagtacgtcaagctggccgatgaagccgtctgtatcggcccggccccgtcgccgctgtcatacctgaacatgccggccatcatctcggccgccgaagtgaccgacgcccaggcgatccacccgggctatggcttcctgtccgagaacgcggacttcgccgagcgcgtggagaaatccggcttcgtgttcatcggcccgacctccgaaaacatccgcctgatgggtgacaaggtgtcggccaagcaggccatgatcaagtccggcgtgccgtgcgtgcccggctccgatggcgcactgcccgacgacccgaaggaaatcctggcaacggcccgtcgcgtgggctaccccgtgatcatcaaggccgctggcggcggcggtggccgcggcatgcgcgtggtgcacaccgaagccgccctgctcaacgccgtcaacatgacgcgcgaggaagccggccgcgccttcggcaatcccgaggtctacatggagaagttcctcgagaacccgcgccatgtggaaatccagatcctggccgaccagcatcggcaggccatctggctgggcgaacgcgactgctcgatgcagcgccgccaccagaaggtgatcgaggaagcgccggcaccgcacattccgcgccgcctgatcgagcgcatcggcgaccgttgcgccgaggcctgcaagaagatcggctaccgtggcgccggcacgttcgagttcctgtacgagaacaacgagttctacttcatcgagatgaacacgcgtgtgcaggtcgagcacccggtcaccgagatgatcacgggcatcgacatcgtgcaggagcagatccgcatcgccttcggcgagaagctgcgcctccgccagaaggacgtggaactgcgcggccacgcgatcgagtgccggatcaacgccgaggacccgttcaagttcacgccgtcgccgggccgcatcaccgcctggcacatgcccggtggccccggcgtgcgcgtagactcccatgcgtacgacggctacttcgtgccgcccaactacgattcgatgatcggcaagatcatcacgtatggcgcgacgcgtgaccaggccatcgcccgcatgcgcatcgcgctgtcggaaatggtggtggacggcatcctgaccaacgtgccgctgcaccgcgacctgatgctcgacgccaacttcgtggaaggcggcaccagcattcactatctcgaacaccgtctggcccaaaaggccaacgtccagggcgaaaaggcctga

SEQ ID NO: 9823 - protein, 477 aa, Ralstonia metallidurans CH34
MRQPDAPKAGAPGPPLFSQRETMFDKILIANRGEIALRIQRACRELGIKTVVVYSEADKDAKYVKLADEAVCIGPAPSPLSYLNMPAIISAAEVTDAQAIHPGYGFLSENADFAERVEKSGFVFIGPTSENIRLMGDKVSAKQAMIKSGVPCVPGSDGALPDDPKEILATARRVGYPVIIKAAGGGGGRGMRVVHTEAALLNAVNMTREEAGRAFGNPEVYMEKFLENPRHVEIQILADQHRQAIWLGERDCSMQRRHQKVIEEAPAPHIPRRLIERIGDRCAEACKKIGYRGAGTFEFLYENNEFYFIEMNTRVQVEHPVTEMITGIDIVQEQIRIAFGEKLRLRQKDVELRGHAIECRINAEDPFKFTPSPGRITAWHMPGGPGVRVDSHAYDGYFVPPNYDSMIGKIITYGATRDQAIARMRIALSEMVVDGILTNVPLHRDLMLDANFVEGGTSIHYLEHRLAQKANVQGEKA

SEQ ID NO: 9824 - DNA, 1356 bp, Acidobacteria bacterium Ellin345
  CDS (1)..(1356): transl_table=11
atgtttcgaaagatattaattgctaaccgcggcgaaatcgcgctgcgggtgatttgcgcctgcaaggaactcggcatcaagacggtcgccatctacagcgaggccgaccggaattccttgcacgtgcgctttgccgacgaagccatctgcatcggtccgccgcgcctggcggacagctacctgaatatccctgccgtgatcagcgccgctgaaatcgcgaacgtggatgcgatccatcccggctacggcctgctcagcgaaaacgcgaacttcgcggaagtgtgccaggcctgcggcatcgagttcatcggcccgaagccagagaccattcgcctgatgggcgaaaaggaaaaagctcgcgctgcgatgaaggagcatggggtgccgatcctgcccggctccgatggtgtggtggcgaccgaagccgaggcgatggagtgggcgaagaagatcggcttcccggtgattgtgaaggcaaaagcgggaggcggtggacgcggcatgcgcgttatccgcagcgaagaagaacttcctgtccattttgctgccgcaagttcagaagcagcgtcggcgttcggcaatggcgatctctacatggaaaagtttgtcgagcgcccgcgccacatcgagttccagatactcgccgattcgtacggcaatgtggtttcgctcggcgagcgcgagtgttccatccagcggcgtcaccaaaagctgttggaggaagcgccaagcacgcaggtcacaccggagttgcgcgcggaaatcggcggcatcctcgagaagacgctgtcgaagatcggttacatcaacgcgggaaccatcgagttcctgatggatgaagaccgaaagctgtacttcatcgagatgaacacccgcatccaggtcgaacacccggtcaccgagatgacaacggacgtggacctggtgaaagggcagatcatgatcgccgcgggcgcgaagctccaggacgttctgatggggccgatcgtcttccgcgggcacgccatcgagtgccgcatcaacgcggagcatccggagaagttcacgccatctgccggaaagattacggcgttccatacgccgggcggcacgggcgtgcgcgtcgatacgcaccagtacgccgagggcgtcattccgccgtattacgattcgctcatcgcaaagctggtggtgcgcggaaaagaccgcgacgaagcgatctcacgcatggcgcgcgcgctggagatgttcatcgtcgagggcattcacacctcgatcccgctgcaccgcaagatcatggctgacccagatttccgcgccggcaacttcgatacgaagttcatggagcgcttcatgacgcagacccacaaaaagtaa

SEQ ID NO: 9825 - protein, 451 aa, Acidobacteria bacterium Ellin345
MFRKILIANRGEIALRVICACKELGIKTVAIYSEADRNSLHVRFADEAICIGPPRLADSYLNIPAVISAAEIANVDAIHPGYGLLSENANFAEVCQACGIEFIGPKPETIRLMGEKEKARAAMKEHGVPILPGSDGVVATEAEAMEWAKKIGFPVIVKAKAGGGGRGMRVIRSEEELPVHFAAASSEAASAFGNGDLYMEKFVERPRHIEFQILADSYGNVVSLGERECSIQRRHQKLLEEAPSTQVTPELRAEIGGILEKTLSKIGYINAGTIEFLMDEDRKLYFIEMNTRIQVEHPVTEMTTDVDLVKGQIMIAAGAKLQDVLMGPIVFRGHAIECRINAEHPEKFTPSAGKITAFHTPGGTGVRVDTHQYAEGVIPPYYDSLIAKLVVRGKDRDEAISRMARALEMFIVEGIHTSIPLHRKIMADPDFRAGNFDTKFMERFMTQTHKK

SEQ ID NO: 9826 - DNA, 1350 bp, Silicibacter sp. TM1040
  CDS (1)..(1350): transl_table=11
atgtttgacaaaatcttaattgccaaccggggtgagatcgcgctgcgcgtgatccgtgcctgccgcgagatgggcatccaatccgttgcggtgcactccaccgccgacgccgatgccatgcatgtgcgcatggccgatgagtcgatctgcattggcccaccgtcaggcgcccagagctatctgtcgatccccgcgatcatctccgcctgcgaaatttcgggcgctcaggcgatccacccgggctacgggtttctctccgagaacgccaattttgtgcagatcgtcgaggaccacgggctgaccttcatcggcccctccgcagaacatattcgccagatgggcgacaagatcaccgcaaaagacaccgcaaaagcgctcggcattccttgtgtgccgggatctgacggcggtgtgcccgatgtggagaccgcaaaaaaggtcgccgccgaaatgggctatccggtgatcatcaaggccaccgccggtggcggcgggcgcggcatgaaagtggcccagaccgaagcagatctggttcaagcgttccagaccgcgcgctcagaagccaaagcggcctttggcaacgacgaagtctacatggagaaatacctccagcgtccgcgccacatcgagatccaggtctttggtgatggcaaaggcggcggcgtacacctgggcgagcgcgactgctccttgcagcggcgccaccagaaggtctttgaagaggctcccggcccctgcatcaccgaggaagagcgtgccaagatcggcaagatctgcgcggatgcgatcggcaagatgggctactccggtgcgggtaccgtcgaattcctctatgaggatggcgagttctacttcatcgagatgaacacccgcctgcaggtggaacaccctgtgaccgaagccatctttggcgtcgacctggtgcgtgaacagatccgcgttgcctctggcctgccgctctcgttcacgcaggatgatctgatcatcaacggtcacgccatcgaagtgcgcatcaatgccgaaaagctgccgaatttctcgccctgcccgggtaagatcaccgcatatcatgcccccggcggccttggcgtgcggatggattcggcgctttatgacggctactcgatcccgccgtactacgacagcctgatcggcaagctgatcgtccacgggcgcgaccgggaagaggcccttgcgcgtctcagccgctcgctgggcgagctcattgtggacgggatcgataccacggtgccgctgttccacgcgctcttgcaggaaaaagacatccacaccggtgagtacaacattcactggctggaaaaatggcttgaagccaaccttcaggcctga

SEQ ID NO: 9827 - protein, 449 aa, Silicibacter sp. TM1040
MFDKILIANRGEIALRVIRACREMGIQSVAVHSTADADAMHVRMADESICIGPPSGAQSYLSIPAIISACEISGAQAIHPGYGFLSENANFVQIVEDHGLTFIGPSAEHIRQMGDKITAKDTAKALGIPCVPGSDGGVPDVETAKKVAAEMGYPVIIKATAGGGGRGMKVAQTEADLVQAFQTARSEAKAAFGNDEVYMEKYLQRPRHIEIQVFGDGKGGGVHLGERDCSLQRRHQKVFEEAPGPCITEEERAKIGKICADAIGKMGYSGAGTVEFLYEDGEFYFIEMNTRLQVEHPVTEAIFGVDLVREQIRVASGLPLSFTQDDLIINGHAIEVRINAEKLPNFSPCPGKITAYHAPGGLGVRMDSALYDGYSIPPYYDSLIGKLIVHGRDREEALARLSRSLGELIVDGIDTTVPLFHALLQEKDIHTGEYNIHWLEKWLEANLQA

SEQ ID NO: 9828 - DNA, 1386 bp, Myxococcus xanthus DK 1622
  CDS (1)..(1386): transl_table=11
gtgttcaagaaggtgctgatcgccaaccgcggggagattgccctgcgggtcatccgcgcctgccgggagttgggcatcgccacggtcgcggtgcactccacggcggacgccaacgcgctccatgtccgcttcgcagacgaggcggtgtgcatcggcccgccggcgtccaaggagagctacctcaacgtcccgcagctgctgtccgccgccgaaatcacccgcgcggacgccatccacccgggctacggcttcctgtcggagaacgccgagttcgcggaggtctgcgagaactgcaagattcgcttcattggcccccggccggagatgctccggctgatgggcaacaaggtgcgcgcccgccaggccgcgcgcgaggcgggactgccgctgcttccgggcagccccggcaccgtgaaggacccgcgtgaggcggaggccttcgcccgcgagattggcttccccgtcatcctcaaggcggccgctggtggcggcggcaaggggatgaagatcgtccgcgagccgggcgcgctggcgcaggccttctccaccgcccaggcggaggccgtggcgtcgttctccaatggcgacctctacatcgagcgctatgtggagaagccgcgccacatcgaaatccagatcgtcgcggacgagcacggcaacatcgtccacctcaacgagcgtgagtgctcggtgcagcgccgacaccagaagctcattgaagagagtccgtcgccggcgctgacgccggagctgcgcaagcgcatgggcgaggtgtccgtgaacgccatgcgcaggctcgcgtacaacaacgtgggcaccatcgagtacctgctcgacgagcgcggcgagttctacttcatggagatgaacacgcgcatccaggtggagcacccggtgacggagctcgtcacgggcgtggacctggtgagcgagcagatccgcctggcctatggggagcccctgcgcttcacgcaggaggacgtccagattcgtggccacgccatcgagtgccgggtgaacgccgaggacccgattaccttcgccccctggcccgggaagattaccggctacagcgtgccgggcggctacggggtgcgcgtggactcgggcgcctacgagaactacacggtgctgccgtactacgacagcctcctgtcgaagctcatcgtccacgcggaggaccgggctacggccatccgccgcatgcagcgcgccctgggcgaatacgtcgtggaaggcatccgcaccaacatcccgttccaccgggccgcgctcgcggaagagtccttccaggagggcaattacgacacccgtttcgtggagcgcttgctcgcgagcgagacgggctcccggcggctgaagaaggccgtcgaggagacgccgtag

SEQ ID NO: 9829 - protein, 461 aa, Myxococcus xanthus DK 1622
MFKKVLIANRGEIALRVIRACRELGIATVAVHSTADANALHVRFADEAVCIGPPASKESYLNVPQLLSAAEITRADAIHPGYGFLSENAEFAEVCENCKIRFIGPRPEMLRLMGNKVRARQAAREAGLPLLPGSPGTVKDPREAEAFAREIGFPVILKAAAGGGGKGMKIVREPGALAQAFSTAQAEAVASFSNGDLYIERYVEKPRHIEIQIVADEHGNIVHLNERECSVQRRHQKLIEESPSPALTPELRKRMGEVSVNAMRRLAYNNVGTIEYLLDERGEFYFMEMNTRIQVEHPVTELVTGVDLVSEQIRLAYGEPLRFTQEDVQIRGHAIECRVNAEDPITFAPWPGKITGYSVPGGYGVRVDSGAYENYTVLPYYDSLLSKLIVHAEDRATAIRRMQRALGEYVVEGIRTNIPFHRAALAEESFQEGNYDTRFVERLLASETGSRRLKKAVEETP

SEQ ID NO: 9830 - DNA, 1392 bp, Rubrobacter xylanophilus DSM 9941
  CDS (1)..(1392): transl_table=11
atggtagggaaggttctggtcgccaaccgcggggagatagccctccgcgtgatccgggcctgccgggagctgggcctccgcagcgtcgcggtctactccaccgccgacggcgactcgctgcacaggatgctggccgacgaggcggtgtgcataggcccgccgcaggccgccggcagctacctcaacatcccggcgataatctccgccgccgagctcaccggggccgacgcggtgcaccccggctacggctttctggccgagaacgcccgcttcgcggagatctgcgagcgggtgggtctcacctttatcgggccgccctccggggtcatcgcgcgcatgggggacaaggccgcggcccgacgggcggcggaggaggccggggtgcccatcgcccccggctcggacgggccctgctcgggggccggggaggtgaggcgggtgggggcggaggtcggctacccgctcgtcatcaaggccagcgccggcggcgggggcaaggggatgcgggtggtccgctccgaggaggaggtggaggcggccttcgcggacgccgggagggaggccggcgcgagcttcggcgacggctccctgtacgtggagcgctacctggacccgctgcgccacgtggaggtgcaggtgctcgccgacacccacggcaacgtggtcgccttcccggagcgggactgctccgtgcagcgccgctaccagaagctcgtagaggagtcgccggcgccggggctcccgccggaggtgagggaggatctgctctcggcggcccgggacctcgccgcctcgctggggtacgtgggcgcggggaccgtggagttcatctacagcgagggcgagttctactttatcgagatgaacacccggctccaggtggagcacccggtcaccgagacggtgtgcggggtggacctcgtcgccgagcagataaaggtcgcctccggggaggagctggagctgccggggagcgccctctccccgcggggccacgccatcgagttcaggatcaacgccgaggacccgaagcgcaacttcatgccccaggccggccccgtggagttctacaaccccccgggcggccccggggtccgggtggactcccacctgtacgcgggctacagggtccccccgcactacgactcgctgctcgccaagctgatcgtccacggcgagagccgggaggcggcgatccggcgcggggtgcgggccctggacgagttcgccgtctccgggatagagaccaccatcccgctgcacctcgcggtgctggaggacgaggagttccgccggggcggggtgccgaccaggttcctggaggagcggaggctctcgagcgagagcggggttttgcgcctgctgcgggccggggccgcctcctcgctctga

SEQ ID NO: 9831 - protein, 463 aa, Rubrobacter xylanophilus DSM 9941
MVGKVLVANRGEIALRVIRACRELGLRSVAVYSTADGDSLHRMLADEAVCIGPPQAAGSYLNIPAIISAAELTGADAVHPGYGFLAENARFAEICERVGLTFIGPPSGVIARMGDKAAARRAAEEAGVPIAPGSDGPCSGAGEVRRVGAEVGYPLVIKASAGGGGKGMRVVRSEEEVEAAFADAGREAGASFGDGSLYVERYLDPLRHVEVQVLADTHGNVVAFPERDCSVQRRYQKLVEESPAPGLPPEVREDLLSAARDLAASLGYVGAGTVEFIYSEGEFYFIEMNTRLQVEHPVTETVCGVDLVAEQIKVASGEELELPGSALSPRGHAIEFRINAEDPKRNFMPQAGPVEFYNPPGGPGVRVDSHLYAGYRVPPHYDSLLAKLIVHGESREAAIRRGVRALDEFAVSGIETTIPLHLAVLEDEEFRRGGVPTRFLEERRLSSESGVLRLLRAGAASSL

SEQ ID NO: 9832 - DNA, 1344 bp, Mesorhizobium sp. BNC1
  CDS (1)..(1344): transl_table=11
atgttccagaagatcctcatcgccaatcgcggcgagatcgcgctccgggtgctgcgcgcctgtaaggaattgggaattcagaccgtggcggtccattccacggctgatgcggatgccatgcatgtccgccttgcggacgaaagcgtttgtatcggtcctcccgcctcacgcgaaagctatcttaatattcatcagattcttgccgcgtgcgagatcaccggggcggatgcggttcacccgggctacggttttctctccgaaaacgcgaaatttgccgaaatcctggccgcgcacaacgtgaccttcatcggcccctcggccgaacatatccgtactatgggcgacaagatcgaagccaagcgtacggccaagcgattgggcattcctgtcgtgccgggatcggaaggcgcggtgcgcgacgagcgcgaggcgaagcgaatcgccgccgaagttggctatcccgtgctcatcaaggcttcggccggcggcggagggcgcgggatgaaggttgcccgcaacgaagccgggctggcggaggcgcttgcgactgctcgcaccgaggccggcgcagcttttggcgacgacgccgtctatatcgaaaaatatctggaaaagccgcgccacatcgaggttcaggtggtgggggacggcgcccacaatgctgtccatctcggcgagcgcgattgctccctgcagcgccgccaccagaaggtatgggaggaggcaaactcgcccgcgctcaacgtggaacagcgcatgaaaatcggcgagacggtcgcaaatgcgatggccgagctcggctattccggcgcggggaccatagaattcctctatgagaacggcgaattctacttcatcgagatgaacacgcgtcttcaggtggagcatccggtgacggaggcgatcaccgggatcgacctggtgcatgagcagatccgggtagcatcgggcgctggcctttccgtccgtcaggaagaagtgcggtttcatggtcatgccattgaatgccggatcaacgcggaggacccacgcactttcgtcccctcgcccggcacgatcacccattttcatacgccgggcggccttggcgtgcgggtcgattcgggggtctattccggctatcgcattcctccttattacgacagcctcattggcaaactcattgttcatggccgcaaccgcgtagaatgcatgatgcgccttcgccgtgcccttgacgaattcgtcgtggacggcatcaattcaacattgccgctctttcgtgagcttgtgggcaatgttgatgtggcaaacggcgattatgacatccattggctggagaaccatctcgcagccaatgaataa

SEQ ID NO: 9833 - protein, 447 aa, Mesorhizobium sp. BNC1
MFQKILIANRGEIALRVLRACKELGIQTVAVHSTADADAMHVRLADESVCIGPPASRESYLNIHQILAACEITGADAVHPGYGFLSENAKFAEILAAHNVTFIGPSAEHIRTMGDKIEAKRTAKRLGIPVVPGSEGAVRDEREAKRIAAEVGYPVLIKASAGGGGRGMKVARNEAGLAEALATARTEAGAAFGDDAVYIEKYLEKPRHIEVQVVGDGAHNAVHLGERDCSLQRRHQKVWEEANSPALNVEQRMKIGETVANAMAELGYSGAGTIEFLYENGEFYFIEMNTRLQVEHPVTEAITGIDLVHEQIRVASGAGLSVRQEEVRFHGHAIECRINAEDPRTFVPSPGTITHFHTPGGLGVRVDSGVYSGYRIPPYYDSLIGKLIVHGRNRVECMMRLRRALDEFVVDGINSTLPLFRELVGNVDVANGDYDIHWLENHLAANE

SEQ ID NO: 9834 - DNA, 1347 bp, Cytophaga hutchinsonii ATCC 33406
  CDS (1)..(1347): transl_table=11
atgtttaagaaaatattaattgctaacaggggagaaattgcattacgtgtaatccgtgcttgtaaagagcttggaataaaaacggttgctgtatactctgttgcagataaagaaagtttacatgtacgttttgctgatgaagcggtttgtataggacctgctccttcgaatcaatcgtacctgagcataccaaatattattgcagctgctgaaattacaaatgcagatgctattcaccctggttatgggttcttgtctgaaaatgcaaaattctctcaggtgtgtgaagactatggaattaaatttattggtgcaagtgcagcaatgattaattctatgggcgataaagcttctgcaaaagataccatgaaaaaagccggtgtgccatgtattcccggttcggatggtttgttgggttcaatcgaagaaggtatcaaattagcgaataaagtaaagtaccctgtgatcctgaaagctacggctggcggtggtggcagaggtatgcgtattatccgcagcgaccgtgaatttgaaaaagcatgggttgatgcgaaacaggaagctggcgcttcttttggtaacgatggtttgtatttagaaaaattcatcgaagaaccacgccatatagaagttcagttattaggcgataaattcggaacggttgttcacttatctgaaagagattgttctattcagagacgtcaccagaaactgattgaagaaactccttctccgatcattacagaacgcttgcgtactaaaatgggtgaagctgctgtaaaaggtgcaaaatctattaagtatgaaggtgccggtaccattgaattcctggtagacaaacacggtgatttctatttcatggaaatgaatacccgtattcaggttgaacataccattaccgaagaagtaactggtgtggatcttgttaaaatgcagatccgagtggcagcaggcgaaaagcttgaaaagaaaaactacttaccgttacgtcattctattgaatgcagaataaatgcggaagacgctgcaaacggtttccgtccttctccgggcaagatcacgaacttccatatgccgagcggttttggtgtacgtgtagacagccactgttatacaggttatacaatacctcctaattacgattctatgattgctaagctgatcgttaacgcggctacgcgtgatgaagcgtgtgaccgcatgaaacgtgccttacaggagtttgttattgaaggtgtaaaaacaactattccattccatattacgatgatggacgaccctcagttcaggtccgggaagtttacgacagcattccttgagacatttgatttctcaaaaattaaataa

SEQ ID NO: 9835 - protein, 448 aa, Cytophaga hutchinsonii ATCC 33406
MFKKILIANRGEIALRVIRACKELGIKTVAVYSVADKESLHVRFADEAVCIGPAPSNQSYLSIPNIIAAAEITNADAIHPGYGFLSENAKFSQVCEDYGIKFIGASAAMINSMGDKASAKDTMKKAGVPCIPGSDGLLGSIEEGIKLANKVKYPVILKATAGGGGRGMRIIRSDREFEKAWVDAKQEAGASFGNDGLYLEKFIEEPRHIEVQLLGDKFGTVVHLSERDCSIQRRHQKLIEETPSPIITERLRTKMGEAAVKGAKSIKYEGAGTIEFLVDKHGDFYFMEMNTRIQVEHTITEEVTGVDLVKMQIRVAAGEKLEKKNYLPLRHSIECRINAEDAANGFRPSPGKITNFHMPSGFGVRVDSHCYTGYTIPPNYDSMIAKLIVNAATRDEACDRMKRALQEFVIEGVKTTIPFHITMMDDPQFRSGKFTTAFLETFDFSKIK

SEQ ID NO: 9836 - DNA, 1338 bp, Rhodococcus sp. RHA1
  CDS (1)..(1338): transl_table=11
gtgaagcgactcttcattgcaaaccgcggcgagatcgccatccgcatcatgcgtgccgcgcgagagctgggaatagagaccattctggcagtgagcgaagccgatcgaaccggacatccggccacattcagcgacgaggacatctgtgtcgggccgtcgccggcgaccaaaagctatctttcccgcgacgcgatgctcaacgctgcagtgtcgtcgggtgctgacgctgtacaccccggttacggatttctatccgaagacgcctccttcgcacgcgcggtcgtcgacgccggcctcatctgggtcggcccctgcccggagtcgatcgaactgatgggcaacaaggccgccgcacgaggcgcagcgcggtccgccggggtgccgatcatggacggcagtgacgggtccattgctgatctcgaatcgctgcaggcagccgcagagcgtatcggctatccgctgatgatcaaggcgtctgcaggtggcggaggtcgcgggattcgcatcgtccaccgggccgccgatctggaatcggagttcaaaatcgctgcagccgaggcttcggcggccttcggtgactcgtctgtctacctcgagcggtacatcgaacgtgcgcggcatgtcgaggtgcaaattctcgctgacggtagcagggcgatccacttgttcgatcgtgactgctctatgcaacgtcgacagcagaaggtgctcgaagaggctcccgcccccgatatcccttcccaccttcgcgagcagatgttgtcctccgcggtacgactggcagaagcatgccagtaccgcggcgccggaactgtcgagtacctgtacgacgccgaccgcggtgagatctgcttcatcgagatgaacacccgactgcaagtcgagcacccggtgacagaaatgatcacggggatcgatctagtgcgcgaacagctcaagatcgcggacggtgcacctcttgcctaccagcaggaggacatcctcgtgcatggacattccatcgaagcgcggctctgcgctgagaattccgacatgaacttcatgccctcgcccggcctcgtcgaatcagtcacctggccgaccggtccgggggtgcggatcgacagtggcgtcaccgcgggttcgacggtgtcgccctactacgactcgatgttggcaaaactcatcgtctgggactccgaccgaccggcggcaatcgcacgattgaagcgtgccatcgacgagctcgaggtgaacggactgatcactaccaagccgttcctccgtcaactagccgaaagcagcgaattctgctcggtgtcacaccatacgaagttcatcgaacaatcagttctatga

SEQ ID NO: 9837 - protein, 445 aa, Rhodococcus sp. RHA1
MKRLFIANRGEIAIRIMRAARELGIETILAVSEADRTGHPATFSDEDICVGPSPATKSYLSRDAMLNAAVSSGADAVHPGYGFLSEDASFARAVVDAGLIWVGPCPESIELMGNKAAARGAARSAGVPIMDGSDGSIADLESLQAAAERIGYPLMIKASAGGGGRGIRIVHRAADLESEFKIAAAEASAAFGDSSVYLERYIERARHVEVQILADGSRAIHLFDRDCSMQRRQQKVLEEAPAPDIPSHLREQMLSSAVRLAEACQYRGAGTVEYLYDADRGEICFIEMNTRLQVEHPVTEMITGIDLVREQLKIADGAPLAYQQEDILVHGHSIEARLCAENSDMNFMPSPGLVESVTWPTGPGVRIDSGVTAGSTVSPYYDSMLAKLIVWDSDRPAAIARLKRAIDELEVNGLITTKPFLRQLAESSEFCSVSHHTKFIEQSVL

SEQ ID NO: 9838 - DNA, 1356 bp, Trichodesmium erythraeum IMS101
  CDS (1)..(1356): transl_table=11
atgcgtttctctaaaattctaatagccaaccgaggtgaaatagctctgcgtattctgcgcacctgcgaagaaataggcatagctaccattgcagtccactcaaccatagactgccatgccctccatgtgcaactagcagacgaagcagtttgcattggtgaacctactagcagcaaaagctacctcaacatacccaatattatctcggcagctctgactcgcgacgccactgccattcatccagggtatggctttctggcagaaaatgctcgatttgcagaaatctgtgctgaccatgatattacctttattggtccatctccagcaggaattagggccatgggggacaaatctacagccaaagaaaccatgcaaaaagctggagttcctacagttccaggaagcgatggtcttctgacagatgaaaatgaagcagtggcgatcgccgaaaaaattggctttcccctaattatcaaagccacagctggaggaggaggacgagggatgagactggttcgccatcctaatgatctgtccaaattattccaagcagcccaaggagaagcagaagcagcctttggcaacccaggagtttacatggagaaattcattgaacgcccacgtcacattgaatttcaaatattggccgatagttacggaaatgtgattcatttgggagaaagagactgctcaattcaacgtcgccatcaaaaattactagaagaggctccctctccagcattagatcctaaactccggcaaaaaatgggggaagctgcggtcaaggcagccaagtctatcaactatcttggtgctggtactgtagaatttcttctagaccagtcaggtaaattctactttatggaaatgaataccagaattcaagtagaacatccagtcacagaagcaattacaggacttgatttaattgccgaacaaattagaattgcccaaggagaaaaattacagttaacccaaaaacaggtcaagtttaatggtcatgctatagaatgtcgcattaatgccgaagacccagaacacaattttcgcccccatccaggtcgtattagtggatatctaccaccaggaggccctggagtcaggatggactctcatgtttatacagattacgagattccaccctactatgattctttgattggtaaattaatagtttgggggcacaaccgtcccactgctatccagagaatgaaacgtgctttaagggaatgtgctgttacgggagttccaactaccataggttttcatcaaagaattttagaaactcctgaatttgttgatggggaagtctataccaattttgttgaaaatattatgaaccaagacccaaaataa

SEQ ID NO: 9839 - protein, 451 aa, Trichodesmium erythraeum IMS101
MRFSKILIANRGEIALRILRTCEEIGIATIAVHSTIDCHALHVQLADEAVCIGEPTSSKSYLNIPNIISAALTRDATAIHPGYGFLAENARFAEICADHDITFIGPSPAGIRAMGDKSTAKETMQKAGVPTVPGSDGLLTDENEAVAIAEKIGFPLIIKATAGGGGRGMRLVRHPNDLSKLFQAAQGEAEAAFGNPGVYMEKFIERPRHIEFQILADSYGNVIHLGERDCSIQRRHQKLLEEAPSPALDPKLRQKMGEAAVKAAKSINYLGAGTVEFLLDQSGKFYFMEMNTRIQVEHPVTEAITGLDLIAEQIRIAQGEKLQLTQKQVKFNGHAIECRINAEDPEHNFRPHPGRISGYLPPGGPGVRMDSHVYTDYEIPPYYDSLIGKLIVWGHNRPTAIQRMKRALRECAVTGVPTTIGFHQRILETPEFVDGEVYTNFVENIMNQDPK

SEQ ID NO: 9840 - DNA, 1344 bp, Alkalilimnicola ehrlichei MLHE-1
  CDS (1)..(1344): transl_table=11
atgctggaaaagatcgtcattgccaatcgcggcgaaatcgccctgcgggtcctgcgtgcctgccgtcagctcggcatccgcacggtggccgtgcactcgtcggccgatcgtgacctcaagcacgtgcgtctggccgacgagtcggtctgcatcgggccgcccgcctccgccgagagctacctgaacatcccggccatcatcagcgccgccgaggtcacggacgccatggccatccacccgggctatggttttctctccgagaacgccgactttgccgagcgggtggagcagtccggtttcgtgttcatcggcccaaaggcggagaccatccgtatcatgggggacaaggtggccgccatccgcgccatgctggcggcggacatcccctgtgtccccggctccggcggtccgctcaccgatgacgccgatgccaacctgcgcatcgcccgcgagatcggctatccggtgctgatcaaggccgcggccggcggcggcggccgcggcatgcgcgtggtgcgctcggaggccgggctgctgaatgccatttccctcacccagaccgaggcccagtccgcgttcggcgacagcaccgtctatatggagaagtacctggacaacccgcgccacgtggaggtccaggtgctggcggacggtcagggcaacgccatctacctgggcgagcgcgattgctccatgcagcggcgccatcagaaggtggtcgaagaggcgcccgcacccgggatcaccgaggaggagcgccgcttcatcggcgagcgctgcgccgatgcctgccgccagatcaactaccggggggcaggcaccttcgagttcctctaccaggacggcgagtttttcttcatcgagatgaacacccgtctgcaggtggagcacccggtcaccgagatgatcaccggcgtggacctggtcaaggagcagatcctggtggccagtggccagccgctgcgttaccgccaggaggacatcgagatccgcgggcacgcggtggagtgccggatcaacgccgaggatccgcgcagcttcctgccctccccggggactatcgaccagtaccatgccccgggcgggcccggggtgcgggtggattcgcacatctacagcgggtacaaggtgccgccctactacgactccatgatcggcaagctgatcacccatggcgaggaccgcgagagcgccatcgcgcgcatgcgcacggccctgtccgaggtggtgatcagcggcatcaagaccaacatccccctgcaccaggacatcatggatgacgccggcttccaggccgggggcatgaatatccattacctggaaaagaagctgggcctgagttga

SEQ ID NO: 9841 - protein, 447 aa, Alkalilimnicola ehrlichei MLHE-1
MLEKIVIANRGEIALRVLRACRQLGIRTVAVHSSADRDLKHVRLADESVCIGPPASAESYLNIPAIISAAEVTDAMAIHPGYGFLSENADFAERVEQSGFVFIGPKAETIRIMGDKVAAIRAMLAADIPCVPGSGGPLTDDADANLRIAREIGYPVLIKAAAGGGGRGMRVVRSEAGLLNAISLTQTEAQSAFGDSTVYMEKYLDNPRHVEVQVLADGQGNAIYLGERDCSMQRRHQKVVEEAPAPGITEEERRFIGERCADACRQINYRGAGTFEFLYQDGEFFFIEMNTRLQVEHPVTEMITGVDLVKEQILVASGQPLRYRQEDIEIRGHAVECRINAEDPRSFLPSPGTIDQYHAPGGPGVRVDSHIYSGYKVPPYYDSMIGKLITHGEDRESAIARMRTALSEVVISGIKTNIPLHQDIMDDAGFQAGGMNIHYLEKKLGLS

SEQ ID NO: 9842 - DNA, 2007 bp, Hyphomonas neptunium ATCC 15444
  CDS (1)..(2007): transl_table=11
atgttcaagaagatcctgatcgccaatcgcggtgaaatcgccgttcgtgtcatcaagacctgccgcaggctcggcgtcaaaacggtcgtggtttattcggatgcggatgcgggttcgatggcggtcgagatggccgacgagaccgtatatatcgggccttcgccggcggcgcagtcgtatctcgttcaggacaagatcatcgacgcagtgcgccagaccggcgccgaggcgatccatccgggctttggtttcctgtccgagaatgcgggattcgccaaacgcctcgaaaaagagggcatcggctggatcggcccgaatgcgcacgccatcgacgcgatgggcgacaagatttcgtcgaagaagctggccgctgaagccggtgtttcgaccgttccggggcatatggacctcatcaaggacaccaagcacgccgtcgagatcagccgcgagatcggctatccggtgatgatcaaggcgtctgcgggcggcggcggcaagggcatccgcgtggcggccaatgacaaggaagtcgaagaaggcttcccggccgtgaaagccgaagcgaccgcctctttcggcgacgaccggatcttcatcgagaagttcattcttgagccgcgccacatcgaaatccaggtgctgggcgacaagcatggcaactgtatttacctcaacgagcgcgaatgctcgatccagcgccggaaccagaaggtgatcgaggaagcgccctcgccgctgcttgacgccgagacgcgcaagaagatgggcgagcaggctgtggcgctggccaaggctgtgaattatgacagcgccggcactgtggaattcgtcgcctcgggcaaggacaagggcttctacttccttgaaatgaatacccggcttcaggtggagcacccggtgaccgagatgatcacgggcgtggacctggtcgagcagatgctgctgtcggcctatggcgaaaagctgaagatcaagcagtcggacgtgaagatcaatggctgggcggtggagagccgcgtctatgccgaagacccgtatcgcaacttcctgccgtcgattggccgtctgaagcggttccatccgcctgcggaaggcaaagtggcccgcgggactgtgcgcctggattccggcgtgcgtgagggcgacgaaatctcgatgttctatgacccgatgatcgccaagctgatcacgcacgggaaagaccgggacgcggcgctggacgcccatggcgaggcgctggaccggttccacatcgagggcattcaggacaacattccgttcattgccgcagtggtagacgagaagcggttccgctccggcaacatcacgacggcgtatatcaaggacgagttccccgaaggcttccagggcaccgagccgacgccggagcaggaagcgcagctgatctgttcggccgcttatgtgcatgcgttcttctcgcggcgggccgcgcagatttccgatcagatgtcgaaccccgctgccgccatccgcaaggaatgggtggtgatcctgggtgacaagcatcaccccgtcaccatcgacatcggcaaggatggggaagctcagatcacggtcaatggcggcaaggcgcacagctttgttacgcggtggcagccgggccagcatctggttgagggcgtgctggatggcaagccgtttgccgtgaagtttgccgaccggaccgagggctatctgttccgccatcgcggcgtggcgctgcgcgcgctggtgtgtacgccgtttgtggctgacctgcatggccgcctgccggagaagccgaaggcggacacgtccaagctggtgatttcgccgatgccggggctggtggtttcgatggatgtcgagctgggccaggaagtgcaggaaggtgaggcggtctgtatcgtggaagcgatgaagatgcagaacatcatccgcgcgggcgcaaccgggacggtgaaggcgatcaacgtcaaggcgggcgaaagcgttgccgctgacgagatcatggtggagttcgcctga

SEQ ID NO: 9843 - protein, 668 aa, Hyphomonas neptunium ATCC 15444
MFKKILIANRGEIAVRVIKTCRRLGVKTVVVYSDADAGSMAVEMADETVYIGPSPAAQSYLVQDKIIDAVRQTGAEAIHPGFGFLSENAGFAKRLEKEGIGWIGPNAHAIDAMGDKISSKKLAAEAGVSTVPGHMDLIKDTKHAVEISREIGYPVMIKASAGGGGKGIRVAANDKEVEEGFPAVKAEATASFGDDRIFIEKFILEPRHIEIQVLGDKHGNCIYLNERECSIQRRNQKVIEEAPSPLLDAETRKKMGEQAVALAKAVNYDSAGTVEFVASGKDKGFYFLEMNTRLQVEHPVTEMITGVDLVEQMLLSAYGEKLKIKQSDVKINGWAVESRVYAEDPYRNFLPSIGRLKRFHPPAEGKVARGTVRLDSGVREGDEISMFYDPMIAKLITHGKDRDAALDAHGEALDRFHIEGIQDNIPFIAAVVDEKRFRSGNITTAYIKDEFPEGFQGTEPTPEQEAQLICSAAYVHAFFSRRAAQISDQMSNPAAAIRKEWVVILGDKHHPVTIDIGKDGEAQITVNGGKAHSFVTRWQPGQHLVEGVLDGKPFAVKFADRTEGYLFRHRGVALRALVCTPFVADLHGRLPEKPKADTSKLVISPMPGLVVSMDVELGQEVQEGEAVCIVEAMKMQNIIRAGATGTVKAINVKAGESVAADEIMVEFA

SEQ ID NO: 9844 - DNA, 1902 bp, Hyphomonas neptunium ATCC 15444
  CDS (1)..(1902): transl_table=11
gtgaccatcaccaagctgctcgtcgctaaccggggcgagatcgccgcccgcattttccgcacctgccgcgaactgggcatcgagaccgtcgcggtcttctccgaagccgaccgcgccgccaaacatgtgcgcgaagccgacgaagccgtctgcatcggcccggcgcccgcccctgaaagctatctgcgcgttgaggcgatccttgccgccgcgaaggagacgggcgctgacgccatccatccgggctatggtttcctctccgagaacgccgcctttgccgaagccgtcgttgccgccggcctcatctgggttggcccgccgccgtctgccatccgctccatggggccgaaggatgaggccaagcgcattgcagaggacgccggcgtgcccgtgctgcccggctatcgcggcgaggcgcaggatatcgagacactgaagaaggcggccaagaaggtcggctatccgctgctcatcaaagcggtcgccgggggcggcggccgcggcatccggcaggtctcgaaagaggcggaactggaagctgaactcatcagcgccgtgcgcgaagccgagagcgcctttggcgatggccgcgtgatgctggagaagctggttctccagccgcgccatatcgaggtgcaggtgtttggcgacgcccatggcaacgtcgttcacctgtttgaacgcgattgctcgctgcaacgccgccgccagaaagtgctcgaagaagcgcctgcgcccggtatgccggaagacgtgcgcgccgcgatgacggacgcggccgtaaagctcgccaaggcggttggctatcagggcgcgggcacagtggaattcatcgtggacggatcaaggccgctggcggccgatacgttctggttcctcgaaatgaatacgcggcttcaggtcgaacatccggtcaccgaaatggtcaccgggcaggatctggtcgagtggcaactcatcgtcgcgtcgggcggcacgctgccgctggcgcaggacgagattgaactcaatggccacgccatcgaggcgcgcatctgcgccgaagacccggccgaaggtttccgccccggcgcgggcgtgatcctggagtttggcctgctggaagaggccgatggcgagatcatccgctgggataccggctttgaaaccggcgaccgcgtgccctccaactacgactccatgatcgctaagctgatcgtttatggcgaccatcgcgacgaggcgctcgaacggctcaccgatacgctggcgcatacccagctggcgggcgtgccctccaatgcgggcttcctgcgccggtgcgctctgtcggaagagtttcagacgggcacgcatcatgtgaactggatcggcgagaatgtggacgctctggccgccgtgccggaggaacaccgcgacgcctccctgaacgccgtggcgagcctgctgctggaagatcagggcgacccctcgccgtgggcgatccgcgacgggttccgcatgaatgccgccccccgccgcacggttgtgctggcggcggatggagacgcggagatggtcgaggccggcatcccgatggccgaggatgtgccattccctctggtgacggacatttctccacgccgctttgctgtgacctgcgggggcgatacgttcctcgtcaccgtgcccgaatacagcgccgacgccgaagccgcccttggcggcgatgccgtgaaagcgccgatgcccggcaaagtgctgacgatcacggcaaaggcgggcgacacggtcacgcgcggtgacacgctggctgtgctcgaagcgatgaagatggaacacgccctggccgcgccgcgcgacggcgtggtggaggccatccattccagcgccggccagcaggttgccgagggcgacctgctggtctcgctggtggaagagtaa

SEQ ID NO: 9845 - protein, 633 aa, Hyphomonas neptunium ATCC 15444
MTITKLLVANRGEIAARIFRTCRELGIETVAVFSEADRAAKHVREADEAVCIGPAPAPESYLRVEAILAAAKETGADAIHPGYGFLSENAAFAEAVVAAGLIWVGPPPSAIRSMGPKDEAKRIAEDAGVPVLPGYRGEAQDIETLKKAAKKVGYPLLIKAVAGGGGRGIRQVSKEAELEAELISAVREAESAFGDGRVMLEKLVLQPRHIEVQVFGDAHGNVVHLFERDCSLQRRRQKVLEEAPAPGMPEDVRAAMTDAAVKLAKAVGYQGAGTVEFIVDGSRPLAADTFWFLEMNTRLQVEHPVTEMVTGQDLVEWQLIVASGGTLPLAQDEIELNGHAIEARICAEDPAEGFRPGAGVILEFGLLEEADGEIIRWDTGFETGDRVPSNYDSMIAKLIVYGDHRDEALERLTDTLAHTQLAGVPSNAGFLRRCALSEEFQTGTHHVNWIGENVDALAAVPEEHRDASLNAVASLLLEDQGDPSPWAIRDGFRMNAAPRRTVVLAADGDAEMVEAGIPMAEDVPFPLVTDISPRRFAVTCGGDTFLVTVPEYSADAEAALGGDAVKAPMPGKVLTITAKAGDTVTRGDTLAVLEAMKMEHALAAPRDGVVEAIHSSAGQQVAEGDLLVSLVEE

SEQ ID NO: 9846 - DNA, 1374 bp, Hyphomonas neptunium ATCC 15444
  CDS (1)..(1374): transl_table=11
atgacggccccacgtcccatccagaaggtcctgatcgccaatcgtggtgaaatcgctctgcgaatccaccgcgcctgcaaggaaatgggcctctccaccgtcgtcgttcactccgaggcggaccgtgatgccatggcggtgcgcctggctgacgaaagcgtctgcatcggcccggcgccctcttcagagagctatctgaagaagtcgcgcatcctggccgctgccgaaatcaccggcgccgacgcgatccatcccggctacggcttcctctcggaaaacgcccagttcgccgaaatggtcgaagcccacggcatcgcttttatcggccccacggccgagcatatccgcgtcatgggcgacaagatcgccgccaaacaggccatgatcgaagctggcgtgccctgcgttcccggctctgatggcgcggtcgaatcaatcgccgacgccaagaaggctgccaaaaagatcgggttcccgatccttgttaaggcctccgcaggcggcggcggacgcggcatgaaactcgcgatgaccgaggcagacctcgaaaacgcgataaaaacggcaaagaccgagtccaaggccgcatttggcgatgacgccgtctatctggaaaaatatcttcagggtccgcgccatatcgagatccaggtgatcgccgacacgcacggaaacgtcgcccacctctgggaacgggactgttccctgcagcgccgcaaccagaaagtcttcgaagaggcgccctcgcccgcgctcaaccaggtgcagcgcgaggaaatcggcggcatcgtcgcccgcgccatgcagaaattggggtatcgcggcgccggaacgatcgagttcctctatgaagacggccgcttctatttcatcgaaatgaacacccgtcttcaggtcgaacacccggtcaccgagatgatcacggggatcgaccttgtgcgcgaacagatccgcattgccgatggcaaggcgctctccttccgccaggaagatgtgatgctggtcggccacgccatcgaatgccgcatcaatgccgagcatccggaaaccttcgtgccatcgccgggtctcatcaccgagttccatgcgccgggcggcccggatgtgcgcctcgatagcgccgcctatgccggataccgcatcccgccgcattacgactcgctgatcggcaagctgatcgtccacgggcgcacccgccgcgaatgcctgatgcgcctgaagcgcgccctacaggaaatggtggtgggcggcgtccacacgacgctcgatctgcatcgccgccttgtggaaaacgatgacgttcaggccggggattacaacatccactggctcgaaaagttcctggccgagaacaagctgccggcgggcgaatag

SEQ ID NO: 9847 - protein, 457 aa, Hyphomonas neptunium ATCC 15444
MTAPRPIQKVLIANRGEIALRIHRACKEMGLSTVVVHSEADRDAMAVRLADESVCIGPAPSSESYLKKSRILAAAEITGADAIHPGYGFLSENAQFAEMVEAHGIAFIGPTAEHIRVMGDKIAAKQAMIEAGVPCVPGSDGAVESIADAKKAAKKIGFPILVKASAGGGGRGMKLAMTEADLENAIKTAKTESKAAFGDDAVYLEKYLQGPRHIEIQVIADTHGNVAHLWERDCSLQRRNQKVFEEAPSPALNQVQREEIGGIVARAMQKLGYRGAGTIEFLYEDGRFYFIEMNTRLQVEHPVTEMITGIDLVREQIRIADGKALSFRQEDVMLVGHAIECRINAEHPETFVPSPGLITEFHAPGGPDVRLDSAAYAGYRIPPHYDSLIGKLIVHGRTRRECLMRLKRALQEMVVGGVHTTLDLHRRLVENDDVQAGDYNIHWLEKFLAENKLPAGE

SEQ ID NO: 9848 - DNA, 1356 bp, Rhizobium leguminosarum bv. viciae 3841
  CDS (1)..(1356): transl_table=11
atgcccatgatttcgaaaatcctcatcgccaatcgcggggaaatcgcccttcgcgtgctccgggcctgcaaggagctgggtatcgcctgcgtcgcggttcattccaccgccgacgccgatgccatgcatgtgcgccttgccgacgaaagtgtgtgcatcggcccgccctcctcgcgcgagagctatctcaacatccaccagatcgtcgccgcctgcgagatcaccggcgctgacgccgtgcatccgggctacggctttctgtcggagaatgccaagttcgccgatatcctcgaagcccacggcattaccttcatcgggccgacggccgaccatatccgcatcatgggcgacaagatcaccgccaagacgacggcgctcgagctcggcattcccgtcgttccgggctcggacggcgaagtgaagaccgaagaggatgcgctgaagacggcggctgaaatcggctatcccgtgctgatcaaggccacggccggcggcggcggacgcggcatgaaggtcgccaagagcgaggccgacctgatcgaggcctggtcgacggcgcgcacggaagcggcagccgccttcggcaacgatgccgtttacatggaaaaatatctcggcaagccgcgccacatcgaaatccaggtgttcggcgacggcgaaggcaatgccatccatctcggcgagcgcgactgctcgctgcagcggcgccatcagaaggtctgggaagaggcgaattcgccggcactcaacgtcgagcagcgcatgaagatcggccaggtctgcgccgacgccatgaagaagctgaaatatcgcggcgccggcacgatcgaattcctctacgaaaacggcgagttctatttcatcgaaatgaacacccgcctgcaggtggagcatccgatcaccgaagcgatcaccggcatcgacctggtgcacgagcagatccgcgtcgcttccggcggcggtctctcggtgacgcaggatgaagtacatttttccggtcacgccatcgaatgccgtatcaatgccgagcacccgcgcaccttcgtgccttcgcccggtacgatcacgcatttccacgcgccgggcggcctcggcgtgcgcatcgattccggcgcctatcagggctacaagatcccgccctattacgacagcctcatcggcaagctgatcgtgcacggccgtacccgcgtcgaatgcatgatgcgcctgcgccgggcgctcgacgaattcgtcgtcgacggcatcaatacgacgctgccgctgttccaggatctcgtctccaaccaggatatcgccaacggcgattacgacatccactggctggaagaatacctcgccaatacaccggcggcatag

SEQ ID NO: 9849 - protein, 451 aa, Rhizobium leguminosarum bv. viciae 3841
MPMISKILIANRGEIALRVLRACKELGIACVAVHSTADADAMHVRLADESVCIGPPSSRESYLNIHQIVAACEITGADAVHPGYGFLSENAKFADILEAHGITFIGPTADHIRIMGDKITAKTTALELGIPVVPGSDGEVKTEEDALKTAAEIGYPVLIKATAGGGGRGMKVAKSEADLIEAWSTARTEAAAAFGNDAVYMEKYLGKPRHIEIQVFGDGEGNAIHLGERDCSLQRRHQKVWEEANSPALNVEQRMKIGQVCADAMKKLKYRGAGTIEFLYENGEFYFIEMNTRLQVEHPITEAITGIDLVHEQIRVASGGGLSVTQDEVHFSGHAIECRINAEHPRTFVPSPGTITHFHAPGGLGVRIDSGAYQGYKIPPYYDSLIGKLIVHGRTRVECMMRLRRALDEFVVDGINTTLPLFQDLVSNQDIANGDYDIHWLEEYLANTPAA

SEQ ID NO: 9850 - DNA, 1416 bp, Pseudomonas aeruginosa UCBPP-PA14
  CDS (1)..(1416): transl_table=11
gtgatcaagaagatcctgatcgccaaccgcggcgagatcgccgtccgcatcgtgcgcgcctgcgccgagatgggcatccgctcggtggccgtctactccgaggccgatcgccacgcgctgcacgtcaagcgcgccgacgaagcccacagcatcggcgcggacccgctggccggctacctcaacccgcgcgccctggtgaacctggcggtggaaagcggctgcgacgccctgcaccccggctatggcttcctctcggaaaatgccgagctggcggaaatctgcgccgagcgcggtatcaagttcatcggcccgtcggcgcaagtgatccgccgcatgggcgacaagaccgaagcccgccgcagcatgatcgccgccggcgtgccctgcacccccggcaccgaaggcaacgtcgccgatctcgccgaggccctgcgcgaagccgagcggatcggctacccggtgatgctcaaggccacctccggcggcggcggccgtggcatccgtcgctgcaacagccgcgaggagctggaacaggcgttcccgcgggtgatctccgaggcgaccaaggccttcggcagcgccgaagtattcctcgagaagtgcatcgtcaatcccaagcacatcgaggcgcagatcctcgccgattccttcggcaacaccgtgcacctgttcgagcgcgactgctcgatccagcgccgcaaccagaagctcatcgagatcgccccgagcccgcagctcacccccgagcagcgcgcctacatcggcgatctggcggtgcgcgcggccaaggcggtgggctacgagaacgccggcaccgtggagttcctgctcgccgacggcgaggtgtacttcatggagatgaacacccgggtccaggtggagcacaccatcaccgaggaaatcaccggcatcgacgtggtccgcgagcagatccgcatcgcttccgggctggagctgtcggtcaagcaggacgacatcgtccatcgcggctacgccctgcagttccgcatcaacgccgaggacccgaagaacaacttcctgccctcgttcggcaagatcacccgctactacgcccccggcggccccggcgtgcgtaccgacacggcgatctacaccggctacaccatcccgccgtactacgactcgatgtgcctgaagctgatcgtctgggcgctgacctgggaagaggccctcgatcgcggcctgcgcgcccttgacgacatgcgcgtgcaaggggtcaagaccaccgcgccgtactaccaggaaatcctccgcaacccggaattccgcagcggccagttcaacaccagcttcgtcgaaagccacccggaactgacccagtactcgatcaagcgcaacccgtcgcacctggccatcgccatcgccaccgccatcgcggcccacgccggcctgtaa

SEQ ID NO: 9851 - protein, 471 aa, Pseudomonas aeruginosa UCBPP-PA14
MIKKILIANRGEIAVRIVRACAEMGIRSVAVYSEADRHALHVKRADEAHSIGADPLAGYLNPRALVNLAVESGCDALHPGYGFLSENAELAEICAERGIKFIGPSAQVIRRMGDKTEARRSMIAAGVPCTPGTEGNVADLAEALREAERIGYPVMLKATSGGGGRGIRRCNSREELEQAFPRVISEATKAFGSAEVFLEKCIVNPKHIEAQILADSFGNTVHLFERDCSIQRRNQKLIEIAPSPQLTPEQRAYIGDLAVRAAKAVGYENAGTVEFLLADGEVYFMEMNTRVQVEHTITEEITGIDVVREQIRIASGLELSVKQDDIVHRGYALQFRINAEDPKNNFLPSFGKITRYYAPGGPGVRTDTAIYTGYTIPPYYDSMCLKLIVWALTWEEALDRGLRALDDMRVQGVKTTAPYYQEILRNPEFRSGQFNTSFVESHPELTQYSIKRNPSHLAIAIATAIAAHAGL

SEQ ID NO: 9852 - DNA, 1368 bp, Pediococcus pentosaceus ATCC 25745
  CDS (1)..(1368): transl_table=11
atgtttcaaaaggttttagttgctaatcgtggtgaaatcgcggtccaaattatccgcgccttacacgaaatggatatcgctgcagttagtgtctattctacagctgatgagaatagtttattcgttaaattagcggatgaagccgtctgcattggagggcctcaacctgctgattcatatttaaacatgtttaatattatcagtgctgccgtcttaactggctgtgatgcgatccatccaggttacggatttttatccgaaaatgcggaattcgctcgattatgtaaagaaagtaatctggtatttattggaccgcactataaaaccattgacttgatgggaaataagtctcgggcgcgtgaaacgatgattagtgcgaatgttccggttattccgggaagcaacggcatggttcgcgatttagagaatgccatggtggtggctaagcaaattggttatccaattatgcttaaagctgctgatggtggtggcggaaaagggattcgtcgaattaattcaccagaagaccttaaaaaggcttatcaagaagcgaagcgggaagctgaaacttcttttggtaattctgatttatacattgaaaaaatcattgaaaatgctaaacatattgaaatgcaagttattgcagatcagtttggtcattatgtatttttacctgaacgtgattgttcgctgcaacgaaataaccagaaagtaattgaagaaacaccatgcgccactatttcacattctgaacgcgaaagtttaggtgatattgtagttcgggctgcaaaggccatcaattattataatactggtacaattgagtttttgatggatgaaaatcataatttttatttcatggaaatgaatactcgacttcaagttgagcatacagttactgaagaggtaacgggaattgaattaatcaaagaacaaattaagattgctgaaggattgaaacttgatttcagccaagcagacgttgaaattttaggccatgcaattgaatgtcgaattaatgccgaagacccaagcaatggttttatgccatcggcggggaccattaagcatctatttttcccagatggaacaatgggtgtacgcattgattcgggaattacatatggtagcatgatcccaccattttacgattcaatgatttcaaaaataattgttaaaatgccaaatcgggttcaagcgactagaaaaatgcgtcgtgttttagatgaatttgaaatcgaaggtgtaacttcaaataaggcattcttagaggctttactagttgataagggatttgaacaaggattgtttacgactaaatatattgaaaatgtctttttgaaagagtggttaagtaatgcaaaataa

SEQ ID NO: 9853 - protein, 455 aa, Pediococcus pentosaceus ATCC 25745
MFQKVLVANRGEIAVQIIRALHEMDIAAVSVYSTADENSLFVKLADEAVCIGGPQPADSYLNMFNIISAAVLTGCDAIHPGYGFLSENAEFARLCKESNLVFIGPHYKTIDLMGNKSRARETMISANVPVIPGSNGMVRDLENAMVVAKQIGYPIMLKAADGGGGKGIRRINSPEDLKKAYQEAKREAETSFGNSDLYIEKIIENAKHIEMQVIADQFGHYVFLPERDCSLQRNNQKVIEETPCATISHSERESLGDIVVRAAKAINYYNTGTIEFLMDENHNFYFMEMNTRLQVEHTVTEEVTGIELIKEQIKIAEGLKLDFSQADVEILGHAIECRINAEDPSNGFMPSAGTIKHLFFPDGTMGVRIDSGITYGSMIPPFYDSMISKIIVKMPNRVQATRKMRRVLDEFEIEGVTSNKAFLEALLVDKGFEQGLFTTKYIENVFLKEWLSNAK

SEQ ID NO: 9854 - DNA, 1383 bp, Oenococcus oeni PSU-1
  CDS (1)..(1383): transl_table=11
atgtttaaacgtgttttgattgctaatcgtggtgaaattgctgtccggattattcgcgcccttcgtgagatggggatcgaatcagttgcggtttattcaacggctgatcgcgatagtctttttgttaaattggcagatatcgccgtttgtatcggtgggccgcagccggccgattcttatttaaacattcagaacatcgtcagtgcggctgttctttctggagccgacgcaattcatcctggctttggttttttgtctgaaaacgccgagtttgcaagagtttgcgctgaatgcggtgttatttttattggcccggaggccaagacaattgaattaatgggtaataagtccaatgctcgcagcacaatgaaaaaacatggtgtcccggttgttcccggcagcaatcaatcgattaaaaatatcgatgctgcactcgaaatcgctgatcaaatcggttatccggttatgttaaaagcggcagctggtggtgggggtaaaggaattcgtgctattaaagatcgggaagatctgattaaaaaatttcctgacgcacagcgggaaacgaaactttcttttgacgatgacgatatgtacatcgaaaagattatccaatcccccaagcatgtcgaagttcaggtaatgggagatagtgctggaaacatcttggcttttcccgagcgtgactgttctttgcagcgtggccatcaaaaaatggttgaggaaagtccttgccctttgattaacccttcagaacgtgaatacttgatgtcggttgccgccaaggctgccaaggcaatcaattatttgaataccggtacttttgagttcttgatggatgaccagcatcatttttatttcatggaaatgaatactcgtctgcaagttgaacacccgattacagaaatggtaacgggtatcgacctagtcaaaatgcaaatatgcgttgcttctggagaaaagatctctttgaaacaaagcgatattaaaattcatggaacggcaattgagtgccgaatcaactccgaagatccggttcataattttctgcctcaagccggaaaaataaaatctgttcattttccactgggatgtccgggtgcacgcgtcgactcggctattgaaaacgggagtacaattccgcctttctatgattcgatgatagcgaaattaattgctcacgggtcgaatagaaaggaggctttggcaattatggatcgtatgttggatgagatgtcgcttgttggagttaaaagtaatttggattttcaacaaaggcttcttcattccccggctgtcatcaaaggcaatacaacgactgattatattgaaaaagaatttttgccctattggcaggcccaattggctgaggagaaggtaggatga

SEQ ID NO: 9855 - protein, 460 aa, Oenococcus oeni PSU-1
MFKRVLIANRGEIAVRIIRALREMGIESVAVYSTADRDSLFVKLADIAVCIGGPQPADSYLNIQNIVSAAVLSGADAIHPGFGFLSENAEFARVCAECGVIFIGPEAKTIELMGNKSNARSTMKKHGVPVVPGSNQSIKNIDAALEIADQIGYPVMLKAAAGGGGKGIRAIKDREDLIKKFPDAQRETKLSFDDDDMYIEKIIQSPKHVEVQVMGDSAGNILAFPERDCSLQRGHQKMVEESPCPLINPSEREYLMSVAAKAAKAINYLNTGTFEFLMDDQHHFYFMEMNTRLQVEHPITEMVTGIDLVKMQICVASGEKISLKQSDIKIHGTAIECRINSEDPVHNFLPQAGKIKSVHFPLGCPGARVDSAIENGSTIPPFYDSMIAKLIAHGSNRKEALAIMDRMLDEMSLVGVKSNLDFQQRLLHSPAVIKGNTTTDYIEKEFLPYWQAQLAEEKVG

SEQ ID NO: 9856 - DNA, 1377 bp, Leuconostoc mesenteroides subsp. mesenteroides ATCC 8293
  CDS (1)..(1377): transl_table=11
atgttcaaaaaggttctagtggcaaatcgcggtgaaatcgcggtgcgtattattcggacattgagagaaatgggtattgcatcagttgctgtttattcaacagctgacaaagatagcttgcacgttcaaattgctgatgaagcaatcgcagttggtggtgttaagccaacagattcatatttgaatatgaaaaacattctgagtgcggcactattaacaggttctgaagctattcacccaggatacggctttctgtcagaaaatgctctatttgctgaaatggttggcgaagtaggaattaaatggattggcccacgtccagacacaattgaattaatgggtaacaaagctaatgctcgtgaagaaatgcgtcaagcaggtgttccggttattcctggatctgacggtttcatccgtgacttttccgaagctaaggttgttgctgatcgtatcggatatcctttgttgctaaaagccgctgctggtggtggtggaaaaggcatgcgttttgtttatagcgaagatgaattgagcgacaaatttgatgatgcccaaaatgaagcgcgcctgtcagttggtgatgatcaaatgtacattgaaaaagtgatggaacatgtccgacacattgaaatgcagcttttgagagatgaaaatggtcatgttgtctatctaccagaacgtgattgctcattacagcgtaaaaatcaaaaggtgttggaagagtcacctgctgtaggtgtaacgcctgagatgcgtgcttatttaggtggtattgtaacaaaagctgcgcaagcgatcaggtatgagaacactggaacaattgaatttttgcaagaccatgagggcaatttttacttcatggagatgaatactcgtatccaggttgaacacccagtcactgagatggtaaccaatttagatttaattagattacaaatagaagtcgctgcagggcaagatttacctataaaacaggacgatattcaagttaatggtcattccatcgaagtacgcttgacggccgaaagacctgaaagtaattttgcaccaagtgcaggcacagttgatcttgtatttttacctaccggaggacctggtgttcgaattgattccgcactatttgtgggcgataaagtccaaccattttacgattcaatgattggtaaattagtggcgaaggcagatactcgtgaacaagcggttcaaaaaattcatcgcattgttgatgaaactgttgtgcatggcatttctacaagtttaaatttccaaaaagctttattggaagatccacacgtgcagcgtggcgaatttgatacacgctatttagaaactgaattcttaccacggtggactgagagcttatcagaagatgaataa

SEQ ID NO: 9857 - protein, 458 aa, Leuconostoc mesenteroides subsp. mesenteroides ATCC 8293
MFKKVLVANRGEIAVRIIRTLREMGIASVAVYSTADKDSLHVQIADEAIAVGGVKPTDSYLNMKNILSAALLTGSEAIHPGYGFLSENALFAEMVGEVGIKWIGPRPDTIELMGNKANAREEMRQAGVPVIPGSDGFIRDFSEAKVVADRIGYPLLLKAAAGGGGKGMRFVYSEDELSDKFDDAQNEARLSVGDDQMYIEKVMEHVRHIEMQLLRDENGHVVYLPERDCSLQRKNQKVLEESPAVGVTPEMRAYLGGIVTKAAQAIRYENTGTIEFLQDHEGNFYFMEMNTRIQVEHPVTEMVTNLDLIRLQIEVAAGQDLPIKQDDIQVNGHSIEVRLTAERPESNFAPSAGTVDLVFLPTGGPGVRIDSALFVGDKVQPFYDSMIGKLVAKADTREQAVQKIHRIVDETVVHGISTSLNFQKALLEDPHVQRGEFDTRYLETEFLPRWTESLSEDE

SEQ ID NO: 9858 - DNA, 1338 bp, Magnetococcus sp. MC-1
  CDS (1)..(1338): transl_table=11
atgtttaagaaagtattaatcgccaaccggggcgaaatcgccctgcgggtgcatcgcgcctgtaaagagttgggcattcaaacggtggccattcactccaccgccgatgccgactcgatgcatgttaaggtggccgacgagtccgtctgtgtaggtcccccctcctccatggactcctacctcaacatctcttccatcatggcggcggctgaggtgtcggatgccgaagcgatccatcctggatatggttttctttcagaaaatccagagtttgccgagattgtcaaagcctctggcctgacctttattggccccgaaccggaagtaatccggctgatgggcaacaaggtgcaggcgcgtaaaaccatgattgccgccggggtaccggtggtgcagggcagcgaaggtgccgtcaatagcgaagaggatgccctgcgtattgcccgtgaaattggttttccggtcatcatcaaggccgttggcggcggcggtggacggggtatgaaggtggtgcatgccgaggcgggcttgatccgcgcctacacggtagcccgcaacgaagcccggcagtttttccgcaacgacgccatctatattgaaaaatatctggaagctccccgccatgtggagatccagattatgtgcgaccgtcacggcaatgctgtacacttgggcgagcgggactgctcgttgcagcggcgtcaccagaaaattttggaagaggctccctctccagcggtctcaccagaagagcgccatagattgggcaccctcgcggccaaggcggcccatgctgtgggttatgaaggggcgggcacctttgagttcctctacgacaagggcaacttttacttcttggagatgaacacccgtattcaggtggaacacccggttacggagatggtcacgggcatggatctggttaaagagcagatccgtattgccgccaatctgcccatgagctttacccaggaagatattgtcatgcgcggccactccatcgagtgccgcatcaatgccgaggattcagagacctttctcccctcgcccgggctgattacagagtatcatgcgccgggtggtggtggggtgcgggtggattccaactgctacaccgggtatcgcattcccccgcattatgactcgatgatcggcaagttgattgtgcatgggcgcaatcgtgaagaggccgtaacccgcatgcggcgggcgttggatgagtatatcatctgcggcatttccaccaccattcccctgcaccagcgcattatgcaggatgccacctttattagtggcacctatgacctgcactttctggagcgttttttaggaaagtga

SEQ ID NO: 9859 - protein, 445 aa, Magnetococcus sp. MC-1
MFKKVLIANRGEIALRVHRACKELGIQTVAIHSTADADSMHVKVADESVCVGPPSSMDSYLNISSIMAAAEVSDAEAIHPGYGFLSENPEFAEIVKASGLTFIGPEPEVIRLMGNKVQARKTMIAAGVPVVQGSEGAVNSEEDALRIAREIGFPVIIKAVGGGGGRGMKVVHAEAGLIRAYTVARNEARQFFRNDAIYIEKYLEAPRHVEIQIMCDRHGNAVHLGERDCSLQRRHQKILEEAPSPAVSPEERHRLGTLAAKAAHAVGYEGAGTFEFLYDKGNFYFLEMNTRIQVEHPVTEMVTGMDLVKEQIRIAANLPMSFTQEDIVMRGHSIECRINAEDSETFLPSPGLITEYHAPGGGGVRVDSNCYTGYRIPPHYDSMIGKLIVHGRNREEAVTRMRRALDEYIICGISTTIPLHQRIMQDATFISGTYDLHFLERFLGK

SEQ ID NO: 9860 - DNA, 2010 bp, Mycobacterium smegmatis str. MC2 155
  CDS (1)..(2010): transl_table=11
gtgatgatgagctcgcaaacctttgacacggtcctggtcgccaaccgcggcgagatcgcggtgcgcgtcatccgcaccctgcgcgccatgggcatccgctcggtcgcggtgttcagcgaggccgacgccggcgcgcgccacgtcaccgaggccgacgtcgcggtgtgcatcggcccggccgccgcgcggcatagctacctcgacatcgacgcggtcgtcggcgccgcgcggcgcaccgacgcccaggccgtgcatcccggttacggattcttgtccgagaacgccgaattcgcgtccgcgctggccacagcgggcatcgtgttcatcggcccgcccgcctcggcgatcgccacgatgggcgacaagatcgcggcaaaggccgcggtgtcggcgttcggtgtcccggtggtccccggcatctcccggcccgggctcgccgacgacgacctgatcgccggcgccgccgaggtcggctacccggtgctggtgaaaccgtccgccggcggtggcggcaagggcatgcgggtggtcgaagcggccgccgatctgcccgcggcgctggtgtcggcacggcgagaggccggtgcggcgttcggtgacgacacgctgttcctcgagcggttcgtccagcgtccgcgccacatcgaggtgcaggtgctcgccgacggccacggaaacgtcatccatctcggcgagcgcgaatgcagcctgcagcgccgccatcagaaggtcatcgaggaagcgccgtcgccactgctggacgaggccacccgcgccaggatcggggccgcggcgtgcgccaccgcgcgtagtgtcgactacaccggggcaggcacggtcgagttcatcgtctccgccgaccgccccgacgagttcttcttcatggagatgaacacccggctgcaggtcgagcacccggtcaccgaactggtcaccgggatcgacctggtggaacagcagatccgcatcgccgcgggcgaaccgctggcgatcggccaggacgacatcacgctgaccggtcacgccgtggaggcccgcgtgtacgccgaggatccggcggccggtttcctgcccaccggcggagacgtgctcggcctgcgtgagcccaccggccgcggcgtgcgcgtcgactcggggcttgcggcaggcaccgtcgtgggcagcgactacgaccccatgctctccaagatcatcgcccacggcagcgaccgcgcgtccgcactgcagatcctggaccgcgcactggccgacaccgcggtgctcggcgtcaccaccaacatcgagttcctgcgcttcctgctcgccgacgacgacgtcgccgcgggccgcctcgacacaggcctgctggaccgcagggcccccgacttcgcgcccgccacggtcggtgacgaacagctgatcgcggccgcggcctacctgtgggcacggcagtggtcggccgccgggggcgacctgtggcgcgtgccgtcgggatggcgcgtcggcgagtgggcacccgcgacgttccggttgcacgccggtgaccgcaccgaccacgtctacatcaccggaaaccccgagcgggcctccgccgcggtcgaacacggcgacacccacaccgtcagtgcggatttcacgccgggttctgatacgttcgccgtcaccctcgacgggttgcgcaccgactaccgcgtcgcggtcaccgacagtcagatctggttgtccggcggtgggcgcacgtggtcggttcagaaggtgcgcgaagagccggtgcgtcccgacgacgcgcacagcggtgacgccgaactcgtcagcccgatgccgggatctgttgtcgccgtgggtgttcccgacggatccgatgtgaccgcgggcaccgtggtggtcaccgtcgaagccatgaagatggaacacgcactgaccgcgccggtcgacggcgtggccaagatactcgtcgccgtcggcgatcaggtcaaagtgggtcagcccctggcccgtatcaccgcccacacccaggagaacgaatcatga

SEQ ID NO: 9861 - protein, 669 aa, Mycobacterium smegmatis str. MC2 155
MMMSSQTFDTVLVANRGEIAVRVIRTLRAMGIRSVAVFSEADAGARHVTEADVAVCIGPAAARHSYLDIDAVVGAARRTDAQAVHPGYGFLSENAEFASALATAGIVFIGPPASAIATMGDKIAAKAAVSAFGVPVVPGISRPGLADDDLIAGAAEVGYPVLVKPSAGGGGKGMRVVEAAADLPAALVSARREAGAAFGDDTLFLERFVQRPRHIEVQVLADGHGNVIHLGERECSLQRRHQKVIEEAPSPLLDEATRARIGAAACATARSVDYTGAGTVEFIVSADRPDEFFFMEMNTRLQVEHPVTELVTGIDLVEQQIRIAAGEPLAIGQDDITLTGHAVEARVYAEDPAAGFLPTGGDVLGLREPTGRGVRVDSGLAAGTVVGSDYDPMLSKIIAHGSDRASALQILDRALADTAVLGVTTNIEFLRFLLADDDVAAGRLDTGLLDRRAPDFAPATVGDEQLIAAAAYLWARQWSAAGGDLWRVPSGWRVGEWAPATFRLHAGDRTDHVYITGNPERASAAVEHGDTHTVSADFTPGSDTFAVTLDGLRTDYRVAVTDSQIWLSGGGRTWSVQKVREEPVRPDDAHSGDAELVSPMPGSVVAVGVPDGSDVTAGTVVVTVEAMKMEHALTAPVDGVAKILVAVGDQVKVGQPLARITAHTQENES

SEQ ID NO: 9862 - DNA, 1362 bp, Azoarcus sp. BH72
  CDS (1)..(1362): transl_table=11
atgtttgaaaagatcctgatcgccaaccgcggcgaaatcgccctgcgggtcctgcgcgcctgccgcgaactcggcatcaagaccgtcgcggtgcattccgaggcggacaccgaagccaagtacgtcacgctggccgacgaatcggtctgcatcggcccggcgccgtccggtctgagctacctcaacgtgccggcgatcatctcggccgccgaggtcaccgacgccgaagccatccaccctggctacggcttcctgtcggaaaacgccgacttcgccgaacgtgtcgagcaatccggcttcgtcttcatcggccctcgccccgacaccatccgcctgatgggcgacaaggtttccgccaaggatgcgatgaaggccgccggcgtgccctgcgtgcccggttccgacggcgcgctgccggaagagcccaaggaaatcgtcaagatcgcgcgcgccattggctacccggtgatcatcaaggctgccggcggcggtggcgggcgcggcatgcgcgtggtgcacaccgaagcggcactgctcaacgcggtcaccaccacccgtgcggaagccggcgctgccttcggcaacccgaccgtctacatggagaagttcctggagaacccgcgccacgtggaaatccaggtgctggcggaccagcacggcaacgcggtctacctcggcgaacgcgactgctccatgcagcgccgccaccagaaggtgatcgaagaagcgccggccccgggcatcgaccgcaagctgatcgccaagatcggtgaacgctgcgccgaagcctgccgcaagatcggctaccgcggcgcgggcaccttcgagttcctgtacgaaaacggcgagttctacttcatcgagatgaacacccgggtgcaggttgaacacccggtcaccgagatgatcaccggcatcgacatcgtgcagacgcagatccgtgtcgccgcgggtgaaaagttgccgttccagcagcgcgacatccccttccgcggtcacgcgatcgaatgccggatcaacgccgaagacccgttcaagttcacgccgtcgccgggccgcatcgacaactggcacaccccgggcggtcccggcatccgcgtcgattcgcatgtgtacaacggctatatggtgccgccgcactacgattcgatgatcggcaagctgatcgcctatggcgacactcgcgagcaggcgatccgccgcatgcgcatcgcgctgtcggaaatggcggttgccggcatcaagaccaacatcccgctgcaccaggaactgatgatggacgcccgcttcgtcgaaggcggcaccagcattcactacctggaacacaagctcgccgagcgcagcgaagtgaagaagggctga

SEQ ID NO: 9863 - protein, 453 aa, Azoarcus sp. BH72
MFEKILIANRGEIALRVLRACRELGIKTVAVHSEADTEAKYVTLADESVCIGPAPSGLSYLNVPAIISAAEVTDAEAIHPGYGFLSENADFAERVEQSGFVFIGPRPDTIRLMGDKVSAKDAMKAAGVPCVPGSDGALPEEPKEIVKIARAIGYPVIIKAAGGGGGRGMRVVHTEAALLNAVTTTRAEAGAAFGNPTVYMEKFLENPRHVEIQVLADQHGNAVYLGERDCSMQRRHQKVIEEAPAPGIDRKLIAKIGERCAEACRKIGYRGAGTFEFLYENGEFYFIEMNTRVQVEHPVTEMITGIDIVQTQIRVAAGEKLPFQQRDIPFRGHAIECRINAEDPFKFTPSPGRIDNWHTPGGPGIRVDSHVYNGYMVPPHYDSMIGKLIAYGDTREQAIRRMRIALSEMAVAGIKTNIPLHQELMMDARFVEGGTSIHYLEHKLAERSEVKKG

SEQ ID NO: 9864 - DNA, 1350 bp, Acidovorax sp. JS42
  CDS (1)..(1350): transl_table=11
atgtttaagaagattttggtcgccaatcgcggcgagattgccctgcgaatccagcgtgcctgccacgaactgggcgtgaaggccgtgatggtctattccgaggccgaccgcgacgccaaatatgtcaagctggcggaggaggctgtgtgcatcggccccgcgccctcgccgctgtcctacctcaacatgcctgccatcatttcggcggccgaggtgacggacgccgaggccattcacccggggtatggcttcctgtcggaaaacgccgatttcgccgaacgggtggaaaagagcgggttccagttcatcggcccgacgcccgactccatccgcatgatgggtgacaaggtgtcggccaagcaggccatgatccgcgcgggcgtaccctgcgtgccgggctccgatggcgagttgccggatgatccggtgcagatccgccgcattgccaagagcatcggttacccggtcatcatcaaggccgctggcggtggtggcggccgtggcatgcgggtggtgcacaccgaggcggcgctggtcaacgcggtgcagatgaccaaggctgaggcgcaggccgcttttggcaacccggccgtgtacatggagaaattcctccagaacccgcgccatatagagatccagatactggccgacaagtaccgcaatgccgtgtacttgggcgagcgcgactgctccatgcagcgtcgccaccagaaggtgatcgaggaagcgccggcaccgggtattccgcgcaagctgatcgagaagattggcgaacgctgcgtggccgcctgcaagaagatcggctaccgcggtgcgggtacgttcgagttcctgtacgagaacggcgagttctacttcatcgagatgaacacccgcgtgcaggtggagcacccggtgaccgagtggatcacgggcgtggacatcgtgcgcacgcaaatcatggtggctgcaggcgaaaaactgccgttcactcagcgccaggttcagatccatggccatgcgatcgaatgccgggtgaacgccgaggacccctacaagttcatcccgtcgccgggccgcatcacgatgtggcacgcgcctggcggcccgggcgtgcgcgtggactcgcacgcctatacgaactactacgtgccgccgaattacgactccatgatcggcaagatcatcgtgcacggcgatacgcgcgagcaagccctggcgcgcatgcgcacggcactgtcggaaacggtgatcgaaggcatcaataccaacgtggcgctgcaccgcgaactcatggtggacgccaagttcgtagcgggcggcaccaacatccactacctggaggagtggctgtcgcagcgccagcgctga

SEQ ID NO: 9865 - protein, 449 aa, Acidovorax sp. JS42
MFKKILVANRGEIALRIQRACHELGVKAVMVYSEADRDAKYVKLAEEAVCIGPAPSPLSYLNMPAIISAAEVTDAEAIHPGYGFLSENADFAERVEKSGFQFIGPTPDSIRMMGDKVSAKQAMIRAGVPCVPGSDGELPDDPVQIRRIAKSIGYPVIIKAAGGGGGRGMRVVHTEAALVNAVQMTKAEAQAAFGNPAVYMEKFLQNPRHIEIQILADKYRNAVYLGERDCSMQRRHQKVIEEAPAPGIPRKLIEKIGERCVAACKKIGYRGAGTFEFLYENGEFYFIEMNTRVQVEHPVTEWITGVDIVRTQIMVAAGEKLPFTQRQVQIHGHAIECRVNAEDPYKFIPSPGRITMWHAPGGPGVRVDSHAYTNYYVPPNYDSMIGKIIVHGDTREQALARMRTALSETVIEGINTNVALHRELMVDAKFVAGGTNIHYLEEWLSQRQR

SEQ ID NO: 9866 - DNA, 1998 bp, Magnetospirillum magnetotacticum MS-1
  CDS (1)..(1998): transl_table=11
atgttcgacaagatcctcatcgccaatcgcggcgaaatcgcctgtcgggtcatgcgcaccgctaagcgcttagggatccgcaccgtggcggtctattccgaggccgacgccaatgccatgcatgtggccatggccgacgaggcggtgctgatcggcccggccgccgcatccgagagctatctcaagggcgatgtcatcctggaggccgccaagcggaccggcgcacaggccgtccacccaggctacggcttcttgtccgagaatgccggattcgcggaaagctgcggccgctcaggcgttaccttcatcggcccgccggtgggcgccatccacgccatgggctccaaggcggaatccaagcggctgatggaggcggcgggcgtgccgctggtgccgggctatcacgggaagggccagtcaatcgaggaactgacccgcgaggccgcgcggatcggctatcccgtcctggtcaaggcgagcgcgggcggcggcggcaagggcatgcgcgtggtgaccgaggccagtggcctggccgatgcggtggcctcggccaagcgcgaggccaaggcggcgttcggcgatgattccttgctgctggagacctatctggggcgtccgcgccatgtggaaatccaggtcttctgcgacacccacggcaatggcgtctatctgttcgagcgcgattgctccatccaacgccgccaccagaaggtcatcgaggaggccccggccccggccctttccgacgagacgcggcgcgccatgggcgaagccgccgtggccgccgcccaagcggtggactatgtgggcgcagggaccgtggagttcctctatcaggacggccgcttcttcttcatcgagatgaacacaaggctgcaggtggaacatccggtcaccgagatgatcaccggcctggatctggtggagtggcagttgctggtggcttcggggggcaaactgcccctggcccagaaacaactgacccgcaagggccacgccttcgaagcccgcctctatgccgaggacccttcgaaggacttcctgcccgccatcggcaggctggtccatctggtccctccgtcagaaaaccgccatgtacgcgtcgataccggcgtgcgtcagggcgacgaggtcacgcctttctacgaccccatgatcgccaagctgatcgtctgggacgaggaccgcgacgcggcgctcaggcgtctgcgccgggcgctggccgattatcaggtggcgggggtgaccaccaatgtctccttcctgggcgccatcgcggcgcatccggcctttgcgcggcttgagatcgacaccggcttcatcgagcgccaccgcgccgatctgctgccgccccctgcccccatcccggccttaggcctggccttcgcgtcgctggccctgctgctgtggcgcgaagaggacagcgccaaggcggccatgggctcgggcgatccccattcgccctggcaccagaccaatggctggcggctcaacgacgacaatcaccacgatttccgcttcctggacgcaggcgaagagcgccgggtcaccgtgcatttcgtggaccaaggctggtcgctggacctgcccgaccagaccctgtcggcgcggcgcgccagcctgtccggctccaccctgtcggcggaaatcgggggagagcgccgcacggcatccgtggtccgctccggcttcgacctcaccgtgctgcacgacggccatgtgtggaagatcaaactggacgacccctccgccacggcggccgaacgcgaaggcggcgacgggcgtctggccgcccccatgcccggcaccgtggtccaggtcctggtccagccgggcgatgtggtcaccgccggtcagccgctgatcgtcgtcgaggccatgaagatggaacacgccatcaaggcgccaggcgaaggcaaggtcgccgccatccacttcaaggtgggcgacaccgtggccgaaggcatcgaattgctggccttcgaggtaagtaagtaa

SEQ ID NO: 9867 - protein, 665 aa, Magnetospirillum magnetotacticum MS-1
MFDKILIANRGEIACRVMRTAKRLGIRTVAVYSEADANAMHVAMADEAVLIGPAAASESYLKGDVILEAAKRTGAQAVHPGYGFLSENAGFAESCGRSGVTFIGPPVGAIHAMGSKAESKRLMEAAGVPLVPGYHGKGQSIEELTREAARIGYPVLVKASAGGGGKGMRVVTEASGLADAVASAKREAKAAFGDDSLLLETYLGRPRHVEIQVFCDTHGNGVYLFERDCSIQRRHQKVIEEAPAPALSDETRRAMGEAAVAAAQAVDYVGAGTVEFLYQDGRFFFIEMNTRLQVEHPVTEMITGLDLVEWQLLVASGGKLPLAQKQLTRKGHAFEARLYAEDPSKDFLPAIGRLVHLVPPSENRHVRVDTGVRQGDEVTPFYDPMIAKLIVWDEDRDAALRRLRRALADYQVAGVTTNVSFLGAIAAHPAFARLEIDTGFIERHRADLLPPPAPIPALGLAFASLALLLWREEDSAKAAMGSGDPHSPWHQTNGWRLNDDNHHDFRFLDAGEERRVTVHFVDQGWSLDLPDQTLSARRASLSGSTLSAEIGGERRTASVVRSGFDLTVLHDGHVWKIKLDDPSATAAEREGGDGRLAAPMPGTVVQVLVQPGDVVTAGQPLIVVEAMKMEHAIKAPGEGKVAAIHFKVGDTVAEGIELLAFEVSK

SEQ ID NO: 9868 - DNA, 1359 bp, Crocosphaera watsonii WH 8501
  CDS (1)..(1359): transl_table=11
atgatgcaattttccaaaatcctaattgccaatcgcggggagatcgctttacgcattttgcacacttgcgaagaaatgggtattgggaccgttgcggttcactctactatagatcgtcaagcccttcatgttcaattggctgatgaaagtgtctgtattggtcctcctgccagtggcaagagttatctcaatattcctaacattatctcggctgctctcacacgcaacgccacggcaattcatccagggtacggatttttagcggaaaatgctcgttttgctgaaatatgtgccgatcatcaaattgtctttattggcccgtctcctgagtctattcggtcaatgggggacaaatctaccgcaaaaaaaaccatgcaaaaagcaggagttcctacggttccgggtagttggggactcctacagagtgaagaagaagctttaaacgttgctcgtgacatcggttatccggtgatgattaaggcaacagccggaggtggtggccgaggaatgcgtctggtacgagaagaaagcgagttttctcgtctctttcaggcagcacaaggggaagcagaagcggcttttggtaatggcggggtttatctagaaaagtttatcgaacgtccccgtcacatcgaatttcagatattagcggatagtcatgggaatgtgattcatttgggggaaagggactgttctattcaacgtcgtcaccaaaagttgttagaagaagcccctagtcctgttttaaccccccaacttcgcaaaaaaatgggagaagctgccgttaaagcggctaagtcgattaaatatgttggtgccggaaccgtcgaatttttggtggataatcagggtaaattctattttatggaaatgaatacccgtatccaagtggaacatccagtgacagaaatggttacgggattagatttaattacggaacaaattcgtatcgcccaaggggaaaaattacaattcaaacaatcgcaaattgtcttaaaaggccatgccattgaatgtcgtattaatgctgaagatcccgatctcaattttcgcccccatcccggcaaaattagcggttatcttccccccggtggtccaggagtaagaatggattctcatgtttatacagattatgaaattcccccttactatgactctttgatcggtaaattaattgtttggggtcccgatagaaatactgctattaagcgtatgaaaagggcattaagagaatgtgctattacaggggttccaactactattgatttccataaacgggtattagaaacccccgcttttttggcaggggatgtttatactaattttgtggtagaacatttaatgcctaagtcctattga

SEQ ID NO: 9869 - protein, 452 aa, Crocosphaera watsonii WH 8501
MMQFSKILIANRGEIALRILHTCEEMGIGTVAVHSTIDRQALHVQLADESVCIGPPASGKSYLNIPNIISAALTRNATAIHPGYGFLAENARFAEICADHQIVFIGPSPESIRSMGDKSTAKKTMQKAGVPTVPGSWGLLQSEEEALNVARDIGYPVMIKATAGGGGRGMRLVREESEFSRLFQAAQGEAEAAFGNGGVYLEKFIERPRHIEFQILADSHGNVIHLGERDCSIQRRHQKLLEEAPSPVLTPQLRKKMGEAAVKAAKSIKYVGAGTVEFLVDNQGKFYFMEMNTRIQVEHPVTEMVTGLDLITEQIRIAQGEKLQFKQSQIVLKGHAIECRINAEDPDLNFRPHPGKISGYLPPGGPGVRMDSHVYTDYEIPPYYDSLIGKLIVWGPDRNTAIKRMKRALRECAITGVPTTIDFHKRVLETPAFLAGDVYTNFVVEHLMPKSY

SEQ ID NO: 9870 - DNA, 1353 bp, Exiguobacterium sibiricum 255-15
  CDS (1)..(1353): transl_table=11
atggaaaaacttttaatcgcgaaccggggcgagattgcagtccggatcattcgagctgcaaaagaacttggcattcagacggtcgccgtttattcgacagcggaccgggatgccttgcacgtccgtttagcagatgaagcatattgtatcggagatgtcagttcgactgcttcttacttgaatgtcacgaatatcctggcggtcgcgactaatcggaacgtcacgatgattcacccgggatacggtttcctggctgagaatgttgattttgccgagatgtgtgaagcatgtggcatcaaattcgtcggaccgacatcggctgctatccgtcagatgggaatcaaggatgtcgcaaaacaaacgatgattgcctgcggcgtacctgtcgtacccggttctgccggtacggtcacggacgaggaagccttacaattgggggatgagatcggctatccggtcatcatcaaagcgactgccggtggaggcggacgaggcatccgtgtcgcccgttcacaagaagaacttgtaaccggcctggatgaaacacgccgtgaggcaaagcaggcgtttggaaacagtgaagtgtatctcgagcgtttcatcgaagaatttcgtcatgtcgaagttcaagtactcgccgatcgtcacggaaacgtgatccatctcggggagcgggattgtaccgtccaacgccggatgcaaaagctgattgaggaagcaccatcacctgctgtcagccctgcaacccgtctgaagatgggcgaagcggcagtcaaagcggcgaaggcgattgactacaccggtgccgggacgatcgaattcatctttgtggaagaaacggaagaatttttcttcatggaaatgaatacgcgaatccaggttgaacatccggtgacggaaatgattacaggatttgatcttgttcaggcacagctccaggtggcactcgatcacccgttagctgttcaacagcaggatattgaattccgtggtcattcgattgaatgccggatcaatgccgaagatcctgatcatgacttccgtccgcatgccggacgcgtcacacaatatgtcgcaccgggtggaatgggcgtccggattgatagtgccgtatatccggggtatatgattcctccgtactatgactcgatggtcgctaagctgatcgttcatgccgaaacgcgtgaagaagcctgtgcgaagatggaacgggcattgtccgagttttggattgaaggtgtcaaaacaacgatacctttccatcaacaagtgttggcacatcccgtattccgtcgtggaacgtttacgacgaaatttacagaacgtgaactaaaagcagaaatcgtgaagtaa

SEQ ID NO: 9871 - protein, 450 aa, Exiguobacterium sibiricum 255-15
MEKLLIANRGEIAVRIIRAAKELGIQTVAVYSTADRDALHVRLADEAYCIGDVSSTASYLNVTNILAVATNRNVTMIHPGYGFLAENVDFAEMCEACGIKFVGPTSAAIRQMGIKDVAKQTMIACGVPVVPGSAGTVTDEEALQLGDEIGYPVIIKATAGGGGRGIRVARSQEELVTGLDETRREAKQAFGNSEVYLERFIEEFRHVEVQVLADRHGNVIHLGERDCTVQRRMQKLIEEAPSPAVSPATRLKMGEAAVKAAKAIDYTGAGTIEFIFVEETEEFFFMEMNTRIQVEHPVTEMITGFDLVQAQLQVALDHPLAVQQQDIEFRGHSIECRINAEDPDHDFRPHAGRVTQYVAPGGMGVRIDSAVYPGYMIPPYYDSMVAKLIVHAETREEACAKMERALSEFWIEGVKTTIPFHQQVLAHPVFRRGTFTTKFTERELKAEIVK

SEQ ID NO: 9872 - DNA, 1347 bp, Prosthecochloris aestuarii DSM 271
  CDS (1)..(1347): transl_table=11
atgttgttcaagaaaatactaattgcaaatcgcggtgaaattgctttgcgcatcatgcagacctgccgtgaactgggaatcagtacggtcgccatctactcgactgccgataaaaattcccttcatgtcaagtatgccgacgaagccgtctgcatcggcccgcccctcggaaaagaaagctacctgaacatcccgcggatcatggccgctgcagagatcaccaatgctgacgcgattcatcccggctatggattccttgctgaaaatgctgatttcgcagaagtgtgcaatgcctcgggaattaaatttatcggtccgaccgcagagatgatccgcaaaatgggcgataaaaacagtgccaaggaaaccatgatcgctgctggcgtccctgtcattcccggaagtgacgggttggtaagggatacagcccatgcactcaaaactgctgaaaaaataggctaccctgtaatcattaagccaacggcaggaggcggtggaaaaggaatgcgggtggtaaacgaaccggaaaaaatccaaaaagctctccttacctcccagaacgaagcccaacaggctttcggtaacagcggagtctatattgaaaagttcgtagaaagtccgcgccatgttgaaatacagatcctcgccgaccagcatggcaatacgatgcatctgggtgaaagagactgtaccattcaacgtcgtcatcagaaactcatcgaagagactccctcaccggttgtcgacgaagcgctccgcaatgagatgggcaatgccgctgttgccgctgcaagcgctatcaattatgaaggcgctggaaccatagaatttctgctcgacagcgaccgcaaattctacttcatggaaatgaatacccgtatacaggttgaacatcctgtaacggaggaacgctatgatgtcgatctggtcaaggaacagattcttgtcgcttccggcgagtccattgccgataggaaataccggccgaaaggacattcaattgaatgcagaatcaatgccgaggatccggaacacggattcagaccaagtcccggtgaactccaggtgtttcatacgcccggcggttatggtgtccgtgtcgactctcacggctacgcaagctacaagatcccgtcgaattacgactccatggtagccaagcttattgtcacggcccattcaagagaagaggctatagcaagaatgctcagggccctggatgaattcatcgttgtcgggataaaaaccaccattccttttcataagcagctcttgcagactgaagagttcagaagcgggaactacgacacccactttctggaaacctttaccttcaaaaaaacttag

SEQ ID NO: 9873 - protein, 448 aa, Prosthecochloris aestuarii DSM 271
MLFKKILIANRGEIALRIMQTCRELGISTVAIYSTADKNSLHVKYADEAVCIGPPLGKESYLNIPRIMAAAEITNADAIHPGYGFLAENADFAEVCNASGIKFIGPTAEMIRKMGDKNSAKETMIAAGVPVIPGSDGLVRDTAHALKTAEKIGYPVIIKPTAGGGGKGMRVVNEPEKIQKALLTSQNEAQQAFGNSGVYIEKFVESPRHVEIQILADQHGNTMHLGERDCTIQRRHQKLIEETPSPVVDEALRNEMGNAAVAAASAINYEGAGTIEFLLDSDRKFYFMEMNTRIQVEHPVTEERYDVDLVKEQILVASGESIADRKYRPKGHSIECRINAEDPEHGFRPSPGELQVFHTPGGYGVRVDSHGYASYKIPSNYDSMVAKLIVTAHSREEAIARMLRALDEFIVVGIKTTIPFHKQLLQTEEFRSGNYDTHFLETFTFKKT

SEQ ID NO: 9874 - DNA, 1728 bp, Kineococcus radiotolerans SRS30216
  CDS (1)..(1728): transl_table=11
gtgaagaccgtcttgatcgccaaccggggcgagatcgccgtgcgcgtggtccgcgccgccgccgaggccgggttgcgttcggtcgccgtctacgccgaccaggacgccgacgccctgcacgtccgcctggccgacaccgccgtggcgctgcccggcgacaccgccgcgcagacgtacctggacgtggacgcgctgctggcggccgcggaggcctccggcgccgacgcggtgcaccccgggtacgggttcctgtccgagaacgccgggttcgcccgcgccgtcgaggccgccgggctgacctggatcgggccgacccccgagacgatcgaggcgctgggcgacaaggtgaccgcgcgggccatcgcccgcgacgccggcgcccccctggcgcccggcagcaccgccccgctgaccggcgcgcggcaggccgaggagttcgccgacgagttcgggctgccgatcgtcgtcaaggccgcccacggcggcggcggccgcgggatgcgggtggcgcggacgcgcgaggaggtcgccgacgcgttcgagtccgcgacccgggaggccgtcgcggcgttcgggcgcggggagtgcttcgtggagaagttcctcgaacgcccccggcacctggaggtgcaggtcctcggggacggcgccgggggcgtcacggtggtgggcgaccgcgactgctcgctgcagcgccgcaaccagaagctcgtcgaggaggcgcccgccccggggctcacggacgagcagcggcggaccatccacaccgccgcgcgcgacatctgcgccgcggtggactaccgcggcgccggcaccgtggagttcctgctcggcgccgacggcaccctgtccttctgcgaggtgaacacccggctgcaggtggagcaccccgtcaccgagctggtgacgggggtcgacctggtgcgcgagcagttccgcatcgcggccggcgacgggccctcgttcacgcggacgcccgaggtccgcggtcacgcgttcgagttccgcgtcaacgccgaggacccggggcggggtttcctgcccagccccgggcggatcgagcgcctccgcgtcccctccggccccggcgtgcgctgggacggcggcgtcgaggccggtgactccgtcgcggccgcgttcgactccctcgccggcaagctcctcgtccacgccggggaccgcgacaccgccctggcccgcgcccgccgcgccctggccgagttcgagatcaccgggatcgccacggtgctgccgttctcgcgggccgtggtcgacgaacccgacttctccaccgcgggattcgccgtagggacgcagtggatcgagtccgagctcatgccgcgactcgttccccagctgcgcccggcgccggccacgacgcccgtcctgcagcggctcccgatcgagatcgatggccggatggcgaccatcggcctgcccgcggcgttcctggccgcgctgggctcggtgccggggacccccgagacctccgggaccccggaggtccgggacgacgacgagcacgaactcaccgcccgcacccccggcaccctcaccgcgtggctcgtcgaggacggcgcggaggtgacggcggggcaggacgtggccgtcgtggaggcgatgaagatggagtcccgggtccccgcccaccgggcggggacgctcagccgggtcgccggcgagggggcctccctcgcggccggggaggtcctggcgcggatcgagtga

SEQ ID NO: 9875 - protein, 575 aa, Kineococcus radiotolerans SRS30216
MKTVLIANRGEIAVRVVRAAAEAGLRSVAVYADQDADALHVRLADTAVALPGDTAAQTYLDVDALLAAAEASGADAVHPGYGFLSENAGFARAVEAAGLTWIGPTPETIEALGDKVTARAIARDAGAPLAPGSTAPLTGARQAEEFADEFGLPIVVKAAHGGGGRGMRVARTREEVADAFESATREAVAAFGRGECFVEKFLERPRHLEVQVLGDGAGGVTVVGDRDCSLQRRNQKLVEEAPAPGLTDEQRRTIHTAARDICAAVDYRGAGTVEFLLGADGTLSFCEVNTRLQVEHPVTELVTGVDLVREQFRIAAGDGPSFTRTPEVRGHAFEFRVNAEDPGRGFLPSPGRIERLRVPSGPGVRWDGGVEAGDSVAAAFDSLAGKLLVHAGDRDTALARARRALAEFEITGIATVLPFSRAVVDEPDFSTAGFAVGTQWIESELMPRLVPQLRPAPATTPVLQRLPIEIDGRMATIGLPAAFLAALGSVPGTPETSGTPEVRDDDEHELTARTPGTLTAWLVEDGAEVTAGQDVAVVEAMKMESRVPAHRAGTLSRVAGEGASLAAGEVLARIE

SEQ ID NO: 9876 - DNA, 1368 bp, Xylella fastidiosa Ann-1
  CDS (1)..(1368): transl_table=11
atgttagacaaagtcgttattgccaaccgtggtgagatcgcgttgcgtattcttcgcgcatgccacacgttgggtatccgcacggttgcggtgcactctaccgttgatcgtaatctgaagcatgtcgcgatggctgatgagtcggtgtgtattggtcctgcaccatcggcggagagttatctcaatattccggcgctgattgccgccgctgaggtcacggatgctcaggccatccaccctggctatggttttttgtcggaaaacgctagttttgctgaacgtgtggaacagtctggcttcattttcattgggccacgggcagagacgattcgtttaatgggcgacaaggtgcaggctatccatgcgatgaaagcggctggtgtgccgtgtgtccctggttcggatggtccattgggtgatgacattgtcgctaacgtcaaaattgcacgtgagatcggttatccggtcatcattaaggctgccggcggaggcggtggacgcgggatgcgtgtggtacataccgaggccggtttagaggcggctatcgagaccacgcaatgtgaagctaaagccgcttttggcaatggccaggtgtatatggaaaagtttctggagaatccgcgtcacgtggagattcaggtgctcgccgatggtcaggggaacgcgatccatttgggggagcgggattgttcgatgcaacgccgccatcagaaggtggtggaggaagcccccgcaccaggtatcactgaggcgctgcgcaatgaaatcggtcaagtgtgtgtagatgcctgtattcgtatcggttaccgcggtgctgggacgtttgaatttctgttcgagaatggtcgtttttacttcatcgagatgaatacgcgcatccaggtagagcatccggtgacggagcgtatcactggtattgacttggtatgcgagcagttgcgtattgccgctggtcagccattgagtatcaagcagagcgatgtggtgttgcgtggccatgcgatcgaatgccgtatcaatgctgaggatgcggagacgttcttgcccaatccgggtttgattactgcgttccatccaccaggtggtccgggtgtgcgtatggatacgcatatctacagtggttacaaggtgccgccgaactatgattcgatgatcggcaagctcatcgtgcatggtcctgaccgtgagacggcgattgcgcgcatgcatttggcgctgagcgaaatggtcgtggatgggatcaagaccaatatcccattgcagcagcgcattatgtgcgataagggtttccagtccggtggacagaacatccattatttggagaagtgtttggcggagcgtaagaaccaaacgatcgggcggacctga

SEQ ID NO: 9877 - protein, 455 aa, Xylella fastidiosa Ann-1
MLDKVVIANRGEIALRILRACHTLGIRTVAVHSTVDRNLKHVAMADESVCIGPAPSAESYLNIPALIAAAEVTDAQAIHPGYGFLSENASFAERVEQSGFIFIGPRAETIRLMGDKVQAIHAMKAAGVPCVPGSDGPLGDDIVANVKIAREIGYPVIIKAAGGGGGRGMRVVHTEAGLEAAIETTQCEAKAAFGNGQVYMEKFLENPRHVEIQVLADGQGNAIHLGERDCSMQRRHQKVVEEAPAPGITEALRNEIGQVCVDACIRIGYRGAGTFEFLFENGRFYFIEMNTRIQVEHPVTERITGIDLVCEQLRIAAGQPLSIKQSDVVLRGHAIECRINAEDAETFLPNPGLITAFHPPGGPGVRMDTHIYSGYKVPPNYDSMIGKLIVHGPDRETAIARMHLALSEMVVDGIKTNIPLQQRIMCDKGFQSGGQNIHYLEKCLAERKNQTIGRT

SEQ ID NO: 9878 - DNA, 1374 bp, Streptococcus suis 89/1591
  CDS (1)..(1374): transl_table=11
atgtttgagaagattttgattgccaatcgtggtgagattgcggtgcggatcattcgtgcggccagggaattagggattgcgacggtggctgtctattcagaggcggacaaggaagctctccacaccatgttggcagatgaggctgtctgtatcggcccggcccgttcgacagactcctatctcaatatgcaggctgttatctcggcggctgttgtgacaggtgcccaggctattcatcctggctttggatttttgagtgaaaactctaaattcgccaccctctgtgaagaggtcggtatcaagtttatcggaccttctgggacggtcatggataccatgggcgataaaatcaatgctcgggcagagatgattaaggctcaagttcctgtcattcctggatcagacggcgaagttttgaccagccaagaagctcttgcaattgctgaaaagattggttaccctgtcatgctcaaagcatcggcaggaggtggcggtaaggggattcgtaaggtggaaaaagctgaagacctagtgcctgcctttgaatcagcttccagcgaagccaaggcagcctttggcaacggagccatgtatatggagcgtgtcgtctatccagcccgccacatcgaagtacagattttggcggaccagcacggtcatgtcattcatctgggagaacgggattgttcccttcaacgcaacaatcaaaaggtcttggaagaagctccgtcgattgctatcggccagaccatgcgggaacgtatcggtcaagcagcagtgcgggctgcccagtcagttggttatgaaaatgcggggaccattgagtttctcttggatgaagccaagggcgaattttacttcatggaaatgaacacacgggtgcaggtagaacatcctgttaccgaatttgtcactggtgtggatattgtcaaggagcaaatcaagattgcggctggtcaggaactcagtgtccgccaagaagatgtgcggattacaggtcatgccattgaatgccgcatcaatgctgaaaatccagccttcaattttgccccaagtccaggtaagatttccaatctctacctaccaagcggtggcgttggtctacgtgtagattcagctgtttacccaggctacaccattccgccttactatgattccatgattgccaaggtcatcgtgcatggggaaaatcgctttgaagccctgatgaagatgcaacgggccctctatgaattggaaattgacggagtggtgaccaataccgacttccagctggacttgatttccgacaagcgagtggtggctggtgattatgacactgcctacctcatggaagaatttttaccccgctatcaagaagatctaaaaaagtaa

SEQ ID NO: 9879 - protein, 457 aa, Streptococcus suis 89/1591
MFEKILIANRGEIAVRIIRAARELGIATVAVYSEADKEALHTMLADEAVCIGPARSTDSYLNMQAVISAAVVTGAQAIHPGFGFLSENSKFATLCEEVGIKFIGPSGTVMDTMGDKINARAEMIKAQVPVIPGSDGEVLTSQEALAIAEKIGYPVMLKASAGGGGKGIRKVEKAEDLVPAFESASSEAKAAFGNGAMYMERVVYPARHIEVQILADQHGHVIHLGERDCSLQRNNQKVLEEAPSIAIGQTMRERIGQAAVRAAQSVGYENAGTIEFLLDEAKGEFYFMEMNTRVQVEHPVTEFVTGVDIVKEQIKIAAGQELSVRQEDVRITGHAIECRINAENPAFNFAPSPGKISNLYLPSGGVGLRVDSAVYPGYTIPPYYDSMIAKVIVHGENRFEALMKMQRALYELEIDGVVTNTDFQLDLISDKRVVAGDYDTAYLMEEFLPRYQEDLKK

SEQ ID NO: 9880 - DNA, 1377 bp, Croceibacter atlanticus HTCC2559
  CDS (1)..(1377): transl_table=11
atgattatatcaacttcaaatgctgaaacagttatgttcaaaaaaattctaattgccaatagaggcgagattgcattacgtattatacgtacttgtaaagaaatgggtataagcactgttgctgtttattctactgcagatgcagaaagtttgcacgttaagtttgcagacgaagctgtttgtataggaccagcaccaagtaacttatcctatttaaaaattccaaatattattgctgccgcagaaataacaaatgcagatgctattcatcctggatatggtttcttggcagaaaattcgaagttttctaaaatatgtgaagagcacgatattaagtttattggtgcttctccagatatgattgataaaatgggagacaaagcttctgcaagagctacaatgcaagctgcaggtgtgccttgtattcctggatcagatggccttttaaaagattttgcagaatgtaagaaagttgcaaaagacatgggttatccagttatgcttaaagctactgccggtggtggtggtaaaggtatgcgtgctgtatggaaacctgaagaccttgaagatgcttgggatagcgcaagacaagaagcaggcgctgcctttggtaacgatggtatgtatatggaaaagcttattgaagagcctagacatattgaaatacaagttgttggagacagtacaggtaaagcttgtcacttatcagaaagagattgttctgtacaacgccgtcatcaaaaacttacagaagaaactccttctccatttatgacaactgcccttcgtaaaaagatgggtgaagctgctgtaaaagctgctgagtatattaaatatgaaggtgcaggtactgtagagtttttagttgataagcatcgtaacttctacttcatggagatgaatacccgtattcaagtagagcaccctattacagaacaagttattgattttgatttaattagggagcaaatcttagttgctgctggtgtgccaatttctggtaaaaactatactcctaaactacactcgatagagtgtcgtataaatgcagaagatccttataatggatttagaccttctcctggccgtattgagatacttcacgctccaggcggacatggagttcgcttagacactcatgtttatgcaggttatagtattcctccaaactacgattctatggtggcaaaacttattacaacggctcaaacaagagaagaagctattaataagatgaagcgtgctttagatgagtttgtaatcgaaggcgtaaaaacaactattccttttcatagacaacttatggatcatccagattatattgctggaaattatactactaaatttatggaagactttaaaatgaaagaagaataa

SEQ ID NO: 9881 - protein, 458 aa, Croceibacter atlanticus HTCC2559
MIISTSNAETVMFKKILIANRGEIALRIIRTCKEMGISTVAVYSTADAESLHVKFADEAVCIGPAPSNLSYLKIPNIIAAAEITNADAIHPGYGFLAENSKFSKICEEHDIKFIGASPDMIDKMGDKASARATMQAAGVPCIPGSDGLLKDFAECKKVAKDMGYPVMLKATAGGGGKGMRAVWKPEDLEDAWDSARQEAGAAFGNDGMYMEKLIEEPRHIEIQVVGDSTGKACHLSERDCSVQRRHQKLTEETPSPFMTTALRKKMGEAAVKAAEYIKYEGAGTVEFLVDKHRNFYFMEMNTRIQVEHPITEQVIDFDLIREQILVAAGVPISGKNYTPKLHSIECRINAEDPYNGFRPSPGRIEILHAPGGHGVRLDTHVYAGYSIPPNYDSMVAKLITTAQTREEAINKMKRALDEFVIEGVKTTIPFHRQLMDHPDYIAGNYTTKFMEDFKMKEE

SEQ ID NO: 9882 - DNA, 1353 bp, Sulfitobacter sp. EE-36
  CDS (1)..(1353): transl_table=11
atgttcaaaaaaatcctagtcgcaaaccgcggcgagatcgcgttgcgcgtgatccgtgcggcccgcgagatgggcatcgggtctgtcgccgtccattcgacggccgacagcgatgcgatgcatgtgcgcatggcagacgaatctgtctgcatcggcccgccctcttcgcagcaatcctatctgtcgatcccgtcgatcatcgccgcctgcgagatcaccggtgccgaagcgatccaccccggatacggtttcttgtcggaaaacgcgggctttgtgcagatcgtcgaagaccacgacctgaccttcatcggccccacagcggaacacatccgcatcatgggcgacaagatcaccgccaaagacaccatgaaagagcttggcgtgccttgcgttcccggttctgacggtggcgtgcccacattggccgacgccaagcgtatcggcgatgaaatcggctatccggtgatcatcaaggcgaccgccggtgggggtggcaagggcatgaaagtggcgcaatccgccgctgaaatggaacgtgccttcatgaccgcccgcgccgagggtaaatcgaacttcggcaacgacgaagtctatatcgaaaagtatctgaccacgccccgccacatcgagattcaggtctttggcgacggcaagggccgtgctgtccacctgggcgagcgtgactgttcgctgcaacgccgtcaccagaaggttttcgaagaggcccccggcccgtcgatcaccgccgaagaacgcgcgcggatcggtaaggtctgtgccgatgcgatggccaacatcaactacatcggtgccggcacgatcgaatttctatatgaaaacggcgaattctacttcatcgagatgaacacgcgtttgcaggtggaacaccctgtgaccgaaggcatcttcggggtcgatctggtgcgcgaacagatccgtgttgctgccggtatggatatgtcctttacccaagaagacctgcagatcaacggccacgcgatcgaggtccggatcaacgccgagaaactgccgaacttctcgccctgcccgggcaagatcacgcagtatcacgccccaggcgggcttggtgtgcggatggatagcgcgctgtatgacggctataagatcccgccctattacgacagcctgatcggcaagctgatcgtccacgggcgcgaccgccccgaagcgctggcgcgtctgcgtcgcgccttgggcgagctgatcgtggatggggtcgacaccacggtgccgttgttccatgcgctgctggacgaacaagacgtgctgacaggggactataacatccactggctagagcattggcttgaaaccaacctgggcaatgcctga

SEQ ID NO: 9883 - protein, 450 aa, Sulfitobacter sp. EE-36
MFKKILVANRGEIALRVIRAAREMGIGSVAVHSTADSDAMHVRMADESVCIGPPSSQQSYLSIPSIIAACEITGAEAIHPGYGFLSENAGFVQIVEDHDLTFIGPTAEHIRIMGDKITAKDTMKELGVPCVPGSDGGVPTLADAKRIGDEIGYPVIIKATAGGGGKGMKVAQSAAEMERAFMTARAEGKSNFGNDEVYIEKYLTTPRHIEIQVFGDGKGRAVHLGERDCSLQRRHQKVFEEAPGPSITAEERARIGKVCADAMANINYIGAGTIEFLYENGEFYFIEMNTRLQVEHPVTEGIFGVDLVREQIRVAAGMDMSFTQEDLQINGHAIEVRINAEKLPNFSPCPGKITQYHAPGGLGVRMDSALYDGYKIPPYYDSLIGKLIVHGRDRPEALARLRRALGELIVDGVDTTVPLFHALLDEQDVLTGDYNIHWLEHWLETNLGNA

SEQ ID NO: 9884 - DNA, 1350 bp, Roseovarius nubinhibens ISM
  CDS (1)..(1350): transl_table=11
atgttcgataaaatcctgatcgcaaaccggggcgagattgccctccgcgtgatccgcgccgcccgtgaaatgggcatccgcaccgtggcggtgcattccaccgccgacaccgatgcgatgcatgtgcggatggcggacgaatccgtctgtatcggcccgccgccgggcaccgacagctatctgtcgatcccgtcgatcatcgccgcctgtgaagtcaccggcgcgcaggcgatccacccgggctatggctttctctccgagaatgccaatttcgtgcagatcgtcgaggatcacgacctcacctttatcggccccaccgccgagcatatccgcatcatgggcgacaagatcaccgccaaggacacgatgaaggatctgggcgtgccctgcgtgcccggctctgacggcggtgtgcccgatgtcgagagcgccaaggcgctctgtgccgagatcggctatccggtgatcgtcaaggccaccgccggtggtggcgggcgcggcatgaaggtcgcgatgagcgcggccgagatcgaaagcgccttccgcaccgcgcggaccgaggccaaggcggcctttggcaatgacgaggtctatatcgagaaatacctgaccacgccgcgccatatcgagatccaggtctttggcgatggcaagggcggtgcggtgcatctcggcgagcgcgactgttcgctgcagcgccgtcaccagaaggtgttcgaggaggcccccggcccctgcatcagccaggaagagcgcgatcgcatcggcaagatctgcgccgatgccgtggcccggatcaactataccggggccggcacgatcgagttcctctacgagaagggcgagttctatttcatcgagatgaacacccgtctgcaggtggaacacccggtgaccgaggccatctttggcgtcgatctcgtgcgcgaacagatccgcgtggcctcgggcctgccgatgtccttcacgcaagacgatctcaccatcaacggtcattccatcgaggtccgtatcaacgccgagaaactgccggaattctcgccccgtccgggccggatcacgcagtttcacgcccccggcgggcttggcgtgcgaatggatagcgcgctctatgacggctataacatcccgccctattacgacagcctgatcgccaagctgatcgtgcatgggcgcgaccgtcccgaggcgctggcgcgtctgcaccgggcgctgggcgagctcatcgtggatggggtcgaaaccactgtgccgctgtttcatgcgctgctcgaggaagaggccgtgctcaccggcgaatataacattcactggctggaaaaatggctggagaccgatcccctgacctga

SEQ ID NO: 9885 - protein, 449 aa, Roseovarius nubinhibens ISM
MFDKILIANRGEIALRVIRAAREMGIRTVAVHSTADTDAMHVRMADESVCIGPPPGTDSYLSIPSIIAACEVTGAQAIHPGYGFLSENANFVQIVEDHDLTFIGPTAEHIRIMGDKITAKDTMKDLGVPCVPGSDGGVPDVESAKALCAEIGYPVIVKATAGGGGRGMKVAMSAAEIESAFRTARTEAKAAFGNDEVYIEKYLTTPRHIEIQVFGDGKGGAVHLGERDCSLQRRHQKVFEEAPGPCISQEERDRIGKICADAVARINYTGAGTIEFLYEKGEFYFIEMNTRLQVEHPVTEAIFGVDLVREQIRVASGLPMSFTQDDLTINGHSIEVRINAEKLPEFSPRPGRITQFHAPGGLGVRMDSALYDGYNIPPYYDSLIAKLIVHGRDRPEALARLHRALGELIVDGVETTVPLFHALLEEEAVLTGEYNIHWLEKWLETDPLT

SEQ ID NO: 9886 - DNA, 1350 bp, Oceanicola batsensis HTCC2597
  CDS (1)..(1350): transl_table=11
atgttcgagaagatactgatcgcaaaccggggtgagatcgccctgcgggtcattcgcgccgcgcgcgagatgggcatccgctcggtcgccgtccattccaccgccgatgccgatgcgatgcatgtgcgcatggcggatgaatccgtctgtatcggccccccctcgggatcggaaagctatctgcacatccccgcgatcatcgcggcggccgaggtgacgggcgcccaggcgatccaccccggctacggcttcctgtcggaaaacgccgccttcgtgcagatcgtcgaggatcacggcatcaccttcatcggccccacggccgaacatatccgcgtcatgggcgacaagatcaccgccaaggacacgatgaaggcgctcggcgtgccctgtgtgcctggctcggacggcggtgtccccgatctggccgccgcgcggaagctgagcggcgagatgggctatcccgtcatcatcaaggcgaccgccgggggcggtggccgcggcatgaaggtggcccgctcggagcaggaactcgaaagcgcctttcagaacgcgcgctccgaggccaaggcggccttcggcaacgacgaggtctatatcgagaaatacctcaccacgccgcggcatatcgaaatccaggtcttcggcgacggcaagggccaggcggtccacctgggcgagcgtgactgctcgctccagcgccgccatcagaaggtcttcgaagaggcgcccggcccctgcatcacccccgaggagcgcgccgagatcggccgcgtctgcgccgatgccgtggcccggatcaactatgccggcgccggcacgatcgagtttctctatgaaaacggcgagttctacttcatcgagatgaacacccgcctgcaggtcgaacatccggtaaccgaggcgatcttcggcgtcgatctcgtgcgcgaacagatccgcgtggccgaggggctgccgatgtccttcacccaggacgacctgaccatcaacggccatgccatcgaggtccggatcaatgcggaaaagctgccagaattcgcgccgcgccccggcaggatcaccgcctatcacgcgcccggcggcctcggcgtgcggatggattcggcgctctacgacggctattccatcccgccctattacgacagcctgatcggcaagctgatcgtccacggccgcgaccgccccgaggccctcgcccggctcgaccgcgcgctcggagagctgatcgtcgatggtgtcgagaacactgtgccgctgttcaacgccctgctgcaggaaccggacatccagtccggcacctacaacatccactggctcgagcactggctggcccagggcaagctgggctga

SEQ ID NO: 9887 - protein, 449 aa, Oceanicola batsensis HTCC2597
MFEKILIANRGEIALRVIRAAREMGIRSVAVHSTADADAMHVRMADESVCIGPPSGSESYLHIPAIIAAAEVTGAQAIHPGYGFLSENAAFVQIVEDHGITFIGPTAEHIRVMGDKITAKDTMKALGVPCVPGSDGGVPDLAAARKLSGEMGYPVIIKATAGGGGRGMKVARSEQELESAFQNARSEAKAAFGNDEVYIEKYLTTPRHIEIQVFGDGKGQAVHLGERDCSLQRRHQKVFEEAPGPCITPEERAEIGRVCADAVARINYAGAGTIEFLYENGEFYFIEMNTRLQVEHPVTEAIFGVDLVREQIRVAEGLPMSFTQDDLTINGHAIEVRINAEKLPEFAPRPGRITAYHAPGGLGVRMDSALYDGYSIPPYYDSLIGKLIVHGRDRPEALARLDRALGELIVDGVENTVPLFNALLQEPDIQSGTYNIHWLEHWLAQGKLG

SEQ ID NO: 9888 - DNA, 1350 bp, Erythrobacter sp. NAP1
  CDS (1)..(1350): transl_table=11
gtggccattactcgcatactgatcgccaatcgcggcgaaattgcgctgcgcatccaccgcgcggcgcacgaaatggggatcgagacagtcgcggtgcactcgaccgccgattcagacgcgatgcatgtgcggctggcagaccatgcagtctgcatcggcccgcccgcagcgtcggaaagctatcttaaccacgccaacatcatctcggctgcggaagtcgcaggctgcgacgcgatccatccgggctacggcttcctctcggagaacgccaagttcgccgagatcgtcgaagcgcacgacatcgcgtggatcgggcccaagcctgagcacatccgcacgatgggcgacaaggtgcaggcgaagaagaccgctggcgaacttggccttccgctggtcccaggctccgacggagcggtctccgatcccgaggaagccaagaaaattgcagccgaaatcggctatcccgtgatcatcaaggccgcctccggtggcggtggccgcggcatgaaggtgtgcgagagcgaggacaagctcgagacgctgatgaagcaggccggcagcgaggcaaaggccgcgttcggcgatgcgacggtctatatcgagaagtatctcggcaacccgcgccacatcgaattccaggtcttcggcgacggcaacggaaatgcgatccatctgggcgagcgcgattgctcgctccagcgtcgccaccagaaagtgctcgaagaagcgccctcccccgtcatcagcgacgatgaacgcgcggcgatgggcgaggtctgctccaaggcgatgcgcgacatgggctatcgcggtgcagggacgatcgaattcctgtgggagaacggcgagttctacttcatcgaaatgaacacccgtctgcaggtcgaacaccccgtcaccgaagcgatcaccggggtcgacctggtgcgcgaacagatccgcatcgcggctggcaagccgctttcggtggcgcaggaagacctgcgtttcaccggccacgcaatcgaatgccgcattaatgccgaggacccgttcaccttcgcgccctcgcccggcaaggtcacttactaccacccggcaggcggcatgcatgtgcgcgtcgattcaggcctgtacgcaggttattcgatcccgccctactacgattccatgatagccaagctgatcgtctatgggcgcaatcgcgaagggtgcatcatgcgccttcgccgcgcgcttgaggaaatggtggtcgagggggtgaaaaccaacatcccgcttcatcaggaattgctgcggcaggacgatgtcctcaatggcgattattcgatcaagtggctggaagagtggctggcggagcgatcgagctga

SEQ ID NO: 9889 - protein, 449 aa, Erythrobacter sp. NAP1
MAITRILIANRGEIALRIHRAAHEMGIETVAVHSTADSDAMHVRLADHAVCIGPPAASESYLNHANIISAAEVAGCDAIHPGYGFLSENAKFAEIVEAHDIAWIGPKPEHIRTMGDKVQAKKTAGELGLPLVPGSDGAVSDPEEAKKIAAEIGYPVIIKAASGGGGRGMKVCESEDKLETLMKQAGSEAKAAFGDATVYIEKYLGNPRHIEFQVFGDGNGNAIHLGERDCSLQRRHQKVLEEAPSPVISDDERAAMGEVCSKAMRDMGYRGAGTIEFLWENGEFYFIEMNTRLQVEHPVTEAITGVDLVREQIRIAAGKPLSVAQEDLRFTGHAIECRINAEDPFTFAPSPGKVTYYHPAGGMHVRVDSGLYAGYSIPPYYDSMIAKLIVYGRNREGCIMRLRRALEEMVVEGVKTNIPLHQELLRQDDVLNGDYSIKWLEEWLAERSS

SEQ ID NO: 9890 - DNA, 1365 bp, Synechococcus sp. WH 5701
  CDS (1)..(1365): transl_table=11
atgcccatcggcaagctgctgatcgccaaccgtggcgagatttccctccgcattctgcgcagctgccgcgagctgggcatcagcacggtggcggtctacagcacggtcgaccgcaacgccctgcacgtccagttggccgatgaggcggtctgcgtgggagaagctcccagcagcaagagctatctcaatattcccaacatcattgccgcggcgatctcccggggcgccgatgcaatccatcccggttatggcttcctggccgagaacgaccgcttcgcggaaatctgcgctgcccacggcctcactttcgtcggcccctcccccgaggcgatcagggccatgggggacaaatccaccgccaaggccaccatgcagcgggtgggggttcccaccatccccggcagtgaaggtctgctggaggacgcccaggaggcctccgtgctggcggcgcgcatgggcttcccggtgatgatcaaggccacagccggtggtggcgggcggggcatgcgcctggtgcaggagcccgagcagcttgaggcactgttcaaggcggctcagggtgaagcggaagcggcctttggcaaccccggcctctacatggagaagttcatcgagcggccccgccacgtcgaggtgcagatcctggccgaccgccacggcaacgtggtgcacctcggcgagcgcgactgctcgatccagcggcgacaccagaagctgctggaggaagcccccagcccggccctggatccggaactgcgccggcgcatgggcgaggcggcggtggcggcagcccgcagcatcacctacgagggcgccggcaccgtggagtttctcgtggatcgcagcggcagcttctatttcatggagatgaacacccgcatccaggtggagcatcccgtcaccgagatggtcactggctttgatctgatcgccgagcagctgcgcatcgccgggggcgagcccctgagcatgcgccaggaggacgtgcagctgcggggccatgcgatcgaatgccgcatcaacgctgaagacccgcagcagaatttccggccggcccctggccggatcaccggctggttacctccgggggggccgggcgtgcgggtcgacagccacgtgtacacgggctatgaaatcccccccttctacgactcgctgatcggcaaactgattgtctgggcgctcgatcgcgatgcagccatcaagcgcatgcgcagggccctgagcgaatgtgcgatcacaggtatccccaccacgatcgagttccacctggccctgctggatcggcccgagttccagcgcggcgatgtgcacaccaagttcgtggagcaggagatgctgcccccggctgatccgcggacctga

SEQ ID NO: 9891 - protein, 454 aa, Synechococcus sp. WH 5701
MPIGKLLIANRGEISLRILRSCRELGISTVAVYSTVDRNALHVQLADEAVCVGEAPSSKSYLNIPNIIAAAISRGADAIHPGYGFLAENDRFAEICAAHGLTFVGPSPEAIRAMGDKSTAKATMQRVGVPTIPGSEGLLEDAQEASVLAARMGFPVMIKATAGGGGRGMRLVQEPEQLEALFKAAQGEAEAAFGNPGLYMEKFIERPRHVEVQILADRHGNVVHLGERDCSIQRRHQKLLEEAPSPALDPELRRRMGEAAVAAARSITYEGAGTVEFLVDRSGSFYFMEMNTRIQVEHPVTEMVTGFDLIAEQLRIAGGEPLSMRQEDVQLRGHAIECRINAEDPQQNFRPAPGRITGWLPPGGPGVRVDSHVYTGYEIPPFYDSLIGKLIVWALDRDAAIKRMRRALSECAITGIPTTIEFHLALLDRPEFQRGDVHTKFVEQEMLPPADPRT

SEQ ID NO: 9892 - DNA, 1341 bp, Pseudoalteromonas tunicata D2
  CDS (1)..(1341): transl_table=11
atgttagataaagtagttatcgcaaatcgaggtgaaatagcacttcgtattctgcgtgcctgtaaagagctcgggattaaaaccgtagcggttcactctacagcagatagagatttaaaacatgtgcttttagccgatgagaccatttgtatcggaaagccagccgcatcagaaagttatttagatattcctcgtattattgctgcggcagaagtaaccgatgcggttgcgattcacccaggatacggttttttatctgaaaatgctgattttgccgatcaagttgaaaaaagcggttttatttttatcggcccgcgtggtgataccattcgtatcatgggtgataaagtagctgcaattgaagcgatgcgtaaagccggcgtgccttgtgtaccaggttcagatggcccacttaccgcagacaacgaacgcaataagcaaatcgctaaacgtatcggcttcccagtaatcatcaaagctgctggcggcggtggtggtcgtggtatgcgtgttgttcgcagcgaatctgaattaatcgactcaattgcacttactcagcaagaagcgaaacagttctttggtaatggcatggtttacatggagaaattccttgaaaacccacgtcatatcgaagttcaagtactggctgatggccaaggtaacgcagttcatttaggtgagcgtgattgttcaatgcaacgtcgccatcaaaaagtagttgaggaagcgccagcgccaggtattaccgctgaaatgcgtaaattcattggtgagcgctgtactcgtgcttgtatcgaaattggataccgtggcgctggtacatttgaattcttgtatgaaaatggtgagttttacttcatcgaaatgaatacccgtattcaagttgagcacccagtgactgaaatggtaactggcatcgacttgattaaagagcaattaaagattgccgccggccaaccgctctcatttaaacaagaagatgttgttattcgtggtcatgctattgagtgccgtatcaatgctgaagatccggtatcgtttattccatcacctgggcgtatcacacgttttcacccagccggtggtttagggatccgttgggattcacacatttatgccgattacactgtgccaccatattatgattcaatgattggcaagttaatcacttacggtgaaaatcgtgatatcgccattgctcgtgctaaaaatgcacttagtgaattagtgattgatggtattaaaaccaatattccactgcacaaaatcattatggcagatgaaaacttccaaaatggtggcaccaacatccactatttagagaaaaaattaggcatttaa

SEQ ID NO: 9893 - protein, 446 aa, Pseudoalteromonas tunicata D2
MLDKVVIANRGEIALRILRACKELGIKTVAVHSTADRDLKHVLLADETICIGKPAASESYLDIPRIIAAAEVTDAVAIHPGYGFLSENADFADQVEKSGFIFIGPRGDTIRIMGDKVAAIEAMRKAGVPCVPGSDGPLTADNERNKQIAKRIGFPVIIKAAGGGGGRGMRVVRSESELIDSIALTQQEAKQFFGNGMVYMEKFLENPRHIEVQVLADGQGNAVHLGERDCSMQRRHQKVVEEAPAPGITAEMRKFIGERCTRACIEIGYRGAGTFEFLYENGEFYFIEMNTRIQVEHPVTEMVTGIDLIKEQLKIAAGQPLSFKQEDVVIRGHAIECRINAEDPVSFIPSPGRITRFHPAGGLGIRWDSHIYADYTVPPYYDSMIGKLITYGENRDIAIARAKNALSELVIDGIKTNIPLHKIIMADENFQNGGTNIHYLEKKLGI

SEQ ID NO: 9894 - DNA, 1344 bp, Photobacterium sp. SKA34
  CDS (1)..(1344): transl_table=11
atgttagataaattagtaattgcaaaccgaggtgaaattgcacttcgtatcttgcgcgcttgtaaagagctagggattaaaacggttgcggttcactcaaccgccgaccgcgatcttaagcacgttctacttgctgacgagtcagtatgtattggtcctgcacgcggcatcgatagttacttaaatattcctcgtattatcagtgcagctgaaattacaggagcagtcgctatccacccaggctacggtttcctttctgaaaatgctgactttgcagaacaagttgagcgttcaggctttattttcgtaggtccaaaagctgacactattcgtctaatgggcgataaagtttctgctattacggcaatgaaaaaagcaggtgttccttgtgtaccaggctctgacggccctcttgatgacgatgaagcaaagaacaaatcttttgctaaacgtatcggttatcctgtgatcatcaaagcctctggtggcggcggtggtcgtggtatgcgtgtagttcgttcagaagaagaattgactgaagcgatcgcaatgacccgtgctgaagcaaaatcttgtttcaataacgacatggtttacatggagaaataccttgaaaacccacgtcacattgaagttcaagtcttagctgatggccaaggtggcgctattcacttaggtgagcgtgactgttcgatgcagcgtcgtcaccagaaagtggttgaagaagcaccagcaccgggcattaccgaagaaatgcgtaagtacatcggtgagcgttgtactcgtgcatgtttagaaattaattaccgtggcgcaggtacattcgagttcctttacgaaaacggtgagttctacttcattgaaatgaacacccgtattcaggttgagcacccagtaaccgaaatggtaacaggcgtagacttgattaaagagcagctacgcattgccgcaggtcaaccgctgtcgtttaaccaaagcgatattcaaattcgtggccatgctatcgaatgtcgtattaatgcagaagatcccgaacgtttcctaccttgtccaggtactatcgagcgcttccatgcgccaggtggtatggggatccgttgggaatcacacatctatactggttacacagtaccgccttactacgattcaatgatcggtaagttaatttcgtacggtgaaaatcgtgatgtggcgatttctcgcatgcgtaatgcattgagcgaaatgatcatcgacggtattaaaaccaacattccgcttcagcaagatattatggctgacgagaacttccaaaaaggtggcgcaaacatccactaccttgagaagaaactcggtttgcaataa

SEQ ID NO: 9895 - protein, 447 aa, Photobacterium sp. SKA34
MLDKLVIANRGEIALRILRACKELGIKTVAVHSTADRDLKHVLLADESVCIGPARGIDSYLNIPRIISAAEITGAVAIHPGYGFLSENADFAEQVERSGFIFVGPKADTIRLMGDKVSAITAMKKAGVPCVPGSDGPLDDDEAKNKSFAKRIGYPVIIKASGGGGGRGMRVVRSEEELTEAIAMTRAEAKSCFNNDMVYMEKYLENPRHIEVQVLADGQGGAIHLGERDCSMQRRHQKVVEEAPAPGITEEMRKYIGERCTRACLEINYRGAGTFEFLYENGEFYFIEMNTRIQVEHPVTEMVTGVDLIKEQLRIAAGQPLSFNQSDIQIRGHAIECRINAEDPERFLPCPGTIERFHAPGGMGIRWESHIYTGYTVPPYYDSMIGKLISYGENRDVAISRMRNALSEMIIDGIKTNIPLQQDIMADENFQKGGANIHYLEKKLGLQ

SEQ ID NO: 9896 - DNA, 1341 bp, Oceanospirillum sp. MED92
  CDS (1)..(1341): transl_table=11
atgctcgataaagtagtcatagcgaaccgaggcgaaattgcgcttcgtatccttcgcgcctgcaaagagctggatatcaagacagttgctatccactccaccgcggaccgcgatcttatgcatgtacgcttggctgacgaggctgtttgtattggccctgccccgtcaccgaaaagctacctgaacattccttctattatcagcgcagctgaagttaccgattccgtaggtattcacccgggctacggtttcttagctgaaaatgctgattttgctgaacaggtagaacgctctggtttcacattcattggcccgaaagcagacactattcgcctgatgggtgataaagtttctgctattgaagcgatgaagaaagctggcgtaccgactgttcctggttctgatggcgcactgcccgaagatccggagaaagttcacgaaattgcccgccgtatcggctatccggtaattatcaaagcagctgctggtggtggcggacgcggcatgcgtgttgttcactctgaagcttcgctaataagctctattcatgttacacagtctgaagccgcagcagcattcggtgatgataccgtatacatggagaagttcctggaaaacccgcgccacgttgaggtacaggttcttgcagacggacagggcaacgcgatccacctttatgaccgtgactgctcgatgcaacgccgtcatcaaaaggtagttgaagaagctccagcacctcaccttgaccctgatgctcgcgctcaggttctacaggcatgtgtagatgcgtgtattgaaatcggttatcgcggtgcaggtacgttcgaattcctgtacgaaaacggcggtttctatttcatcgaaatgaacacgcgtgttcaggtcgaacatccagtaacagagatgattaccggtgttgatattgttaaggaacagctgcgaatcgcttctggcctgcctttagcaataaaacaggaagacgttgttgtacaagggcactcttttgaatgccgaatcaacgcagaagacccaaaaaccttccttccgagccctggcacaatcaagcacttccatgctccaggcggaaacggaatccgtgtagattcgcatctatacaatggctacaccgttcctccgcattacgattctcttatcgctaaactcatcagctttggtgaagatcgcgaaacggcattacgtcgtatgagcatcgcactggatgaaatgctggttgatggtattcgcagtaacatccccctgcagcaagaaattatggcggacaccaagttccaggaaggtggtgtaaatatccactatctcgagaaaaagctcggcctgtag

SEQ ID NO: 9897 - protein, 446 aa, Oceanospirillum sp. MED92
MLDKVVIANRGEIALRILRACKELDIKTVAIHSTADRDLMHVRLADEAVCIGPAPSPKSYLNIPSIISAAEVTDSVGIHPGYGFLAENADFAEQVERSGFTFIGPKADTIRLMGDKVSAIEAMKKAGVPTVPGSDGALPEDPEKVHEIARRIGYPVIIKAAAGGGGRGMRVVHSEASLISSIHVTQSEAAAAFGDDTVYMEKFLENPRHVEVQVLADGQGNAIHLYDRDCSMQRRHQKVVEEAPAPHLDPDARAQVLQACVDACIEIGYRGAGTFEFLYENGGFYFIEMNTRVQVEHPVTEMITGVDIVKEQLRIASGLPLAIKQEDVVVQGHSFECRINAEDPKTFLPSPGTIKHFHAPGGNGIRVDSHLYNGYTVPPHYDSLIAKLISFGEDRETALRRMSIALDEMLVDGIRSNIPLQQEIMADTKFQEGGVNIHYLEKKLGL

SEQ ID NO: 9898 - DNA, 1359 bp, Xanthobacter autotrophicus Py2
  CDS (1)..(1359): transl_table=11
atgttcagaaaaatcctcatcgccaaccgcggcgagatcgcgctgcgcatcctgcgcgcctgcaaggagctgggcattgcgacggtcgcggtccactccaccgccgatgccgacgccatgcatgtccgcctcgccgacgagagcgtgtgcatcggcccgccggccgcccgcgagagctatctcaacatcccctctctgctcgccgcctgcgagatcacgggggcggatgcggtgcatcccggctacggcttcctggctgagaatgcccggttcgctgagatcctggccgatcacaacatccatttcatcgggcccaaggcggagcacatccgcatcatgggcgacaagatcgaggccaagaagacggcccagtccctcggcattccggtggtgccggggtccgatggcggcatccattccgatgacgaggcccatcgcgtcgccgacgagatcggcttcccggtgctggtgaaggcggctgctggcggcggcgggcgcggcatgaaggtggcgatgaccaaggaggacctctccgaggccctctccaccgcccgcaacgaggccaagtcggccttcggcgacgacgcggtctatctggaaaagtatctctccaccccgcgccacatcgaggtgcaggtgctgggcgacggcaagggccacgccattcatctgggcgaacgcgattgctcgctgcagcgccgccaccagaaggtgtgggaagaggcgccgtccccggtgatcacccctgagcagcgggcgcggatcggcgagacctgtgccaaggccatgcgcgacctgggctatctcggcgtgggaaccatcgagttcctgtatgagaacggggagttctatttcatcgagatgaacacccgcatccaggtggagcacccggtgacggagatggtcaccggcatcgacctgatcaacgagcagatccgggtggccgccggcgagcccctgaccctcacccagaaggacgtggtgatcgagggccatgccatcgagtgccgggtgaatgcggagcaccccactactttccggccctcgccgggcaagatcacccactatcacgtgcccggcggcctcggcatccgcgtggattccaacgcctatcagggctacgtgatcccccccacctacgacagcctggtgggcaagctgatcgtgcacggcaagacgcgggacgaatgcctgcgccgcctgcgccgtgcgctcgacgagttcgtggtggacggcatcgacaccacgctgccgctgttccgcaccctcgtgcgcacccgcgacatcgccgagggcaagtacgacatccactggctggaacacttcctctccgagggcgagggcaaaaaggtcggctga

SEQ ID NO: 9899 - protein, 452 aa, Xanthobacter autotrophicus Py2
MFRKILIANRGEIALRILRACKELGIATVAVHSTADADAMHVRLADESVCIGPPAARESYLNIPSLLAACEITGADAVHPGYGFLAENARFAEILADHNIHFIGPKAEHIRIMGDKIEAKKTAQSLGIPVVPGSDGGIHSDDEAHRVADEIGFPVLVKAAAGGGGRGMKVAMTKEDLSEALSTARNEAKSAFGDDAVYLEKYLSTPRHIEVQVLGDGKGHAIHLGERDCSLQRRHQKVWEEAPSPVITPEQRARIGETCAKAMRDLGYLGVGTIEFLYENGEFYFIEMNTRIQVEHPVTEMVTGIDLINEQIRVAAGEPLTLTQKDVVIEGHAIECRVNAEHPTTFRPSPGKITHYHVPGGLGIRVDSNAYQGYVIPPTYDSLVGKLIVHGKTRDECLRRLRRALDEFVVDGIDTTLPLFRTLVRTRDIAEGKYDIHWLEHFLSEGEGKKVG

SEQ ID NO: 9900 - DNA, 1347 bp, Flavobacteria bacterium BBFL7
  CDS (1)..(1347): transl_table=11
atgtttaaaaaaatattgatagcaaatcgtggtgaaatagctctaagagttattagaacatgtaaagagatgggaatcaaaacggtagctgtttactcaactgctgatgctgatagtctccatgtaaaatttgcagatgaagccgtttgtataggtccagcacctagtaacttatcgtaccttaaagtatctaatattattagtgctgccgagattaccaatgcagacgccattcacccaggttatggattcctatctgaaaatgctgatttctctcgcatttgtggtgaacacgatatcaaatttatcggtgcaagtcctgatatgattgccaaaatgggtgataaagcaactgcaaaagagactatgaaagccgctggtgtaccatgtgtaccaggctctgatggtattattgcagattttgacgattgtaaaaaaattgccttagaaacaggatatcctgtcatgcttaaagcgactgctggtggtggtggtaaaggtatgcgtgctgtatggaaagaagaagatctactagcagcatgggaaagtgcacgtcaggaaagtaaagccgcttttggaaatgacgatatgtacatggaaaaacttattgaagaaccacgtcatattgagatccaagtagtaggtgattcttatggaaaagcatgtcacctaagtgaacgagactgttctgtacagcgtcgtcaccaaaaattaacagaagaagttccttctcctttcatgactaaaaagttgcgtaaggaaatgggagaagctgctgttaaagctgcagaatttattaagtatgaaggagctggtacggtagaattcttagtggataagcaccgtaatttctactttatggaaatgaatactcgtattcaagtagagcacccaattacagaacaagtaatagattttgatcttataagagaacaaattttagttgcagctggtgtaaagatatcgggtaagaactatgagcctacattacattccatagagtgtcgtattaatgctgaggatccttatcacgatttccgtccatcaccaggtaaaattactacactacatgcaccaggtggtcatggagtgcgtctagatactcacgtgtatgctggatattctatcccgcctaattatgactctatgattgcaaagttaattaccactgcacgtacacgtcaggaggcaattgataaaatgaaaagagctcttgatgaatttgtaatcgaagggatcaaaactacaataccattccatagacaattaatggatcatccagattatgttgctggtaattataccacagcatttatgaatgattttgagatggaaccacagaaataa

SEQ ID NO: 9901 - protein, 448 aa, Flavobacteria bacterium BBFL7
MFKKILIANRGEIALRVIRTCKEMGIKTVAVYSTADADSLHVKFADEAVCIGPAPSNLSYLKVSNIISAAEITNADAIHPGYGFLSENADFSRICGEHDIKFIGASPDMIAKMGDKATAKETMKAAGVPCVPGSDGIIADFDDCKKIALETGYPVMLKATAGGGGKGMRAVWKEEDLLAAWESARQESKAAFGNDDMYMEKLIEEPRHIEIQVVGDSYGKACHLSERDCSVQRRHQKLTEEVPSPFMTKKLRKEMGEAAVKAAEFIKYEGAGTVEFLVDKHRNFYFMEMNTRIQVEHPITEQVIDFDLIREQILVAAGVKISGKNYEPTLHSIECRINAEDPYHDFRPSPGKITTLHAPGGHGVRLDTHVYAGYSIPPNYDSMIAKLITTARTRQEAIDKMKRALDEFVIEGIKTTIPFHRQLMDHPDYVAGNYTTAFMNDFEMEPQK

SEQ ID NO: 9902 - DNA, 1341 bp, gamma proteobacterium HTCC2207
  CDS (1)..(1341): transl_table=11
atgctcgaaaaagtcctgatcgcaaatcgcggcgagattgctctgcgtattctgcgcgcctgtaaagaattgaatattaagacggttgccgttcactcaaaagtggatgccgatcttaaacacgtcatgctggctgatcagtcgatatgcataggccccaatccctcggctcagagctacctaaacattccggctattattagcgccatggaagtgaccggcgccaccgcggtccacccaggctatggttttctcgccgaaaatgctgactttgccgagcaggtagagaacagcggctttgtctttatcggaccaaccgccgactgcattcgcattatgggtgacaaggttgcggcgattaaagcgatgaagtctgccggcgtacccacggttcccggctctgacggtccattggacgatgacccggcggctcttcgcgccatgggcaaaaaaattggctacccggtaatcatcaaggcagcttcaggcggcggcggtcgcggtatgcgcattgtcgaaaatgaagaagccctggttaactccgttgcgatcactaaatccgaagctgaggcagcatttggcgatggcactgtctatatggagaagtttctgcagaatcctcgccatgttgaagtgcaggtactctcagacggtcagggacatgcgattcatctgggtgatcgtgactgttcgttgcagcgacgtcatcagaaggttttggaagaggctccggctccgggaattcccgaagaagctcgtcaggcggtttttgaaagctgcacccaagcctgtattgaaatcggctatcgcggcgccggtacctttgagtttctctatgaagatggcggtttttactttattgagatgaatactcgggttcaggtagaacatcctgtatcggaaatgattaccggcatcgatattgttaaagagcaattgtcgattgccagcggccggccacttagctttactcagaaagatgttattttccgcggtcactcttttgagtgcagaattaacgcggaagaccctgtcacctttatgcctcagcctggcactatcacctcttatcatgcccctggcggcaacggtgtgcgtgtcgattcgcatatctacaacggctatcgcgtgccaccgaattatgactctttgatcggcaagattattacctacggtcgtgaccggaattcagcgctttcgcgcatgcgcaacgcactagacgaaatgatgatcgacggcatcaaaaccaatattgaactgcatcaggatctggttcgcgattctgagttccagaaaggtggcgtcaacatccattatcttgagaaaaaactcggactgtaa

SEQ ID NO: 9903 - protein, 446 aa, gamma proteobacterium HTCC2207
MLEKVLIANRGEIALRILRACKELNIKTVAVHSKVDADLKHVMLADQSICIGPNPSAQSYLNIPAIISAMEVTGATAVHPGYGFLAENADFAEQVENSGFVFIGPTADCIRIMGDKVAAIKAMKSAGVPTVPGSDGPLDDDPAALRAMGKKIGYPVIIKAASGGGGRGMRIVENEEALVNSVAITKSEAEAAFGDGTVYMEKFLQNPRHVEVQVLSDGQGHAIHLGDRDCSLQRRHQKVLEEAPAPGIPEEARQAVFESCTQACIEIGYRGAGTFEFLYEDGGFYFIEMNTRVQVEHPVSEMITGIDIVKEQLSIASGRPLSFTQKDVIFRGHSFECRINAEDPVTFMPQPGTITSYHAPGGNGVRVDSHIYNGYRVPPNYDSLIGKIITYGRDRNSALSRMRNALDEMMIDGIKTNIELHQDLVRDSEFQKGGVNIHYLEKKLGL

SEQ ID NO: 9904 - DNA, 1443 bp, delta proteobacterium MLMS-1
  CDS (1)..(1443): transl_table=11
ttgaacaagaagatcctggtcgccaaccggggcgagatcgccctgcgggttatccgcgccatacaggagctcggtcacagtgcggtggccgtgtatgaaacccccgacaacgaagccctccatattcgtgccgccgacgaggcggtctggctcggtgacggaccccgcagtgattatcttgacatcgacaaggtgattgccgccgcgaaaaaaaccggggcctgcgccattcatcccggttacggctttctggccgagaaccccgatttcgccaaggcctgcgaggataacgggattatcttcatcggcccctcctcccaggttattgccaacctgggcgacaaggtaaccgcccgccggatcatggcggaggccggggtccccctggtacccggcaccgccagcctggctcccggcgaggccggggtcgccgaggcggtggagttctgccagacccatggctacccggtgatgctcaaggccaccgccggcggcggcggtcgcggtattcgccggatcgacgatgaaaagcaactgaaggccgaaatcccggcggcccgggccgaagcccaggccgcctttggcaatgacgcggtctttttggaaagactggtgatcacccccaaacatatcgaggtccaggtgatcgccgataaagaggggaccaccgtccacctgggctcccgggattgctcgatccagcgccgtaaccagaagctcatcgaaatcgccccctccttgatcgccgatcaacaactggtcgacaagatctgcgataccgccgtcaaggccgcccgggccgccaactatttcaacgccggcaccgtcgagttcctggtggacaaggactacaacttctattttatggagatcaacacccgggtgcaggtggagcataccgtcaccgaaatggtcaccggcatcgatatcgtccgcacccagatcaagctggccctgggcaggaaactggctttcggccaggatgatgtccagatccgcgggtacgccgttgaagtgcggatcaacgctgaagatccccagaacaactttatgcccgaaggtggcaagctggtgtcggtctaccgttcaccgggaggctacggagtacggctggacggttttgcctaccagggctacaccatccccgaggtttacgattcactgttggtcaagctcaccgtccatggcttttcgtggaacgagacggtggaccggctgcgccgctgtctgaagaattttgtgatcttagggcccaagaccacgattcccttttatctgcgggtgttggaagagccgaaattcaaaaccggcgatttcgatacctcctttctcgactccaacccgcaactgctggagtatgaagaaggggagagcgaaggcaacaagctggcccacctgatcgccgaaattcattaccggcaacaaaacccttacgccatctaa

SEQ ID NO: 9905 - protein, 480 aa, delta proteobacterium MLMS-1
MNKKILVANRGEIALRVIRAIQELGHSAVAVYETPDNEALHIRAADEAVWLGDGPRSDYLDIDKVIAAAKKTGACAIHPGYGFLAENPDFAKACEDNGIIFIGPSSQVIANLGDKVTARRIMAEAGVPLVPGTASLAPGEAGVAEAVEFCQTHGYPVMLKATAGGGGRGIRRIDDEKQLKAEIPAARAEAQAAFGNDAVFLERLVITPKHIEVQVIADKEGTTVHLGSRDCSIQRRNQKLIEIAPSLIADQQLVDKICDTAVKAARAANYFNAGTVEFLVDKDYNFYFMEINTRVQVEHTVTEMVTGIDIVRTQIKLALGRKLAFGQDDVQIRGYAVEVRINAEDPQNNFMPEGGKLVSVYRSPGGYGVRLDGFAYQGYTIPEVYDSLLVKLTVHGFSWNETVDRLRRCLKNFVILGPKTTIPFYLRVLEEPKFKTGDFDTSFLDSNPQLLEYEEGESEGNKLAHLIAEIHYRQQNPYAI

SEQ ID NO: 9906 - DNA, 1341 bp, Rickettsiella grylli
  CDS (1)..(1341): transl_table=11
atgctaaataaagtggttattgcaaatcgtggtgaaattgctttacgtattttacgggcgtgtaaagaactcggtattcaaacggtcgctttgcattcaaccgcggatgataatttaaaacatgtgaaactcgctgacgagacagtctgtattggtcctccttctgcaagtcaaagttatttaaacatccctgccattattagcgcggctgaaattacagatgcgatggggatacatccgggttatggcttcctttctgaaaatgcagattttgcagaacgggtccaacaaagtggttttgtttttattggacctgaaccggaaactatccggagaatgggggataaagtatcggcgattgccgcgatgcgaaaagcaaagatcccgtgtgtaccgggctcggaaggtgaattagagaatgatgataaaaaaaatttgaaaatcgcacaaaaaattggttatccggtattgattaaagccgccggtggaggaggggggcgagggatccgtgtggtgcatagtgaggcagcgttgttaagtgcaatttcactgacgcgatcggaagcagaagctaactttaaaaatgccagtgtttatttggaaaaatttttaattaatccaagacatattgaaatccaagtattaggtgatggtcaaggtcatgcggtccatctcggtgagcgagattgttctatgcaacgccgccatcaaaaagtcattgaagaagcgccggctgtcggaattactgaaaaacaacgtcaacagatgggtgaactctgtgtcaaagcgtgtcgtgatatgaattatcgaggtgcagggacgtttgaatttctctacgaaaacggtcatttttatttcattgaaatgaatacaaggattcaagtggaacatccgattactgaaatggttaccggtattgacttagtggttgaacaattacgcattgcatccggtgaaaaattgaattataaacaaaaacaaattagtttacgtggccattccattgaatgtcgtattaatgcagaagatccaaaaacatttatgccctctccgggcgtcatcagcttatatcatcctccggggggaccaggcattcgtgtggatacacccatttatacgggatatcgagttccaccctattatgattcattaataggtaagttaattgcctatggtgaaacgcgggaaattgcattagcgcgtttacgcaatgccttagatgaaatagtgatagaaggcattcacaccaatattccaatgcatcaagcattagtgcgtgatgccaattttataaaaggcggaacaaacatccactatcttgaaaaacatttatcacaataa

SEQ ID NO: 9907 - protein, 446 aa, Rickettsiella grylli
MLNKVVIANRGEIALRILRACKELGIQTVALHSTADDNLKHVKLADETVCIGPPSASQSYLNIPAIISAAEITDAMGIHPGYGFLSENADFAERVQQSGFVFIGPEPETIRRMGDKVSAIAAMRKAKIPCVPGSEGELENDDKKNLKIAQKIGYPVLIKAAGGGGGRGIRVVHSEAALLSAISLTRSEAEANFKNASVYLEKFLINPRHIEIQVLGDGQGHAVHLGERDCSMQRRHQKVIEEAPAVGITEKQRQQMGELCVKACRDMNYRGAGTFEFLYENGHFYFIEMNTRIQVEHPITEMVTGIDLVVEQLRIASGEKLNYKQKQISLRGHSIECRINAEDPKTFMPSPGVISLYHPPGGPGIRVDTPIYTGYRVPPYYDSLIGKLIAYGETREIALARLRNALDEIVIEGIHTNIPMHQALVRDANFIKGGTNIHYLEKHLSQ

SEQ ID NO: 9908 - DNA, 1422 bp, Oceanobacter sp. RED65
  CDS (1)..(1422): transl_table=11
atgtccaaacttaagaaggtcctgattgccaaccgcggtgagatagccgtacgcattatccgagcgtgcgccgaactgggaattcgctctgtcgctatttataccgaggccgatcgctatggcttgcatgttaagcgcgccgatgaatcttattgcttaggggatgatcctttagcgggttatttagatcctgcgcgcattgttaacttggcgaaagaaactggttgcgatgcgatccatccgggatatggttttttatcggaaaatgccgagtttgctcgcatttgtgagcaaaagggcgtgcgcttcattggtccgaaatccgatgttattcaaggtatgggcgataaaacccaagcccgtgccagtatgcgcaaagctggagtgccggtcacacccggttctgaaggtaaccttgcgacagtggaagaggccattgagttagccaatgaaattggttacccggttatggttaaagcgacatcgggtggtggcggtcgcggtattcgacgctgtgatagtgagcaagaattaaagcagcagtttccccgagtgatctccgaggccactaaagcctttggcagtgctgatgtctttatagagaagtgcattgtcgatccgaaacatatcgaagttcagattttagctgatagccacggcaatgtgattcacctttatgagcgagattgctctattcagcgacgcaatcaaaagctcatcgaaatcgctcccagcccacaactgactgatgagcaaagagagcacattggtgagcttgcggtaaaagccgccaaagccgtgggatatgaaaatgcgggcacggtagagtttctattcacgggcgatgatgtgtatttcatggaaatgaatacgcgagtgcaggtagaacataccatcagtgaacaaatcacgggtgtggatattgttagtgagcaactaaaaatcgcagccggagaaaagctcgcttatagccaagaagatattcagtaccgaggctttgctttgcaatttcgcattaatgccgaagacccacaaaacgattttttaccgagctttggtcgcattagccactattacgcaccgggtggtcccggagtacgtgtcgatacggccatttataccggatacgagattcctccttactacgactccatgtgtttgaagctcattgtttgggcacttaattggcaagatgtcattaaacgtggtcagcgcgcacttgatgatatgcgcttgcaaggggttaaaaccaccgccgaatattatcaacagattttgcagcatcctgattttgcacaaggggaatttaataccagttttgtgccgaatcatcctgacttattaaagtattccaataagcgtcacccaagtgaaattgcattagccattgctggggccattgccgcccatgctggttggtag

SEQ ID NO: 9909 - protein, 473 aa, Oceanobacter sp. RED65
MSKLKKVLIANRGEIAVRIIRACAELGIRSVAIYTEADRYGLHVKRADESYCLGDDPLAGYLDPARIVNLAKETGCDAIHPGYGFLSENAEFARICEQKGVRFIGPKSDVIQGMGDKTQARASMRKAGVPVTPGSEGNLATVEEAIELANEIGYPVMVKATSGGGGRGIRRCDSEQELKQQFPRVISEATKAFGSADVFIEKCIVDPKHIEVQILADSHGNVIHLYERDCSIQRRNQKLIEIAPSPQLTDEQREHIGELAVKAAKAVGYENAGTVEFLFTGDDVYFMEMNTRVQVEHTISEQITGVDIVSEQLKIAAGEKLAYSQEDIQYRGFALQFRINAEDPQNDFLPSFGRISHYYAPGGPGVRVDTAIYTGYEIPPYYDSMCLKLIVWALNWQDVIKRGQRALDDMRLQGVKTTAEYYQQILQHPDFAQGEFNTSFVPNHPDLLKYSNKRHPSEIALAIAGAIAAHAGW

SEQ ID NO: 9910 - DNA, 1347 bp, Desulfitobacterium hafniense DCB-2
  CDS (1)..(1347): transl_table=11
atgtttaaaaaggtattaatagccaatcggggagaaattgccttacggatcatcagagcctgccgggagatggacattgagaccgtggccgtcttttccgaggcggatcgggatgccctgcatgtccgggaagcggatcaggccgtctgtatcggtccccatccttcgactaagagttatttaaatatccccaatatcatcagcgctgctgagttaaccggtgtggatgctattcaccccggttatgggttcttatcggagaatgcacggttcgccgagatttgtgagtcctgtggtataacctttatcggtccctcgccgcgagccattgaaaccatgggggataaggccacggcgcgcaagactatgatcgaggcgggagttccggtggttcccgggtccaaagaagtgctcaccgatgtggaatccgcctcagttctggccaaggagattggctaccccgtcatgatcaaagcctcagcaggaggcgggggtaaagggatgcgcattgcccaaaaccccaaagagctggctaaatctattcaagctgcccaaagcgaggctcaggctgcttttggcaattcggagatttatctggagaagtacgtggaggaacctcgtcatatcgagtttcaaattttagcggataaacacggcaatgtgatccatctcggagagcgggactgctccctgcaaagaagaaatcagaaattgctggaggaggctccttccagcgcccttacccctgaactgcgtaaagctatgggagaagctgcagtaaaggctgccaaggccgctgattattccagtgccggaaccatcgaatttcttttagataagcatgggcattactattttattgagatgaatacgcgtattcaggtggagcacccggtgacagagtttgtaacaggaattgatctgctgaaggctcagattcgcgttgctgcgggagagcctttggggattgaacaggaagatgtgcaaattcgcggctgggctatggagtgccgcatcaatgctgagaactcggaaaagaactttatgccctctccgggaaccattgagttctatcacccgcccggcggtcccggggttcgggtggacagtgccgcttatcaaggctacaccatccctccctattatgattccatgatcggcaaattgatcgtctggggtgctgaccgggaagaagcgatccaaagaatgaagcgtgctttggaagagttttatattgaaggagtacacaccaccattcccttccatcttaaagtactggataatgcctttttccgccgtggggaagtctatactaactttatccaaaggcggattttaggggaatag

SEQ ID NO: 9911 - protein, 448 aa, Desulfitobacterium hafniense DCB-2
MFKKVLIANRGEIALRIIRACREMDIETVAVFSEADRDALHVREADQAVCIGPHPSTKSYLNIPNIISAAELTGVDAIHPGYGFLSENARFAEICESCGITFIGPSPRAIETMGDKATARKTMIEAGVPVVPGSKEVLTDVESASVLAKEIGYPVMIKASAGGGGKGMRIAQNPKELAKSIQAAQSEAQAAFGNSEIYLEKYVEEPRHIEFQILADKHGNVIHLGERDCSLQRRNQKLLEEAPSSALTPELRKAMGEAAVKAAKAADYSSAGTIEFLLDKHGHYYFIEMNTRIQVEHPVTEFVTGIDLLKAQIRVAAGEPLGIEQEDVQIRGWAMECRINAENSEKNFMPSPGTIEFYHPPGGPGVRVDSAAYQGYTIPPYYDSMIGKLIVWGADREEAIQRMKRALEEFYIEGVHTTIPFHLKVLDNAFFRRGEVYTNFIQRRILGE

SEQ ID NO: 9912 - DNA, 1341 bp, Alteromonadales bacterium TW-7
  CDS (1)..(1341): transl_table=11
atgttagataaagtagtcatagcaaaccgaggtgaaatagcacttcgtatattgcgcgcctgcaaagagcttgggatcaaaacggttgctgttcattcaacggcggatcgcgatcttaagcatgtattgcttgcagatgaaaccatctgtattggtaagccatcagcaacagatagttatttagatataccgcgcattattgctgcggctgaaataactgatgcggtagcgattcacccaggttatggttttcttgcagaaaacgcagattttgcagaccaagttgagcaaagtggttttgtatttattggaccaaaaggcgacacaattcgtctaatgggcgataaagtatctgctattgccgcaatgcgtaaagctggcgttccatgtgtaccgggttctgatggtcctgtaacagacgataacgaacgcaacatgcaaattgctaagcgcattggttatccggttattattaaagccgctggcggcggcggtggtcgtggtatgcgtgtagtacgcaatgaatctgaattagtaaattcaatttcactaacgcagcaagaagctaaacagttttttggtaatggtatggtttacatggagaaataccttgaaaacccacgtcatatcgaagtacaagtattagccgacggacaaggtaatgcagttcacttaggtgaacgcgattgttcaatgcagcgccgtcatcaaaaggtagttgaagaggctcctgctccaggcataacagctgaaacacgtaagtttattggtgagcgttgtacacgtgcgtgtattgaaattggttaccgtggcgcgggtacgtttgagtttttatacgaaaacggcgagttttacttcattgaaatgaatacccgtattcaggttgagcatccagtaacagaaatggttacgggtattgacttaatcaaagaacagctaaaaatagcagcgggtcagccattatcgttcacgcaagacgacgtcgttattcgtggccatgcgattgagtgtagaattaatgctgaagaccctgaaacgtttatcccgtcaccgggtaaaattacacgttttcaccccgctggtgggttaggtattcgttgggacagccatatttatgctgactacactgtaccacctcactacgattcaatggttggcaagctaattacttacggtgaaaaccgtgatgtggctattgcccgtgcacgtaatgcactaaacgaattagtaattgatggaattaaaactaatactcctttgcataagcgtattcttgcagatgagaatttccaaaatggtggaactaatatccactaccttgagaaaaagttagggttgtaa

SEQ ID NO: 9913 - protein, 446 aa, Alteromonadales bacterium TW-7
MLDKVVIANRGEIALRILRACKELGIKTVAVHSTADRDLKHVLLADETICIGKPSATDSYLDIPRIIAAAEITDAVAIHPGYGFLAENADFADQVEQSGFVFIGPKGDTIRLMGDKVSAIAAMRKAGVPCVPGSDGPVTDDNERNMQIAKRIGYPVIIKAAGGGGGRGMRVVRNESELVNSISLTQQEAKQFFGNGMVYMEKYLENPRHIEVQVLADGQGNAVHLGERDCSMQRRHQKVVEEAPAPGITAETRKFIGERCTRACIEIGYRGAGTFEFLYENGEFYFIEMNTRIQVEHPVTEMVTGIDLIKEQLKIAAGQPLSFTQDDVVIRGHAIECRINAEDPETFIPSPGKITRFHPAGGLGIRWDSHIYADYTVPPHYDSMVGKLITYGENRDVAIARARNALNELVIDGIKTNTPLHKRILADENFQNGGTNIHYLEKKLGL

SEQ ID NO: 9914 - DNA, 2040 bp, marine gamma proteobacterium HTCC2143
  CDS (1)..(2040): transl_table=11
gtgtttagcaaaattcttatcgcaaatcgcggtgaaatcgcctgtcgcgtgattaaaactgcccgtaaaatgggcatactaacggtcgccgtttattccgatgcagaccgcgatgcactgcatgtttcgatggctgatgaggctgtacacattggcgcgtccccctcacgcgaatcttatttgcacataccgaaagtcattgaagccgccctgcaaaccggcgctgaagctattcatcccggatacggatttctcagtgaaaatgcagccttctgccgagcctgcgaagacaataagctgacgtttatcggccctccaatcgcagcaatcgaggcgatgggatcaaagtctgcggctaaaaccatcatgggaaaagccaatgttcccctggttcctggttatcatggcaccgaccaaaatactgaaatattaaagcagcacgccgacgcaatgggctatcccgtgttattgaaagccgcggccggtggtggtggcaaaggtatgcgccaggtctggtctgcagaagcgtttgacgacgcactgattgccgctaagcgggagtcaatcaatgcgtttaacgatgatattatgttgattgaaaaatacctgatagcacctcgacacgttgaaattcaagtcttttgtgacaatcacgataacgctgtctatctcgcggaaagagattgttcaatacagcgtcgacatcaaaaagttattgaggaagcgcccgccccaggtgtatctgcctcgctgcgccagaagatgggagaaaccgccatcaaagcggcacaagccattgactatcgaggcgcaggaaccgtcgaattcttgctcgatagtgacggctcgttctattttatggaaatgaatacccgcttacaggtggaacacccggtcacggaaatgatcaccggtcaggatctggttgaatggcaacttcgagtcgccgccaatgagctgctgccgctgacccaatcagacataaaaatcgatggccatgcttttgaagcccgcatctacgcggaggatcccgccaatgattttttacccgtcacgggaatactttcccacttgcagatccctttggaaaatcggcatgtaagggtcgattccggagtgcgacaaggcaacgaagtcagcgtttattacgatccgatgattgccaaattgatagtctgggatgaagacagagataaggccttaggtcgactctgcaaagccttgtcggaataccgtatcagtggcatgaccactaacattgaatttctttataaccttagcagtagcgctccttttgcagcagcagaactggacacggggtttatcgaaaaacatcatgacaaaatttttcattcacgggaaaaagatgtcaaacaacagctacccatagctgcactctggcttgtcttacaacaacaacagactgccgaatataactcagcccattcagtagatacgtcttcaccctggcacttaacctcttcctggcgcatcaacgaagctcacaatcaacacttttctattgacctgcaagaccaggtcttcgatgtccaaatagaaaaaatcagtaataatcgctatcaaaagtcagctactggacctaacaacagccactaccgaatctgttatggcgaaactgttgtcgaggccagcggttatattatcggcgaccaacttcacagtgaggttaagggttatcggtcacaagcttcagtctctgaacacgatggcatgtatacactcttcacgctggcgtgtgccgttcagttcactgttataaaacctgatctgggggacaccactatcggcgccgatgctaacgctcttgtcgctcccatgaacggaactatcatcgaattactggtcaaaccgggtgatgttgtagaacaaggacaggctctcattgttatggaagcaatgaaaatggaacacaccatacgcgcacctatcaagggatcagtgtccgaattttactaccaacccggagatctggtggatggtggtgttgatctactggcgtttgagggagaacaactgtga

SEQ ID NO: 9915 - protein, 679 aa, marine gamma proteobacterium HTCC2143
MFSKILIANRGEIACRVIKTARKMGILTVAVYSDADRDALHVSMADEAVHIGASPSRESYLHIPKVIEAALQTGAEAIHPGYGFLSENAAFCRACEDNKLTFIGPPIAAIEAMGSKSAAKTIMGKANVPLVPGYHGTDQNTEILKQHADAMGYPVLLKAAAGGGGKGMRQVWSAEAFDDALIAAKRESINAFNDDIMLIEKYLIAPRHVEIQVFCDNHDNAVYLAERDCSIQRRHQKVIEEAPAPGVSASLRQKMGETAIKAAQAIDYRGAGTVEFLLDSDGSFYFMEMNTRLQVEHPVTEMITGQDLVEWQLRVAANELLPLTQSDIKIDGHAFEARIYAEDPANDFLPVTGILSHLQIPLENRHVRVDSGVRQGNEVSVYYDPMIAKLIVWDEDRDKALGRLCKALSEYRISGMTTNIEFLYNLSSSAPFAAAELDTGFIEKHHDKIFHSREKDVKQQLPIAALWLVLQQQQTAEYNSAHSVDTSSPWHLTSSWRINEAHNQHFSIDLQDQVFDVQIEKISNNRYQKSATGPNNSHYRICYGETVVEASGYIIGDQLHSEVKGYRSQASVSEHDGMYTLFTLACAVQFTVIKPDLGDTTIGADANALVAPMNGTIIELLVKPGDVVEQGQALIVMEAMKMEHTIRAPIKGSVSEFYYQPGDLVDGGVDLLAFEGEQL

SEQ ID NO: 9916 - DNA, 1347 bp, marine gamma proteobacterium HTCC2080
  CDS (1)..(1347): transl_table=11
atgttagatagagttttgatcgccaaccgaggcgaaattgccctgaggattttgcgcgcttgccgagagttaggcattgagacggttgcggttcattcaacggcagatcgtgaattgaagcatgtccgccttgctgatcaggccgtttgtattggaccgccaaattcaacgctgagttatttgaatgtgcctgcgattattagtgtggctgaggtgacaaatactgacgccatccacccgggctatggattcttgtccgaaaatgccgatttcgccgagcaggtcgagaagagtggctttgtatttattggtcccactgcagaaaccattcgcctgatgggtgacaaagtgtcggcaaagcaccaaatgcaacgctctggtgtgccaacggtgccgggttcagagggggctgttcccgaggaccccgacgaagttttacgtattgctcgagatattggctaccccgttattgtgaaggctgcagcgggtggaggcgggcgtggtatgcgtgtagtgcacaacgaggaagtgctgctcagctcgattcaggtgacgcagtctgaggctaaggcagcttttggatcaccggtggtttatatcgagaagttcctccaacggccgcgtcacgtagagattcagattcttgccgacggtcagggcaacgccattcacttgggtgatcgcgactgctcgctgcagcggcgtcaccagaaagttattgaagaggcgccggcacccggtattgatgagaagctgcgcgctgaaatcggcgatgcctgcgtcaaagcctgtatcgacattggttatcgcggcgccggtacgtttgagtttttgtacgaagacggcggtttttatttcattgagatgaatacgcgggttcaggtagagcatccggtaaccgagatgattactggcgtggatattgtccgagagcaattactgattgcctcaggtgaaaagctctcgattcgtcaggaagatgtggtgttcaaagggcacgctttagagtgtcgaatcaatgccgaagacccccgaaacttcttaccttctcctggcaggatcaacacctttcatgcgccgggtggccctggggttcgtgttgattcacacgtttacagtggttacaccgtgcctccccattacgacagcctgatcggcaagctgatcacccatggggatacccgtgctggggcgctggttaaaatgcgtcaggcccttgatgagctggtcgtcgagggtatccgaactaactcagcgcttcaccgacagttggttgttgacccttcatttatggcgggtggtgtcagcattcactacctcgagagtaagctggaacacgagaattga

SEQ ID NO: 9917 - protein, 448 aa, marine gamma proteobacterium HTCC2080
MLDRVLIANRGEIALRILRACRELGIETVAVHSTADRELKHVRLADQAVCIGPPNSTLSYLNVPAIISVAEVTNTDAIHPGYGFLSENADFAEQVEKSGFVFIGPTAETIRLMGDKVSAKHQMQRSGVPTVPGSEGAVPEDPDEVLRIARDIGYPVIVKAAAGGGGRGMRVVHNEEVLLSSIQVTQSEAKAAFGSPVVYIEKFLQRPRHVEIQILADGQGNAIHLGDRDCSLQRRHQKVIEEAPAPGIDEKLRAEIGDACVKACIDIGYRGAGTFEFLYEDGGFYFIEMNTRVQVEHPVTEMITGVDIVREQLLIASGEKLSIRQEDVVFKGHALECRINAEDPRNFLPSPGRINTFHAPGGPGVRVDSHVYSGYTVPPHYDSLIGKLITHGDTRAGALVKMRQALDELVVEGIRTNSALHRQLVVDPSFMAGGVSIHYLESKLEHEN

SEQ ID NO: 9918 - DNA, 1500 bp, Candidatus Desulfococcus oleovorans Hxd3
  CDS (1)..(1500): transl_table=11
atgtttaataaaattctgatcgccaaccggggggagattgccgtgcgggtcatggccacctgccgggagatggacattgcaacggtggccgtctattcggatgttgatgcagaggccctgcaccggctttgcgccgacgaggcggtgtgcatcggcaggcctgacccggcggacagttatctgaacggcgcaaaaatcattgacgcggccaaaaagaccggcgcccaggccattcatccgggctacgggtttctggcggaaaatgccgaattcgcgcaactgtgcgaagccagcggcatcgtgtttatcgggccgccgtcaacggtgatccgcagcctgggcgataaaaccgtggcccggcaaatcatggccggcagcggcgttccagtgattcccggcatgaacatgccggagtccgattttaaaaagatggcggcccatgccgagatcatcggttacccggtgctggtaaaggcggctgccggcggcggcggcaagggcatgcgcatcgttaccgacccggcccatctttccgaggccctggccgcagcgtccggcgaggcggcggccgcctttggcaatggggcaatctatcttgaaaaatatatcgcccggccccggcacgtggagatccaggtgctggccgaccggttcggccacacggtgcacctgggcgagcgggagtgctccattcagcgccgccaccagaagattatcgaggagaccccgagcacggccctgaccccggacctgcgggaggccatgggccgggctgctgtgcaggcggcggaggccgccggttacgtgaacgcgggcaccgtggaattcctggtggatgaacagaaaaatttttattttctggaggtcaacacccggcttcaggtggagcaccccatcaccgaactggtgaccggcattgacctggtgcgccggcagatcgaaatcgccgccggtgaaaaactcgatcttgtccagaaagatattcaggcccggggccatgccattgagtgtcgtatctatgccgaggacccggaaaacaactttatgccgtcacccggccggatcgcgctgctggaagaacccagggggccgggcattcgcaacgactgcggcgtgtatgccggttttaccgtgccaatggagtatgatcccatcctgtccaagctggtggtgcatgccggcacccgccaggcagccattgaccgcatgaaaaaggccctgtccgactaccggatcgccggcattcgcacgccgatttcgtttttaatggaagtggtcgattcagcgccgtttcgaaacggtgaaacctttaccgattttttggacacccatttttctgagtggaaaccggcccaggcagacaacacactggcggccctggcctttattgcccacaccatgtgggccagaacacccgtggtctcggaaccgggaaccggcactggcgggaatggcggagttccatccccgtggcagacattgggccactggcggctttaa

SEQ ID NO: 9919 - protein, 499 aa, Candidatus Desulfococcus oleovorans Hxd3
MFNKILIANRGEIAVRVMATCREMDIATVAVYSDVDAEALHRLCADEAVCIGRPDPADSYLNGAKIIDAAKKTGAQAIHPGYGFLAENAEFAQLCEASGIVFIGPPSTVIRSLGDKTVARQIMAGSGVPVIPGMNMPESDFKKMAAHAEIIGYPVLVKAAAGGGGKGMRIVTDPAHLSEALAAASGEAAAAFGNGAIYLEKYIARPRHVEIQVLADRFGHTVHLGERECSIQRRHQKIIEETPSTALTPDLREAMGRAAVQAAEAAGYVNAGTVEFLVDEQKNFYFLEVNTRLQVEHPITELVTGIDLVRRQIEIAAGEKLDLVQKDIQARGHAIECRIYAEDPENNFMPSPGRIALLEEPRGPGIRNDCGVYAGFTVPMEYDPILSKLVVHAGTRQAAIDRMKKALSDYRIAGIRTPISFLMEVVDSAPFRNGETFTDFLDTHFSEWKPAQADNTLAALAFIAHTMWARTPVVSEPGTGTGGNGGVPSPWQTLGHWRL

SEQ ID NO: 9920 - DNA, 1416 bp, Pseudomonas putida GB-1
  CDS (1)..(1416): transl_table=11
gtgataaaaaaaatcctgatcgccaaccgaggtgaaatcgcagttcggatcgtgcgtgcctgcgccgagatgggcatacgctcggtagcgatcttttccgacgccgaccggcatgccttgcacgtcaagcgcgccgacgaagcccacagcattggtgccgagccgctggccggctacctgaacccgcgcaagctggtgaacctggctgtggaaaccggttgtgatgccctgcacccgggctatggttttttgtcggaaaacgctgaactggcagagatctgcgccgagcgcgggatcaagttcatcggcccggccgccgacgtgattcgccgcatgggcgacaagaccgaagcgcgccgcaccatgatcgccgctggtgtgccggtcacccctggcaccgaaggcaacgttgccgatattcatgaagccttgagcgaaggcgagcgcatcggttacccggtgatgctcaaggccacctccggtggtggcggtcgcggtattcgccgttgcaacagccgcgaagaactggaacagaacttcccacgggtgatttccgaggcgaccaaggcctttggttcggctgaagtgttcctggaaaagtgcatcgtcaaccccaagcacatcgaggcgcagatcctcggtgacagctttggcaacgtggtgcacctgttcgagcgcgactgctcgatccagcgccgtaaccagaaactcatcgaaatcgccccaagcccccagctcacccccgagcagcgcgcctacattggcgacctggcagtgcgtgcggccaaggcggtgaactacgagaacgccggtaccgtggagtttctgctcgccgatggcgaggtgtacttcatggaaatgaacacccgggtgcaggtggaacacaccatcaccgaggaaatcaccggtatcgacatcgtccgtgagcagattcgcattgcctcgggcttgccgctgtcggtcaagcaagaagacattcagcaccgcggttacgcgttgcagttccgtatcaacgccgaagacccgaagaacaacttcctgccaagtttcggcaagatcacccgttactacgcccccggcggccccggcgtgcgtaccgacacggcgatctacaccggctacaccattccgccgttctacgactccatgtgcctgaaactggtggtgtgggcgttgacctgggaagaagccatggaccgcggcctgcgggccctggacgacatgcgcgtgcaaggggtgaagaccaccgccgcgtactaccaggaaatcctgcgcaatccggaattccgtagcggccagttcaataccagcttcgtcgaaagccaccctgaactgaccaactactcgatcaagcgcaaacccgaagagctggccctggccatcgccgccgccatcgccgcccacgcaggcctgtga

SEQ ID NO: 9921 - protein, 471 aa, Pseudomonas putida GB-1
MIKKILIANRGEIAVRIVRACAEMGIRSVAIFSDADRHALHVKRADEAHSIGAEPLAGYLNPRKLVNLAVETGCDALHPGYGFLSENAELAEICAERGIKFIGPAADVIRRMGDKTEARRTMIAAGVPVTPGTEGNVADIHEALSEGERIGYPVMLKATSGGGGRGIRRCNSREELEQNFPRVISEATKAFGSAEVFLEKCIVNPKHIEAQILGDSFGNVVHLFERDCSIQRRNQKLIEIAPSPQLTPEQRAYIGDLAVRAAKAVNYENAGTVEFLLADGEVYFMEMNTRVQVEHTITEEITGIDIVREQIRIASGLPLSVKQEDIQHRGYALQFRINAEDPKNNFLPSFGKITRYYAPGGPGVRTDTAIYTGYTIPPFYDSMCLKLVVWALTWEEAMDRGLRALDDMRVQGVKTTAAYYQEILRNPEFRSGQFNTSFVESHPELTNYSIKRKPEELALAIAAAIAAHAGL

SEQ ID NO: 9922 - DNA, 1356 bp, Pseudomonas putida GB-1
  CDS (1)..(1356): transl_table=11
atgtctgggaagctcgaaaaagtcctgatcgccaaccgtggggaaattgccctgcggatcctgcgtgcctgcaaagagctgggcatcaaaaccgtcgctgtgcactccaccgccgaccgtgagctgatgcacctgggcctggcagacgagtcggtctgcatcggtcctgcatcgtccaaggattcctacctgcatatcccggcaatcatcgctgccgccgaagtcaccggcgccaccgcgattcacccgggctacggcttcctggcagaaaacgccgacttcgccgaacaggtagaaaaatccggcttcgccttcatcggcccgaaagccgacaccattcgcctgatgggtgacaaggtttcggccaaggacgcgatgatcaagtcgggcgtaccgaccgtaccaggctccgatggcccgctgccggaagacgaagaagtcgccctggcgattgcccgtgacgtcggctacccggtgatcatcaaagccgccggtggtggtggtggtcgcggcatgcgcgtggtgcacaaggaagaggacctgatttcctcggccaagctcacccgtaccgaagccggtgctgccttcggcaacccgatggtctacctggagaagttcctgaccaacccacgtcacgtggaagtgcaggtgctgtccgacggccagggcaacgccatccacctgggcgaccgcgactgctcgttgcagcgccgtcaccagaaggtactggaagaagcaccagccccgggcatcgacgaaaaggcccgtcaggaagtgttcaagcgctgcgtcgatgcgtgcatcgagatcggctaccgtggtgccggtactttcgagttcctgtacgaaaacggccgcttctacttcatcgagatgaacacccgcgtgcaggttgagcacccggtgtcggagatggttaccggtatcgacatcgtcaaggagatgctgagcatcgccgctggcaacaagctgtcgttccgccaggaagacgtggtgatccgtggccactcgctggagtgccggatcaacgcagaagacccgaagaagttcatcccaagcccaggcaaggtgaagcacttccacgcaccaggcggcaatggcgtgcgtgtcgattcgcacctgtacagcggttattcggttccgccgaactacgactcgctgatcggcaagctgatcacctacggcaaggaccgcgacgaagccatggcgcgcatgcgcaatgccctggacgagatcgtcgtcgacggcatcaagaccaacatcccgctgcaccgcgacctggtgcgtgatgaaggtttctgcaaaggcggcgtcaacattcactacctcgaacacaagctggccaacgagcattga

SEQ ID NO: 9923 - protein, 451 aa, Pseudomonas putida GB-1
MSGKLEKVLIANRGEIALRILRACKELGIKTVAVHSTADRELMHLGLADESVCIGPASSKDSYLHIPAIIAAAEVTGATAIHPGYGFLAENADFAEQVEKSGFAFIGPKADTIRLMGDKVSAKDAMIKSGVPTVPGSDGPLPEDEEVALAIARDVGYPVIIKAAGGGGGRGMRVVHKEEDLISSAKLTRTEAGAAFGNPMVYLEKFLTNPRHVEVQVLSDGQGNAIHLGDRDCSLQRRHQKVLEEAPAPGIDEKARQEVFKRCVDACIEIGYRGAGTFEFLYENGRFYFIEMNTRVQVEHPVSEMVTGIDIVKEMLSIAAGNKLSFRQEDVVIRGHSLECRINAEDPKKFIPSPGKVKHFHAPGGNGVRVDSHLYSGYSVPPNYDSLIGKLITYGKDRDEAMARMRNALDEIVVDGIKTNIPLHRDLVRDEGFCKGGVNIHYLEHKLANEH

SEQ ID NO: 9924 - DNA, 1953 bp, Pseudomonas putida GB-1
  CDS (1)..(1953): transl_table=11
atgagccgccccgttttgaccaccctgctggtcgccaaccgcggcgaaatcgcctgccgggtgatgcgcaccgccaaggccatgggcctgaccaccgtggccgtgcacagcgccaccgaccgtgacgcccggcacagccgcgaagccgacatccgcgtcgacctcggcggcaccaaggctgccgaaagctacctgcaggtcgacaaactgctggccgcggccaaggccagcggcgcccaggccatccacccaggttatggcttcctgtccgagaacgcaggttttgcccgggccatcgaacaagccgggctgattttcctcggcccaccggccagcgccatcgacgccatgggcagcaaatcggcggccaaggcgttgatggaggctgccggcgtaccgctggtgccgggctaccacggtgaagcccaggacctggacaccttccgcgccgccgccgaacgcatcggctacccagtgctgctcaaggccagcgccggtggcggtggcaagggcatgaaggtggtcgaggaagaaagccagctggccgacgccctggcctcggcccagcgtgaggcgcaatcgtcgttcggcgactcgcgcatgctggtggaaaaatacgtgctcaaaccgcgccacgtagagatccaggtgttcgccgaccaacacggcaactgcctgtacctcaacgagcgtgactgctcgatccagcgccgccaccagaaagtggtcgaagaagctcccgcccccggcctctcgccagaactgcgccgtgccatgggcgaagccgcagtgcgcgcggcacaagccatcggctatgtgggcgccggcaccgtggagtttctgctcgacgcccgtggcgagttcttcttcatggagatgaacacgcgcctgcaggtggagcacccggtcaccgaagccattaccggcctggacctggtggcctggcaaattcgcgtggcctgcggcgaagccctgccgatcacccaggagcaggtgccgctgatcggccatgccatcgaggtgcgcctgtatgccgaggacccggccagcgaattcttgcccgcaaccggcaagctgatgttgtatcgggagtcggcgccaggcgagggccggcgggtggacagcggggtcagcgaaggcgatgtggtgtcgccgttctacgacccgatgctgggcaagctgatcgcctggggcgaaaaccgcgagcaggcgcgcctgcgcttgctggccatgctcgacgagttcgccattggcgggctgaagaccaacatcgccttcctgcgccgcatcctggcccacccggcgtttgcggcggcggagctggataccggcttcattccgcgccaccaggcggttttgctgccggcaccacaggcaatgccagcaggtttctgggaggcggcggccgaggcatggctgcaaggccaggccggccatcaccgcgatgacgactgccattcgccgtggggtgagtgcaacggcctgcgcttgggcctgccagcgcgtagcagcctgcatctggtgagcggcgggcaggatcaggcggttgccttggaacgcagtgctgcgtctacctggcagctaacgggcgaacaactgctgcatgaccaggacggcgtacgtcgtcagcacctggccatccgccggggtggcacgctgtatctgcagtgggatggcgagatgcatgccatcgaagccttcgacccgatcgcgcaggcggaagccagccacagtcatcagggcgggctgggtgcgcccatgaacggcagcatcgtgcgggtgctggtggaaccgggacaggtggtggaagcaggcaccgcgctggtggtgctggaggccatgaaaatggagcacagcattcgtgcgccgcattcaggcacagtgaaggcattgttctgccaagaaggcgatatggtcagcgaagggacggtgctggtcgaactggtggagtaa

SEQ ID NO: 9925 - protein, 650 aa, Pseudomonas putida GB-1
MSRPVLTTLLVANRGEIACRVMRTAKAMGLTTVAVHSATDRDARHSREADIRVDLGGTKAAESYLQVDKLLAAAKASGAQAIHPGYGFLSENAGFARAIEQAGLIFLGPPASAIDAMGSKSAAKALMEAAGVPLVPGYHGEAQDLDTFRAAAERIGYPVLLKASAGGGGKGMKVVEEESQLADALASAQREAQSSFGDSRMLVEKYVLKPRHVEIQVFADQHGNCLYLNERDCSIQRRHQKVVEEAPAPGLSPELRRAMGEAAVRAAQAIGYVGAGTVEFLLDARGEFFFMEMNTRLQVEHPVTEAITGLDLVAWQIRVACGEALPITQEQVPLIGHAIEVRLYAEDPASEFLPATGKLMLYRESAPGEGRRVDSGVSEGDVVSPFYDPMLGKLIAWGENREQARLRLLAMLDEFAIGGLKTNIAFLRRILAHPAFAAAELDTGFIPRHQAVLLPAPQAMPAGFWEAAAEAWLQGQAGHHRDDDCHSPWGECNGLRLGLPARSSLHLVSGGQDQAVALERSAASTWQLTGEQLLHDQDGVRRQHLAIRRGGTLYLQWDGEMHAIEAFDPIAQAEASHSHQGGLGAPMNGSIVRVLVEPGQVVEAGTALVVLEAMKMEHSIRAPHSGTVKALFCQEGDMVSEGTVLVELVE

SEQ ID NO: 9926 - DNA, 1341 bp, Marinobacter sp. ELB17
  CDS (1)..(1341): transl_table=11
atgttagaaaaagtattgatcgcaaaccgcggtgaaattgccctgcgaattttgcgcgcctgtaaagaattaggtatcaaaaccgtcgccgtgcactctcaggtcgaccgcgacctgatgcacgtacgtttagccgatgaaaccgtctgtatcggccccaacagcccgaccgacagctacctgaatatccctgccattatcagcgcggcggaagtaaccgactcagtgggcatccaccccggttacggctttttggcggaaaacgccgactttgccgagcaggtcgaaaaaagcgggttccgctttatcggccccagagccgagaccattcggctgatgggcaacaaagtgtcggccatcaacgccatgatcagtgcaggcgtacccaccgttccgggctctaacggcgcgctgaccgaagacgacgacctgactctcaaagtcgctaaaaaaattggctacccggtgattatcaaagccgcatcgggcggcggcggtcgcggtatgcaggtggtgcattcagaagccgcattgctcaaggccgtacagattacccaaaccgaagctcgcagcgcgtttggcgacccgaccgtgtaccttgaaaaattccttgagcgcccgcgccacgtggaagttcaggtactggcagacatgcacggcaactgcattcacttgggcgaccgcgactgctcgttccagcgccgtcaccagaaagtgttggaagaagcgccggcgccgggtattgaccccgaagccagggaaaaaaccctgaaagcttgtgttgatgcctgtaaggaaattggctatgtgggtgccggcaccttcgaattcctgtatcaggacggtggtttctacttcatcgaaatgaacacccgcgtgcaggttgagcacccggtatcagaaatggtgaccggcgtggatatcgtgcgcgaacagctgcgtatcgccagcggcctgccattgcagtacacgcaggacgacatcaagattaccgggcacgccatcgagtgccgaatcaacgcagaagatccccaaacttttgtgcccagccctggtaaagtgaagcactttcacgctcccggcggtaacggtgtgcgggtggattcgcacctttacagtggttacaccgtaccgccctactacgattcgctgatcgccaaactgatcacctggggtgacgaccgcgaaatagcgcgtcggcgcatgaaaaacgccctcgacgagatggtggttgaaggcattaaaaccaatcagccgctgcaccgcagattggtgcgcgatggcggctttaaacaggtagacttcaccattcattatcttgaaaaactgattcaggactga

SEQ ID NO: 9927 - protein, 446 aa, Marinobacter sp. ELB17
MLEKVLIANRGEIALRILRACKELGIKTVAVHSQVDRDLMHVRLADETVCIGPNSPTDSYLNIPAIISAAEVTDSVGIHPGYGFLAENADFAEQVEKSGFRFIGPRAETIRLMGNKVSAINAMISAGVPTVPGSNGALTEDDDLTLKVAKKIGYPVIIKAASGGGGRGMQVVHSEAALLKAVQITQTEARSAFGDPTVYLEKFLERPRHVEVQVLADMHGNCIHLGDRDCSFQRRHQKVLEEAPAPGIDPEAREKTLKACVDACKEIGYVGAGTFEFLYQDGGFYFIEMNTRVQVEHPVSEMVTGVDIVREQLRIASGLPLQYTQDDIKITGHAIECRINAEDPQTFVPSPGKVKHFHAPGGNGVRVDSHLYSGYTVPPYYDSLIAKLITWGDDREIARRRMKNALDEMVVEGIKTNQPLHRRLVRDGGFKQVDFTIHYLEKLIQD

SEQ ID NO: 9928 - DNA, 1347 bp, Actinomadura hibisca
  CDS (1)..(1347): transl_table=11
gtgttctcctcggtgctgatcgccaaccgcggcgagatcgcgctgcgcgtcgcgcgcacctgccgcgagctgggcatccgcgtgatcatggtgtactcgaccgccgaccgggactccccggcgttgcggctggccgacgagcgggtgcacatcggcccgcccgccgccgcgcgcagctaccgctacgcgcccgccatcctggaggccgcgcggcagaccggcgcggaggcggtccaccccgggtacgggttcctgtccgaggaccccgatttcgcgcgggcgtgcgagtcggaggggctgacgttcatcggtccgcccgcgtcggtgctggcgcagctcggtgacaagtcgctcgcgcgcgaggccgccgtggaggcgggactgccggtgctgccgggccgcgtccgtcccctggaggacggcaagtccgcccggcgcgcggccgaggaggcgggttacccggtcatcatcaaggccgtggcgggcggcggcgggcgcggcatgacgatcgtgcgcgacccggacgacctgctgcgcgcctacgccgagacccgcgcgaccgcgttcgccctgttcggcgacggccgggtctacctggagcggtacctcgaaggcgcgcggcacgtcgaggtgcaggtgctcgccgacgggcacgggaccgtgctcgcgctcggggcccgagactgctcggtgcagcgccgccgccagaagctggtggaggagagcccggcccccggcctgccggacggcctggtcgagcagatgtgcgaggcggcggtgcagggcgcgcgtgccgccgggtatgtcggcgcgggcacctacgagttcctggtcggcgacgacggcttctacttcatggaggtcaactcccgcatccaggtcgagcacccggtgaccgagatggtcaccggcgtggacctggtgcgcgagcagctcgtcgccgcctccggcgggcggttgtcggtcggcccggacgacgtgcgcccgcgtggcgcggcgatcgagtgccgcatcaacgtcgaggaccccgaccgcggcttcctgcccacgccggggctgatcgaggtgttcgacgcgcccggcggcccgttcactcggatcgacacccacgccgctccgggtctgcgggtgcccgccgactacgacccgctgctcgccaaggtcgtcgtctgggaccgcgaccgggacgccgcgatcgcgcggatggaccgcgccctcgccgagctgcgcgtcaccggccccggcgtccacaccacgaccgggttcctgcgcgaggtgctcgcgcacccgctgttccgcgccgccaagcacaccaccggcctggtcgacaccatggtcgtcgattag

SEQ ID NO: 9929 - protein, 448 aa, Actinomadura hibisca
MFSSVLIANRGEIALRVARTCRELGIRVIMVYSTADRDSPALRLADERVHIGPPAAARSYRYAPAILEAARQTGAEAVHPGYGFLSEDPDFARACESEGLTFIGPPASVLAQLGDKSLAREAAVEAGLPVLPGRVRPLEDGKSARRAAEEAGYPVIIKAVAGGGGRGMTIVRDPDDLLRAYAETRATAFALFGDGRVYLERYLEGARHVEVQVLADGHGTVLALGARDCSVQRRRQKLVEESPAPGLPDGLVEQMCEAAVQGARAAGYVGAGTYEFLVGDDGFYFMEVNSRIQVEHPVTEMVTGVDLVREQLVAASGGRLSVGPDDVRPRGAAIECRINVEDPDRGFLPTPGLIEVFDAPGGPFTRIDTHAAPGLRVPADYDPLLAKVVVWDRDRDAAIARMDRALAELRVTGPGVHTTTGFLREVLAHPLFRAAKHTTGLVDTMVVD

SEQ ID NO: 9930 - DNA, 6984 bp, Oryza sativa subsp
  CDS (1)..(6984)
atgacatccacacatgtggcgacattgggagttggtgcccaggcacctcctcgtcaccagaaaaagtcagctggcactgcatttgtatcatctgggtcatcaagaccctcataccgaaagaatggtcagcgtactcggtcacttagggaagaaagcaatggaggagtgtctgattccaaaaagcttaaccactctattcgccaaggtcttgctggcatcattgacctcccaaatgacgcagcttcagaagttgatatttcacatggttccgaagatcccagggggcctacggtcccaggttcctaccaaatgaatgggattatcaatgaaacacataatgggaggcatgcttcagtctccaaggttgttgagttttgtacggcacttggtggcaaaacaccaattcacagtgtattagtggccaacaatggaatggcagcagctaagttcatgcggagtgtccgaacatgggctaatgatacttttggatcagagaaggcaattcagctgatagctatggcaactccggaggatctgaggataaatgcagagcacatcagaattgccgatcaatttgtagaggtacctggtggaacaaacaacaacaactatgcaaatgtccaactcatagtggagatagcagagagaacaggtgtttctgctgtttggcctggttggggtcatgcatctgagaatcctgaacttccagatgcgctgactgcaaaaggaattgtttttcttgggccaccagcatcatcaatgcatgcattaggagacaaggttggctcagctctcattgctcaagcagctggagttccaacacttgcttggagtggatcacatgtggaagttcctctggagtgttgcttggactcaatacctgatgagatgtatagaaaagcttgtgttactaccacagaggaagcagttgcaagttgtcaggtggttggttatcctgccatgattaaggcatcttggggtggtggtggtaaaggaataaggaaggttcataatgatgatgaggttaggacattatttaagcaagttcaaggcgaagtacctggttccccaatatttatcatgaggctagctgctcagagtcgacatcttgaagttcagttgctttgtgatcaatatggcaacgtagcagcacttcacagtcgagattgcagtgtacaacggcgacaccaaaagataatcgaggaaggaccagttactgttgctcctcgtgagactgtgaaagagcttgagcaggcagcacggaggcttgctaaagctgtgggttatgttggtgctgctactgttgaatacctttacagcatggaaactggtgaatattattttctggaacttaatccacggctacaggttgagcatcctgtcactgagtggatagctgaagtaaatttgcctgcggctcaagttgctgttggaatgggtatacccctttggcagattccagagatcaggcgcttctacggaatgaaccatggaggaggctatgacctttggaggaaaacagcagctctagcgactccatttaactttgatgaagtagattctaaatggccaaaaggccactgcgtagctgttagaataactagcgaggatccagatgatgggtttaagcctactggtggaaaagtaaaggagataagtttcaagagtaaaccaaatgtttgggcctatttctcagtaaagtctggtggaggcatccatgaattcgctgattctcagttcggacatgtttttgcgtatggaactactagatcggcagcaataactaccatggctcttgcactaaaagaggttcaaattcgtggagaaattcattcaaacgtagactacacagttgacctattaaatgcctcagattttagagaaaataagattcatactggttggctggataccaggatagccatgcgtgttcaagctgagaggcctccatggtatatttcagtcgttggaggggctttatataaaacagtaactgccaacacggccactgtttctgattatgttggttatcttaccaagggccagattccaccaaagcatatatcccttgtctatacgactgttgctttgaatatagatgggaaaaaatatacaatcgatactgtgaggagtggacatggtagctacagattgcgaatgaatggatcaacggttgacgcaaatgtacaaatattatgtgatggtgggcttttaatgcagctggatggaaacagccatgtaatttatgctgaagaagaggccagtggtacacgacttcttattgatggaaagacatgcatgttacagaatgaccatgacccatcaaagttattagctgagacaccatgcaaacttcttcgtttcttggttgctgatggtgctcatgttgatgctgatgtaccatatgcggaagttgaggttatgaagatgtgcatgcccctcttatcacccgcttctggtgtcatacatgttgtaatgtctgagggccaagcaatgcaggctggtgatcttatagctaggctggatcttgatgacccttctgctgttaagagagctgagccgttcgaagatacttttccacaaatgggtctccctattgctgcttctggccaagttcacaaattatgtgctgcaagtctgaatgcttgtcgaatgatccttgcggggtatgagcatgatattgacaaggttgtgccagagttggtatactgcctagacactccggagcttcctttcctgcagtgggaggagcttatgtctgttttagcaactagacttccaagaaatcttaaaagtgagttggagggcaaatatgaggaatacaaagtaaaatttgactctgggataatcaatgatttccctgccaatatgctacgagtgataattgaggaaaatcttgcatgtggttctgagaaggagaaggctacaaatgagaggcttgttgagcctcttatgagcctactgaagtcatatgagggtgggagagaaagtcatgctcactttgttgtcaagtccctttttgaggagtatctctatgttgaagaattgttcagtgatggaattcagtctgatgtgattgagcgtctgcgccttcaacatagtaaagacctacagaaggtcgtagacattgtgttgtcccaccagagtgttagaaataaaactaagctgatactaaaactcatggagagtctggtctatccaaatcctgctgcctacagggatcaattgattcgcttttcttcccttaatcacaaagcgtattacaagttggcacttaaagctagtgaacttcttgaacaaacaaaacttagtgagctccgtgcaagaatagcaaggagcctttcagagctggagatgtttactgaggaaagcaagggtctctccatgcataagcgagaaattgccattaaggagagcatggaagatttagtcactgctccactgccagttgaagatgcgctcatttctttatttgattgtagtgatacaactgttcaacagagagtgattgagacttatatagctcgattataccagcctcatcttgtaaaggacagtatcaaaatgaaatggatagaatcgggtgttattgctttatgggaatttcctgaagggcattttgatgcaagaaatggaggagcggttcttggtgacaaaagatggggtgccatggtcattgtcaagtctcttgaatcactttcaatggccattagatttgcactaaaggagacatcacactacactagctctgagggcaatatgatgcatattgctttgttgggtgctgataataagatgcatataattcaagaaagtggtgatgatgctgacagaatagccaaacttcccttgatactaaaggataatgtaaccgatctgcatgcctctggtgtgaaaacaataagtttcattgttcaaagagatgaagcacggatgacaatgcgtcgtaccttcctttggtctgatgaaaagctttcttatgaggaagagccaattctccggcatgtggaacctcctctttctgcacttcttgagttggacaagttgaaagtgaaaggatacaatgaaatgaagtataccccatcacgggatcgtcaatggcatatctacacacttagaaatactgaaaaccccaaaatgttgcaccgggtatttttccgaacccttgtcaggcaacccagtgtatccaacaagttttcttcgggccagattggtgacatggaagttgggagtgctgaagaacctctgtcatttacatcaaccagcatattaagatctttgatgactgctatagaggaattggagcttcacgcaattagaactggccattcacacatgtatttgcatgtattgaaagaacaaaagcttcttgatcttgttccagtttcagggaatacagttttggatgttggtcaagatgaagctactgcatattcacttttaaaagaaatggctatgaagatacatgaacttgttggtgcaagaatgcaccatctttctgtatgccaatgggaagtgaaacttaagttggactgcgatggtcctgccagtggtacctggaggattgtaacaaccaatgttactagtcacacttgcactgtggatatctaccgtgagatggaagataaagaatcacggaagttagtataccatcccgccactccggcggctggtcctctgcatggtgtggcactgaataatccatatcagcctttgagtgtcattgatctcaaacgctgttctgctaggaataatagaactacatactgctatgattttccactggcatttgaaactgcagtgaggaagtcatggtcctctagtacctctggtgcttctaaaggtgttgaaaatgcccaatgttatgttaaagctacagagttggtatttgcggacaaacatgggtcatggggcactcctttagttcaaatggaccggcctgctgggctcaatgacattggtatggtagcttggaccttgaagatgtccactcctgaatttcctagtggtagggagattattgttgttgcaaatgatattacgttcagagctggatcatttggcccaagggaagatgcattttttgaagctgttaccaacctagcctgtgagaagaaacttcctcttatttatttggcagcaaattctggtgctcgaattggcatagcagatgaagtgaaatcttgcttccgtgttgggtggtctgatgatggcagccctgaacgtgggtttcagtacatttatctaagcgaagaagactatgctcgtattggcacttctgtcatagcacataagatgcagctagacagtggtgaaattaggtgggttattgattctgttgtgggcaaggaagatggacttggtgtggagaatatacatggaagtgctgctattgccagtgcttattctagggcatataaggagacatttacacttacatttgtgactggaagaactgttggaataggagcttatcttgctcgacttggcatccggtgcatacagcgtcttgaccagcctattattcttacaggctattctgcactgaacaagcttcttgggcgggaagtgtacagctcccacatgcagttgggtggtcccaaaatcatggcaactaatggtgttgtccatcttactgtttcagatgaccttgaaggcgtttctaatatattgaggtggctcagttatgttcctgcctacattggtggaccacttccagtaacaacaccgttggacccaccggacagacctgttgcatacattcctgagaactcgtgtgatcctcgagcggctatccgtggtgttgatgacagccaagggaaatggttaggtggtatgtttgataaagacagctttgtggaaacatttgaaggttgggctaagacagtggttactggcagagcaaagcttggtggaattccagtgggtgtgatagctgtggagactcagaccatgatgcaaactatccctgctgaccctggtcagcttgattcccgtgagcaatctgttcctcgtgctggacaagtgtggtttccagattctgcaaccaagactgcgcaggcattgctggacttcaaccgtgaaggattacctctgttcatcctcgctaactggagaggcttctctggtggacaaagagatctttttgaaggaattcttcaggctggctcgactattgttgagaaccttaggacatacaatcagcctgcctttgtctacattcccatggctgcagagctacgaggaggggcttgggttgtggttgatagcaagataaacccagaccgcattgagtgctatgctgagaggactgcaaaaggcaatgttctggaaccgcaagggttaattgagatcaagttcaggtcagaggaactccaggattgcatgagtcggcttgacccaacattaattgatctgaaagcaaaactcgaagtagcaaataaaaatggaagtgctgacacaaaatcgcttcaagaaaatatagaagctcgaacaaaacagttgatgcctctatatactcagattgcgatacggtttgctgaattgcatgatacatccctcagaatggctgcgaaaggtgtgattaagaaagttgtggactgggaagaatcacgatctttcttctataagagattacggaggaggatctctgaggatgttcttgcaaaagaaattagagctgtagcaggtgagcagttttcccaccaaccagcaatcgagctgatcaagaaatggtattcagcttcacatgcagctgaatgggatgatgacgatgcttttgttgcttggatggataaccctgaaaactacaaggattatattcaatatcttaaggctcaaagagtatcccaatccctctcaagtctttcagattccagctcagatttgcaagccctgccacagggtctttccatgttactagataagatggatccctctagaagagctcaacttgttgaagaaatcaggaaggtccttggttga

SEQ ID NO: 9931 - protein, 2327 aa, Oryza sativa subsp
MTSTHVATLGVGAQAPPRHQKKSAGTAFVSSGSSRPSYRKNGQRTRSLREESNGGVSDSKKLNHSIRQGLAGIIDLPNDAASEVDISHGSEDPRGPTVPGSYQMNGIINETHNGRHASVSKVVEFCTALGGKTPIHSVLVANNGMAAAKFMRSVRTWANDTFGSEKAIQLIAMATPEDLRINAEHIRIADQFVEVPGGTNNNNYANVQLIVEIAERTGVSAVWPGWGHASENPELPDALTAKGIVFLGPPASSMHALGDKVGSALIAQAAGVPTLAWSGSHVEVPLECCLDSIPDEMYRKACVTTTEEAVASCQVVGYPAMIKASWGGGGKGIRKVHNDDEVRTLFKQVQGEVPGSPIFIMRLAAQSRHLEVQLLCDQYGNVAALHSRDCSVQRRHQKIIEEGPVTVAPRETVKELEQAARRLAKAVGYVGAATVEYLYSMETGEYYFLELNPRLQVEHPVTEWIAEVNLPAAQVAVGMGIPLWQIPEIRRFYGMNHGGGYDLWRKTAALATPFNFDEVDSKWPKGHCVAVRITSEDPDDGFKPTGGKVKEISFKSKPNVWAYFSVKSGGGIHEFADSQFGHVFAYGTTRSAAITTMALALKEVQIRGEIHSNVDYTVDLLNASDFRENKIHTGWLDTRIAMRVQAERPPWYISVVGGALYKTVTANTATVSDYVGYLTKGQIPPKHISLVYTTVALNIDGKKYTIDTVRSGHGSYRLRMNGSTVDANVQILCDGGLLMQLDGNSHVIYAEEEASGTRLLIDGKTCMLQNDHDPSKLLAETPCKLLRFLVADGAHVDADVPYAEVEVMKMCMPLLSPASGVIHVVMSEGQAMQAGDLIARLDLDDPSAVKRAEPFEDTFPQMGLPIAASGQVHKLCAASLNACRMILAGYEHDIDKVVPELVYCLDTPELPFLQWEELMSVLATRLPRNLKSELEGKYEEYKVKFDSGIINDFPANMLRVIIEENLACGSEKEKATNERLVEPLMSLLKSYEGGRESHAHFVVKSLFEEYLYVEELFSDGIQSDVIERLRLQHSKDLQKVVDIVLSHQSVRNKTKLILKLMESLVYPNPAAYRDQLIRFSSLNHKAYYKLALKASELLEQTKLSELRARIARSLSELEMFTEESKGLSMHKREIAIKESMEDLVTAPLPVEDALISLFDCSDTTVQQRVIETYIARLYQPHLVKDSIKMKWIESGVIALWEFPEGHFDARNGGAVLGDKRWGAMVIVKSLESLSMAIRFALKETSHYTSSEGNMMHIALLGADNKMHIIQESGDDADRIAKLPLILKDNVTDLHASGVKTISFIVQRDEARMTMRRTFLWSDEKLSYEEEPILRHVEPPLSALLELDKLKVKGYNEMKYTPSRDRQWHIYTLRNTENPKMLHRVFFRTLVRQPSVSNKFSSGQIGDMEVGSAEEPLSFTSTSILRSLMTAIEELELHAIRTGHSHMYLHVLKEQKLLDLVPVSGNTVLDVGQDEATAYSLLKEMAMKIHELVGARMHHLSVCQWEVKLKLDCDGPASGTWRIVTTNVTSHTCTVDIYREMEDKESRKLVYHPATPAAGPLHGVALNNPYQPLSVIDLKRCSARNNRTTYCYDFPLAFETAVRKSWSSSTSGASKGVENAQCYVKATELVFADKHGSWGTPLVQMDRPAGLNDIGMVAWTLKMSTPEFPSGREIIVVANDITFRAGSFGPREDAFFEAVTNLACEKKLPLIYLAANSGARIGIADEVKSCFRVGWSDDGSPERGFQYIYLSEEDYARIGTSVIAHKMQLDSGEIRWVIDSVVGKEDGLGVENIHGSAAIASAYSRAYKETFTLTFVTGRTVGIGAYLARLGIRCIQRLDQPIILTGYSALNKLLGREVYSSHMQLGGPKIMATNGVVHLTVSDDLEGVSNILRWLSYVPAYIGGPLPVTTPLDPPDRPVAYIPENSCDPRAAIRGVDDSQGKWLGGMFDKDSFVETFEGWAKTVVTGRAKLGGIPVGVIAVETQTMMQTIPADPGQLDSREQSVPRAGQVWFPDSATKTAQALLDFNREGLPLFILANWRGFSGGQRDLFEGILQAGSTIVENLRTYNQPAFVYIPMAAELRGGAWVVVDSKINPDRIECYAERTAKGNVLEPQGLIEIKFRSEELQDCMSRLDPTLIDLKAKLEVANKNGSADTKSLQENIEARTKQLMPLYTQIAIRFAELHDTSLRMAAKGVIKKVVDWEESRSFFYKRLRRRISEDVLAKEIRAVAGEQFSHQPAIELIKKWYSASHAAEWDDDDAFVAWMDNPENYKDYIQYLKAQRVSQSLSSLSDSSSDLQALPQGLSMLLDKMDPSRRAQLVEEIRKVLG

SEQ ID NO: 9932 - DNA, 6387 bp, Oryza sativa subsp
  CDS (1)..(6387)
atggagggatcttaccaaatgaatggcatactgaacgggatgtctaattcgaggcatccgtcgtcgccctctgaggtcgatgagttctgcaaagcgctcggtggtgattcaccgatacacagtgtgctggttgccaacaatggcatggccgctgtcaagttcatgcgcagcatccgtacatgggcgctggagacctttgggacggagaaggcgattcttttggtcgccatggcaactcccgaggacttgaagataaacgcggagcacataaggatcgccgaccaattcgtagaagttcctggtggtacaaataataacaattatgcgaatgtacagctcatagtggagatagcagagagaacacatgtttctgcagtttggcctggctggggtcatgcatctgagaatcctgaacttccggacgcactgaaggagaaaggaataatttttcttgggccaccatcagccgcgatggcagcgctaggtgataagattggttcatctcttattgcacaagcagcaggagttccaactcttccatggagtggatcacatgtgaaaattccaccagaaagctgcaattcgatacctgaggagatgtacaggagtgcctgtgtctccactacagaggaagcagtagctagttgtcaggtggtgggatatcctgctatgatcaaggcatcatggggtggtggtggtaaaggaataaggaaggtacataatgatgatgaggtgagagcactgtttaagcaagttcagggagaagtccctggctcacctatatttattatgaaggtggcatctcagagccgacatctagaggttcagttgctctgtgacaaacatggcaatgtggcagctctgcacagtcgagactgtagtgttcaaagaaggcaccaaaagattattgaggaggggccaattacagttgctccttcagagacagttaaagagcttgagcaagcagcaaggcggcttgctaaatgtgtgcattatgtgggtgctgctacagtagaatatttgtacagcatggaaacaggagaatactattttctggagcttaatccacggttgcaagtagaacaccctgttaccgaatggatagctgaaataaacttgcctgcagctcaagttgttgtaggaatgggtgtgccgctctacaatattcctgagatcagacgcttttatggaatggagcatggtggtggttacgatgcgtggaggaaaatatcagctgttgcaactaagtttgatttggataatgcacagtctgtaaagccaaagggtcactgtgtagcagtcagagttaccagtgaggatccagatgatggatttaagcctactagtggaagagttgaggagctaaactttaaaagcaaaccaaatgtttgggcctatttctccgttaaggcaagacatgtgtttgcattcggggaatctagatcgttggcaatagcaaatatggtgcttgggttaaaagagatccaaatccgtggagagatacgcactaatgttgattacacagtggatctcttgaatgctgcagaatatcgggaaaataagatccacactggttggctagacagcagaattgctatgcgtgttagagctgagaggcccccatggtacctttcagttgttggaggagctctatatgaagcatcaagcaggagctcaagcgttgttacagattatgttggttatctcagcaaaggtcaaataccaccaaagcacatctctcttgttaatttgactgttaccctaaatattgagggaagcaaatacacgattgagacagtaagacgtgggccccgtagctacacattaagaatgaatgggtcagagattgaagcagagatacactcgttgcgagatggaggactcttgatgcaattggatggaaacagtcatgtaatttatgcggagacagaagctgctggtacacgccttctcatcaatgggagaacatgcttattacagggatgtgcaaaagttatactacaggatcttaaaaaatatgttaccaaagagcatgatccttccaaattgttggctgatacaccttgcaaacttcttcggttcttggttgcggatggctctcatgtagatgctgatacaccatatgctgaggttgaggtcatgaagatgtgtatgccgctgttactaccagcttctggtgttattcattttgtcatgcctgagggtcaagccatgcaggttctatacctctatttcactctgttattatttgtatgcatcttatttgcatacatcttttacaaggtaactaaaatgtctattcttttgcaggcggctgacctgatagcaaggttggaccttgatgacccctcttctgtgaggagagctgaaccattccatggcacctttccaaaactgggacctccaactgctgtttctggaaaagttcaccaaaagtttgctgcaagtgtcaattccgcacacatgatccttgcaggatatgaacataatatcaatgaagttgtacaagatttgttaaactgcttagatagccctgagcttccttttctacagtggcaagaacttatgtctgttttggcaactcggcttccgaaagatctcaggaatgagttggatggcaagtacaaggagtatgagttgaactctgattttcggaagaacaaggattttcctgccaagttactaaggggaattatagaggcaaatcttgcatactgttctgaaaaagatagagttactaatgagaggcttgttgagccacttatgagcctggtcaaatcatacgagggtgggagagaaagccacgctcgtgttgttgtcaagtctctatttgaggagtacctgtctgttgaggaactcttcagtgacaatattcagtctgatgtgatagaacgtctacgacttcaacatgccaaagacctcgagaaggtcgtatacattgttttctcccaccagtacacatgttatagtccagagaatgatacattttttacgttgcagttggcacttaaagcaagccagcttcttgagcatactaaattgagtgaactccgcacaagcatagcaagaagcctctcagagctggagatgtttactgaagaaggagagcgggtgtcaacacccaggagaaagatggccattaatgagaggatggaagatttagtgggtgccccacttgcagttgaagatgcccttgtggctttgtttgatcacagtgatcctacacttcagcggagagtggtcgagacatacatacgtagattgtatcagccttatctggtcaagggcagtgttcggatgcagtggcatagatctggtctaattgctttatgggaattctcggaagagcatattaagcaaagaaatggacaagatgcgatgtctctaaagcagcaagttgaggaccccgaagagaaaagatggggtgtcatggttgtaatcaagtctctccagtatttatctagtgctattgatgctgcattgaaggagacttcacactacaaagcaggtgctggaaatgtctcgaatggcaattctgcaagttccagccatggcaatatgctgcatattgctttggttggtatcaacaatcagatgagcactcttcaagacagtggtgatgaggaccaggctcaagaaaggatcaacaaaatttcaaaaattttgaaggatagtactgtaacatcacatctcaatggtgctggcgttagggtagtcagctgcattatccaaagggatgaagggcgcccaccgatgcgtcactccttccaatggtcagttgataagatatattatgaagaggatccgatgctccgccatgttgaacctcctctatctacattccttgagttgaacaaggtgaatttggatggttacaatgaagtaaagtacactccatcacgcgatcgccagtggcatatttacacactcatcaagaacaagaaagatcagagatcaaatgaccagaggttgttccttcgtaccatagtaaggcaaccaggtgtgaccaatgggtttttgtcaggaaatgttgacaatgaagtaggccgtgctcaggcttcatcatcatacacatcaagtagtatactcagatcactgatggcagcactagaagaaatagagctacatgcacataatgagacagtgaggtcaagctattcacacatgtatctgtgcatattgagagtacaacagttgtttgatcttataccattttcaagaacgattgataatgttggtcaagatgaagcaactgcatgtacgcttttgaagaatatgggtttgaatatatatgaacatgttgggatttaccgagaagtggaggattctaatacacataaacttttctaccactctgttacaccatcactgggtcctttgcatggcattgcgttggatgaaccatacaagccattggatgctattgacctcaaacgttactctgctaggaagaacgaaactacgtactgctatgacttcccgctggcttttgaaacagcactgaagaggtcatggaaatcaaccctctctgttgttgctgaagctaatgagcataataagagctatgctaaagtgacagagcttatgtttgctgattcaactggatcatggggtactcctttggttccagttgagcgttctccaggtatcaatgatattggcattgtcgcttggatcatgaagctctccacaccagaattcagtggccgggagattattgttgtttcaaatgatgtgacatttaaagctggatcatttggtcctagggaagatgctttctttgatgcggtcaccaatcttgcttgtgagaggaaacttcctcttatctacttgtcagcaactgctggtgctaggctcggtgtagctgaggaaataaaagcatgcttcaatgttggttggtctgatgacgagagccctgaacgtggttttcattacatttacctcactgaacaagattattcgcgcctgagttcttcggttatagcccatgaactgaaactagaaagtggagaaactagatgggttgttgataccattgttggaaaagaggatggactcggttgtgagaacttgcatggaagtggtgccattgccagtgcctattctaaagcatacaaggagacctttactctgacattcgtaactggacgagctgttggaattggtgcttatcttgctcggttaggcatgaggacagtcgaaggcaagtggatgggtggtatgtttgacagagaaagcttcgtggagacattagaaggctgggcaaaaactgttgtcaccggaagagcaaagcttggtggaattccagttggtgtcatagctgtggaaacccagactatgatgcaagtcatccctgctgatccaggtcagcttgattctgccgagcgtgtggttcctcaagcagggcaggtgtggtttcctgattctgccaccaaaacagcccaggcattgctggatttcaaccgtgaagagcttccgctgttcatcctcgctaactggagaggcttttctggtgggcaaagggatctgtttgaaggaatccttcaggctggttctaatattgttgagaatctgaggacatataaccagcctgcttttgtgtatattccaatgggcggagagcttaggggaggtgcatgggttgtggtagatagcaaaatcaatccagaacacattgagatgtatgctgagagaactgcaaaaggtaatgtccttgaaccagaaggattggttgagatcaaattcaggccaaaggaactggaagaatgcatgctaaggcttgacccggagttgatcaagctgagtacaaggctgagagaaatgaagaaggaaaatgctggcctctcggaaatggacaccactaggaggagtattattgctcggatgaagcaactgatgcctatatatacccaggttgctacacggtttgctgaattgcatgacacctctgctagaatggctgccaaaggtgtgatcggaaaggttgtcgattgggaagaatctcggtcctttttctataggaggttgcgaaggagagttactgaagatgcacttgccaaggaaatcagagaagctgctggcgagcagctgtcccagaaatctgcattggactatatcaagaaatggtacctttcttccaatggatctgatggaaacagtgaaaagtggaataacgatgaagctttctttgcttggaaagatgatccaacaaactatgagaatcaactcgaggagttgaaggctgaaagagtatccaagtggctctcgcgtctcgctgaaagccctgatgtgaaagctttgccaaatggtctttcaattgttcttaacaagatgaatccttcaaagagggagcaggttattgatggtctcaggcagcttctgggttga

SEQ ID NO: 9933 - protein, 2128 aa, Oryza sativa subsp
MEGSYQMNGILNGMSNSRHPSSPSEVDEFCKALGGDSPIHSVLVANNGMAAVKFMRSIRTWALETFGTEKAILLVAMATPEDLKINAEHIRIADQFVEVPGGTNNNNYANVQLIVEIAERTHVSAVWPGWGHASENPELPDALKEKGIIFLGPPSAAMAALGDKIGSSLIAQAAGVPTLPWSGSHVKIPPESCNSIPEEMYRSACVSTTEEAVASCQVVGYPAMIKASWGGGGKGIRKVHNDDEVRALFKQVQGEVPGSPIFIMKVASQSRHLEVQLLCDKHGNVAALHSRDCSVQRRHQKIIEEGPITVAPSETVKELEQAARRLAKCVHYVGAATVEYLYSMETGEYYFLELNPRLQVEHPVTEWIAEINLPAAQVVVGMGVPLYNIPEIRRFYGMEHGGGYDAWRKISAVATKFDLDNAQSVKPKGHCVAVRVTSEDPDDGFKPTSGRVEELNFKSKPNVWAYFSVKARHVFAFGESRSLAIANMVLGLKEIQIRGEIRTNVDYTVDLLNAAEYRENKIHTGWLDSRIAMRVRAERPPWYLSVVGGALYEASSRSSSVVTDYVGYLSKGQIPPKHISLVNLTVTLNIEGSKYTIETVRRGPRSYTLRMNGSEIEAEIHSLRDGGLLMQLDGNSHVIYAETEAAGTRLLINGRTCLLQGCAKVILQDLKKYVTKEHDPSKLLADTPCKLLRFLVADGSHVDADTPYAEVEVMKMCMPLLLPASGVIHFVMPEGQAMQVLYLYFTLLLFVCILFAYIFYKVTKMSILLQAADLIARLDLDDPSSVRRAEPFHGTFPKLGPPTAVSGKVHQKFAASVNSAHMILAGYEHNINEVVQDLLNCLDSPELPFLQWQELMSVLATRLPKDLRNELDGKYKEYELNSDFRKNKDFPAKLLRGIIEANLAYCSEKDRVTNERLVEPLMSLVKSYEGGRESHARVVVKSLFEEYLSVEELFSDNIQSDVIERLRLQHAKDLEKVVYIVFSHQYTCYSPENDTFFTLQLALKASQLLEHTKLSELRTSIARSLSELEMFTEEGERVSTPRRKMAINERMEDLVGAPLAVEDALVALFDHSDPTLQRRVVETYIRRLYQPYLVKGSVRMQWHRSGLIALWEFSEEHIKQRNGQDAMSLKQQVEDPEEKRWGVMVVIKSLQYLSSAIDAALKETSHYKAGAGNVSNGNSASSSHGNMLHIALVGINNQMSTLQDSGDEDQAQERINKISKILKDSTVTSHLNGAGVRVVSCIIQRDEGRPPMRHSFQWSVDKIYYEEDPMLRHVEPPLSTFLELNKVNLDGYNEVKYTPSRDRQWHIYTLIKNKKDQRSNDQRLFLRTIVRQPGVTNGFLSGNVDNEVGRAQASSSYTSSSILRSLMAALEEIELHAHNETVRSSYSHMYLCILRVQQLFDLIPFSRTIDNVGQDEATACTLLKNMGLNIYEHVGIYREVEDSNTHKLFYHSVTPSLGPLHGIALDEPYKPLDAIDLKRYSARKNETTYCYDFPLAFETALKRSWKSTLSVVAEANEHNKSYAKVTELMFADSTGSWGTPLVPVERSPGINDIGIVAWIMKLSTPEFSGREIIVVSNDVTFKAGSFGPREDAFFDAVTNLACERKLPLIYLSATAGARLGVAEEIKACFNVGWSDDESPERGFHYIYLTEQDYSRLSSSVIAHELKLESGETRWVVDTIVGKEDGLGCENLHGSGAIASAYSKAYKETFTLTFVTGRAVGIGAYLARLGMRTVEGKWMGGMFDRESFVETLEGWAKTVVTGRAKLGGIPVGVIAVETQTMMQVIPADPGQLDSAERVVPQAGQVWFPDSATKTAQALLDFNREELPLFILANWRGFSGGQRDLFEGILQAGSNIVENLRTYNQPAFVYIPMGGELRGGAWVVVDSKINPEHIEMYAERTAKGNVLEPEGLVEIKFRPKELEECMLRLDPELIKLSTRLREMKKENAGLSEMDTTRRSIIARMKQLMPIYTQVATRFAELHDTSARMAAKGVIGKVVDWEESRSFFYRRLRRRVTEDALAKEIREAAGEQLSQKSALDYIKKWYLSSNGSDGNSEKWNNDEAFFAWKDDPTNYENQLEELKAERVSKWLSRLAESPDVKALPNGLSIVLNKMNPSKREQVIDGLRQLLG

SEQ ID NO: 9934 - DNA, 6945 bp, Oryza sativa subsp
  CDS (1)..(6945)
atgacatccacacatgtggcgacattgggagttggtgcccaggcacctcctcgtcaccagaaaaagtcagctggcactgcatttgtatcatctgggtcatcaagaccctcataccgaaagaatggtcagcgtactcggtcacttagggaagaaagcaatggaggagtgtctgattccaaaaagcttaaccactctattcgccaaggtcttgctggcatcattgacctcccaaatgacgcagcttcagaagttgatatttcacatggttccgaagatcccagggggcctacggtcccaggttcctaccaaatgaatgggattatcaatgaaacacataatgggaggcatgcttcagtctccaaggttgttgagttttgtacggcacttggtggcaaaacaccaattcacagtgtattagtggccaacaatggaatggcagcagctaagttcatgcggagtgtccgaacatgggctaatgatacttttggatcagagaaggcaattcagctgatagctatggcaactccggaggatctgaggataaatgcagagcacatcagaattgccgatcaatttgtagaggtacctggtggaacaaacaacaacaactatgcaaatgtccaactcatagtggagatagcagagagaacaggtgtttctgctgtttggcctggttggggtcatgcatctgagaatcctgaacttccagatgcgctgactgcaaaaggaattgtttttcttgggccaccagcatcatcaatgcatgcattaggagacaaggttggctcagctctcattgctcaagcagctggagttccaacacttgcttggagtggatcacatgtggaagttcctctggagtgttgcttggactcaatacctgatgagatgtatagaaaagcttgtgttactaccacagaggaagcagttgcaagttgtcaggtggttggttatcctgccatgattaaggcatcttggggtggtggtggtaaaggaataaggaaggttcataatgatgatgaggttaggacattatttaagcaagttcaaggcgaagtacctggttccccaatatttatcatgaggctagctgctcagagtcgacatcttgaagttcagttgctttgtgatcaatatggcaacgtagcagcacttcacagtcgagattgcagtgtacaacggcgacaccaaaagataatcgaggaaggaccagttactgttgctcctcgtgagactgtgaaagagcttgagcaggcagcacggaggcttgctaaagctgtgggttatgttggtgctgctactgttgaatacctttacagcatggaaactggtgaatattattttctggaacttaatccacggctacaggttgagcatcctgtcactgagtggatagctgaagtaaatttgcctgcggctcaagttgctgttggaatgggtatacccctttggcagattccagagatcaggcgcttctacggaatgaaccatggaggaggctatgacctttggaggaaaacagcagctctagcgactccatttaactttgatgaagtagattctaaatggccaaaaggccactgcgtagctgttagaataactagcgaggatccagatgatgggtttaagcctactggtggaaaagtaaaggagataagtttcaagagtaaaccaaatgtttgggcctatttctcagtaaagtctggtggaggcatccatgaattcgctgattctcagttcggacatgtttttgcgtatggaactactagatcggcagcaataactaccatggctcttgcactaaaagaggttcaaattcgtggagaaattcattcaaacgtagactacacagttgacctattaaatgcctcagattttagagaaaataagattcatactggttggctggataccaggatagccatgcgtgttcaagctgagaggcctccatggtatatttcagtcgttggaggggctttatataaaacagtaactgccaacacggccactgtttctgattatgttggttatcttaccaagggccagattccaccaaagcatatatcccttgtctatacgactgttgctttgaatatagatgggaaaaaatatacaatcgatactgtgaggagtggacatggtagctacagattgcgaatgaatggatcaacggttgacgcaaatgtacaaatattatgtgatggtgggcttttaatgcagctggatggaaacagccatgtaatttatgctgaagaagaggccagtggtacacgacttcttattgatggaaagacatgcatgttacagaatgaccatgacccatcaaagttattagctgagacaccatgcaaacttcttcgtttcttggttgctgatggtgctcatgttgatgctgatgtaccatatgcggaagttgaggttatgaagatgtgcatgcccctcttatcacccgcttctggtgtcatacatgttgtaatgtctgagggccaagcaatgcaggctggtgatcttatagctaggctggatcttgatgacccttctgctgttaagagagctgagccgttcgaagatacttttccacaaatgggtctccctattgctgcttctggccaagttcacaaattatgtgctgcaagtctgaatgcttgtcgaatgatccttgcggggtatgagcatgatattgacaaggttgtgccagagttggtatactgcctagacactccggagcttcctttcctgcagtgggaggagcttatgtctgttttagcaactagacttccaagaaatcttaaaagtgagttggagggcaaatatgaggaatacaaagtaaaatttgactctgggataatcaatgatttccctgccaatatgctacgagtgataattgaggaaaatcttgcatgtggttctgagaaggagaaggctacaaatgagaggcttgttgagcctcttatgagcctactgaagtcatatgagggtgggagagaaagtcatgctcactttgttgtcaagtccctttttgaggagtatctctatgttgaagaattgttcagtgatggaattcagtctgatgtgattgagcgtctgcgccttcaacatagtaaagacctacagaaggtcgtagacattgtgttgtcccaccagagtgttagaaataaaactaagctgatactaaaactcatggagagtctggtctatccaaatcctgctgcctacagggatcaattgattcgcttttcttcccttaatcacaaagcgtattacaagttggcacttaaagctagtgaacttcttgaacaaacaaaacttagtgagctccgtgcaagaatagcaaggagcctttcagagctggagatgtttactgaggaaagcaagggtctctccatgcataagcgagaaattgccattaaggagagcatggaagatttagtcactgctccactgccagttgaagatgcgctcatttctttatttgattgtagtgatacaactgttcaacagagagtgattgagacttatatagctcgattataccagcctcatcttgtaaaggacagtatcaaaatgaaatggatagaatcgggtgttattgctttatgggaatttcctgaagggcattttgatgcaagaaatggaggagcggttcttggtgacaaaagatggggtgccatggtcattgtcaagtctcttgaatcactttcaatggccattagatttgcactaaaggagacatcacactacactagctctgagggcaatatgatgcatattgctttgttgggtgctgataataagatgcatataattcaagaaagtggtgatgatgctgacagaatagccaaacttcccttgatactaaaggataatgtaaccgatctgcatgcctctggtgtgaaaacaataagtttcattgttcaaagagatgaagcacggatgacaatgcgtcgtaccttcctttggtctgatgaaaagctttcttatgaggaagagccaattctccggcatgtggaacctcctctttctgcacttcttgagttggacaagttgaaagtgaaaggatacaatgaaatgaagtataccccatcacgggatcgtcaatggcatatctacacacttagaaatactgaaaaccccaaaatgttgcaccgggtatttttccgaacccttgtcaggcaacccagtgtatccaacaagttttcttcgggccagattggtgacatggaagttgggagtgctgaagaacctctgtcatttacatcaaccagcatattaagatctttgatgactgctatagaggaattggagcttcacgcaattagaactggccattcacacatgtatttgcatgtattgaaagaacaaaagcttcttgatcttgttccagtttcagggaatacagttttggatgttggtcaagatgaagctactgcatattcacttttaaaagaaatggctatgaagatacatgaacttgttggtgcaagaatgcaccatctttctgtatgccaatgggaagtgaaacttaagttggactgcgatggtcctgccagtggtacctggaggattgtaacaaccaatgttactagtcacacttgcactgtggatatctaccgtgagatggaagataaagaatcacggaagttagtataccatcccgccactccggcggctggtcctctgcatggtgtggcactgaataatccatatcagcctttgagtgtcattgatctcaaacgctgttctgctaggaataatagaactacatactgctatgattttccactggcatttgaaactgcagtgaggaagtcatggtcctctagtacctctggtgcttctaaaggtgttgaaaatgcccaatgttatgttaaagctacagagttggttcaaatggaccggcttgctgggctcaatgacattggtatggtagcttggaccttgaagatgtccactcctgaatttcttagtggtagggagattattgttgttgcaaatgatattacgttcagagctggatcatttggcccaagggaagatgcattttttgaagctgttaccaacctagcctgtgagaagaaacttcctcttatttatttggcagcaaattctggtgctcgaattggcatagcagatgaagtgaaatcttgcttccgtgttgggtggtctgatgatggcagccctgaacgtgggtttcagtacatttatctaagcgaagaagactatgctcgtattggcacttctgtcatagcacataagatgcagctagacagtggtgaaattaggtgggttattgattctgttgtgggcaaggaagatggacttggtgtggagaatatacatggaagtgctgctattgccagtgcttattctagggcatataaggagacatttacacttacatttgtgactggaagaactgttggaataggagcttatcttgctcgacttggcatccggtgcatacagcgtcttgaccagcctattattcttacaggctattctgcactgaacaagcttcttgggcgggaagtgtacagctcccacatgcagttgggtggtcccaaaatcatggcaactaatggtgttgtccatcttactgtttcagatgaccttgaaggcgtttctaatatattgaggtggctcagttatgttcctgcctacattggtggaccacttccagtaacaacaccgttggacccaccggacagacctgttgcatacattcctgagaactcgtgtgatcctcgagcggctatccgtggtgttgatgacagccaagggaaatggttaggtggtatgtttgataaagacagctttgtggaaacatttgaaggttgggctaagacagtggttactggcagagcaaagcttggtggaattccagtgggtgtgatagctgtggagactcagaccatgatgcaaactatccctgctgaccctggtcagcttgattcccgtgagcaatctgttcctcgtgctggacaagtgtggtttccagattctgcaaccaagactgcgcaggcattgctggacttcaaccgtgaaggattacctctgttcatcctcgctaactggagaggcttctctggtggacaaagagatctttttgaaggaattcttcaggctggctcgactattgttgagaaccttaggacatacaatcagcctgcctttgtctacattcccatggctgcagagctacgaggaggggcttgggttgtggttgatagcaagataaacccagaccgcattgagtgctatgctgagaggactgcaaaaggcaatgttctggaaccgcaagggttaattgagatcaagttcaggtcagaggaactccaggattgcatgagtcggcttgacccaacattaattgatctgaaagcaaaactcgaagtagcaaataaaaatggaagtgctgacacaaaatcgcttcaagaaaatatagaagctcgaacaaaacagttgatgcctctatatactcagattgcgatacggtttgctgaattgcatgatacatccctcagaatggctgcgaaaggtgtgattaagaaagttgtggactgggaagaatcacgatctttcttctataagagattacggaggaggatctctgaggatgttcttgcaaaagaaattagagctgtagcaggtgagcagttttcccaccaaccagcaatcgagctgatcaagaaatggtattcagcttcacatgcagctgaatgggatgatgacgatgcttttgttgcttggatggataaccctgaaaactacaaggattatattcaatatcttaaggctcaaagagtatcccaatccctctcaagtctttcagattccagctcagatttgcaagccctgccacagggtctttccatgttactagataagatggatccctctagaagagctcaacttgttgaagaaatcaggaaggtccttggttga

SEQ ID NO: 9935 - protein, 2314 aa, Oryza sativa subsp
MTSTHVATLGVGAQAPPRHQKKSAGTAFVSSGSSRPSYRKNGQRTRSLREESNGGVSDSKKLNHSIRQGLAGIIDLPNDAASEVDISHGSEDPRGPTVPGSYQMNGIINETHNGRHASVSKVVEFCTALGGKTPIHSVLVANNGMAAAKFMRSVRTWANDTFGSEKAIQLIAMATPEDLRINAEHIRIADQFVEVPGGTNNNNYANVQLIVEIAERTGVSAVWPGWGHASENPELPDALTAKGIVFLGPPASSMHALGDKVGSALIAQAAGVPTLAWSGSHVEVPLECCLDSIPDEMYRKACVTTTEEAVASCQVVGYPAMIKASWGGGGKGIRKVHNDDEVRTLFKQVQGEVPGSPIFIMRLAAQSRHLEVQLLCDQYGNVAALHSRDCSVQRRHQKIIEEGPVTVAPRETVKELEQAARRLAKAVGYVGAATVEYLYSMETGEYYFLELNPRLQVEHPVTEWIAEVNLPAAQVAVGMGIPLWQIPEIRRFYGMNHGGGYDLWRKTAALATPFNFDEVDSKWPKGHCVAVRITSEDPDDGFKPTGGKVKEISFKSKPNVWAYFSVKSGGGIHEFADSQFGHVFAYGTTRSAAITTMALALKEVQIRGEIHSNVDYTVDLLNASDFRENKIHTGWLDTRIAMRVQAERPPWYISVVGGALYKTVTANTATVSDYVGYLTKGQIPPKHISLVYTTVALNIDGKKYTIDTVRSGHGSYRLRMNGSTVDANVQILCDGGLLMQLDGNSHVIYAEEEASGTRLLIDGKTCMLQNDHDPSKLLAETPCKLLRFLVADGAHVDADVPYAEVEVMKMCMPLLSPASGVIHVVMSEGQAMQAGDLIARLDLDDPSAVKRAEPFEDTFPQMGLPIAASGQVHKLCAASLNACRMILAGYEHDIDKVVPELVYCLDTPELPFLQWEELMSVLATRLPRNLKSELEGKYEEYKVKFDSGIINDFPANMLRVIIEENLACGSEKEKATNERLVEPLMSLLKSYEGGRESHAHFVVKSLFEEYLYVEELFSDGIQSDVIERLRLQHSKDLQKVVDIVLSHQSVRNKTKLILKLMESLVYPNPAAYRDQLIRFSSLNHKAYYKLALKASELLEQTKLSELRARIARSLSELEMFTEESKGLSMHKREIAIKESMEDLVTAPLPVEDALISLFDCSDTTVQQRVIETYIARLYQPHLVKDSIKMKWIESGVIALWEFPEGHFDARNGGAVLGDKRWGAMVIVKSLESLSMAIRFALKETSHYTSSEGNMMHIALLGADNKMHIIQESGDDADRIAKLPLILKDNVTDLHASGVKTISFIVQRDEARMTMRRTFLWSDEKLSYEEEPILRHVEPPLSALLELDKLKVKGYNEMKYTPSRDRQWHIYTLRNTENPKMLHRVFFRTLVRQPSVSNKFSSGQIGDMEVGSAEEPLSFTSTSILRSLMTAIEELELHAIRTGHSHMYLHVLKEQKLLDLVPVSGNTVLDVGQDEATAYSLLKEMAMKIHELVGARMHHLSVCQWEVKLKLDCDGPASGTWRIVTTNVTSHTCTVDIYREMEDKESRKLVYHPATPAAGPLHGVALNNPYQPLSVIDLKRCSARNNRTTYCYDFPLAFETAVRKSWSSSTSGASKGVENAQCYVKATELVQMDRLAGLNDIGMVAWTLKMSTPEFLSGREIIVVANDITFRAGSFGPREDAFFEAVTNLACEKKLPLIYLAANSGARIGIADEVKSCFRVGWSDDGSPERGFQYIYLSEEDYARIGTSVIAHKMQLDSGEIRWVIDSVVGKEDGLGVENIHGSAAIASAYSRAYKETFTLTFVTGRTVGIGAYLARLGIRCIQRLDQPIILTGYSALNKLLGREVYSSHMQLGGPKIMATNGVVHLTVSDDLEGVSNILRWLSYVPAYIGGPLPVTTPLDPPDRPVAYIPENSCDPRAAIRGVDDSQGKWLGGMFDKDSFVETFEGWAKTVVTGRAKLGGIPVGVIAVETQTMMQTIPADPGQLDSREQSVPRAGQVWFPDSATKTAQALLDFNREGLPLFILANWRGFSGGQRDLFEGILQAGSTIVENLRTYNQPAFVYIPMAAELRGGAWVVVDSKINPDRIECYAERTAKGNVLEPQGLIEIKFRSEELQDCMSRLDPTLIDLKAKLEVANKNGSADTKSLQENIEARTKQLMPLYTQIAIRFAELHDTSLRMAAKGVIKKVVDWEESRSFFYKRLRRRISEDVLAKEIRAVAGEQFSHQPAIELIKKWYSASHAAEWDDDDAFVAWMDNPENYKDYIQYLKAQRVSQSLSSLSDSSSDLQALPQGLSMLLDKMDPSRRAQLVEEIRKVLG

SEQ ID NO: 9936 - DNA, 6783 bp, Oryza sativa subsp
  CDS (1)..(6783)
atggagggatcttaccaaatgaatggcatactgaacgggatgtctaattcgaggcatccgtcgtcaccctctgaggtcgatgagttctgcaaagcgctcggtggtgattcaccgatacacagtgtgctggttgccaacaatggcatggccgctgtcaagttcatgcgcagcatccgtacatgggcgctggagacctttgggacggagaaggcgattcttttggtcgccatggcaactcccgaggacttgaagataaacgcggagcacataaggatcgccgaccaattcgtagaagttcctggtggtacaaataataacaattatgcgaatgtacagctcatagtggagatagcagagagaacacatgtttctgcagtttggcctggctggggtcatgcatctgagaatcctgaacttccggacgcactgaaggagaaaggaataatttttcttgggccaccatcagccgcgatggcagcgctaggtgataagattggttcatctcttattgcacaagcagcaggagttccaactcttccatggagtggatcacatgtgaaaattccaccagaaagctgcaattcgatacctgaggagatgtacaggagtgcctgtgtctccactacagaggaagcagtagctagttgtcaggtggtgggatatcctgctatgatcaaggcatcatggggtggtggtggtaaaggaataaggaaggtacataatgatgatgaggtgagagcactgtttaagcaagttcagggagaagtccctggctcacctatatttattatgaaggtggcatctcagagccgacatctagaggttcagttgctctgtgacaaacatggcaatgtggcagctctgcacagtcgagactgtagtgttcaaagaaggcaccaaaagattattgaggaggggccaattacagttgctccttcagagacagttaaagagcttgagcaagcagcaaggcggcttgctaaatgtgtgcattatgtgggtgctgctacagtagaatatttgtacagcatggaaacaggagaatactattttctggagcttaatccacggttgcaagtagaacaccctgttaccgaatggatagctgaaataaacttgcctgcagctcaagttgttgtaggaatgggtgtgccgctctacaatattcctgagatcagacgcttttatggaatggagcatggtggtggttacgatgcgtggaggaaaatatcagctgttgcaactaagtttgatttggataatgcacagtctgtaaagccaaagggtcactgtgtagcagtcagagttaccagtgaggatccagatgatggatttaagcctactagtggaagagttgaggagctaaactttaaaagcaaaccaaatgtttgggcctatttctccgttaaggcaagacatgtgtttgcattcggggaatctagatcgttggcaatagcaaatatggtgcttgggttaaaagagatccaaatccgtggagagatacgcactaatgttgattacacagtggatctcttgaatgctgcagaatatcgggaaaataagatccacactggttggctagacagcagaattgctatgcgtgttagagctgagaggcccccatggtacctttcagttgttggaggagctctatatgaagcatcaagcaggagctcaagcgttgttacagattatgttggttatctcagcaaaggtcaaataccaccaaagcacatctctcttgttaatttgactgttaccctaaatattgagggaagcaaatacacgattgagacagtaagacgtgggccccgtagctacacattaagaatgaatgggtcagagattgaagcagagatacactcgttgcgagatggaggactcttgatgcaattggatggaaacagtcatgtaatttatgcggagacagaagctgctggtacacgccttctcatcaatgggagaacatgcttattacagaaagagcatgatccttccaaattgttggctgatacaccttgcaaacttcttcggttcttggttgcggatggctctcatgtagatgctgatacaccatatgctgaggttgaggtcatgaagatgtgtatgccgctgttactaccagcttctggtgttattcattttgtcatgcctgagggtcaagccatgcaggttctatacctctatttcaccctgttattatttgtatgcatcttatttgcatacatcttttacaaggtaactaaaatgtctattcttttgcaggcggctgacctgatagcaaggttggaccttgatgacccctcttctgtgaggagagctgaaccattccatggcacctttccaaaactgggacctccaactgctgtttctggaaaagttcaccaaaagtttgctgcaagtgtcaattccgcacacatgatccttgcaggatatgaacataatatcaatgaagttgtacaagatttgttaaactgcttagatagccctgagcttccttttctacagtggcaagaacttatgtctgttttggcaactcggcttccgaaagatctcaggaatgagttggatggcaagtacaaggagtatgagttgaactctgattttcggaagaacaaggattttcctgccaagttactaaggggaattatagaggcaaatcttgcatactgttctgaaaaagatagagttactaatgagaggcttgttgagccacttatgagcctggtcaaatcatacgagggtgggagagaaagccacgctcgtgttgttgtcaagtctctatttgaggagtacctgtctgttgaggaactcttcagtgacaatattcagtctgatgtgatagaacgtctacgacttcaacatgccaaagacctcgagaaggtcgtatacattgttttctcccaccagtacacatgttatagtccagagaatgatacattttttacgttgcagttggcacttaaagcaagccagcttcttgagcatactaaattgagtgaactccgcacaagcatagcaagaagcctctcagagctggagatgtttactgaagaaggagagcgggtgtcaacacccaggagaaagatggccattaatgagaggatggaagatttagtgggtgccccacttgcagttgaagatgcccttgtggctttgtttgatcacagtgatcctacacttcagcggagagtggtcgagacatacatacgtagattgtatcagccttatctggtcaagggcagtgttcggatgcagtggcatagatctggtctaattgctttatgggaattctcggaagagcatattaagcaaagaaatggacaagatgcgatgtctctaaagcagcaagttgaggaccccgaagagaaaagatggggtgtcatggttgtaatcaagtctctccagtatttatctagtgctattgatgctgcattgaaggagacttcacactacaaagcaggtgctggaaatgtctcgaatggcaattctgcaagttccagccatggcaatatgctgcatattgctttggttggtatcaacaatcagatgagcactcttcaagacagtggtgatgaggaccaggctcaagaaaggatcaacaaaatttcaaaaattttgaaggatagtactgtaacatcacatctcaatggtgctggcgttagggtagtcagctgcattatccaaagggatgaagggcgcccaccgatgcgtcactccttccaatggtcagttgataagatatattatgaagaggatccgatgctccgccatgttgaacctcctctatctacattccttgagttgaacaaggtgaatttggatggttacaatgaagtaaagtacactccatcacgcgatcgccagtggcatatttacacactcatcaagaacaagaaagatcagagatcaaatgaccagaggttgttccttcgtaccatagtaaggcaaccaggtgtgaccaatgggtttttgtcaggaaatgttgacaatgaagtaggccgtgctcaggcttcatcatcatacacatcaagtagtatactcagatcactgatggcagcactagaagaaatagagctacatgcacataatgagacagtgaggtcaagctattcacacatgtatctgtgcatattgagagtacaacagttgtttgatcttataccattttcaagaacgattgataatgttggtcaagatgaagcaactgcatgtacgcttttgaagaatatggctttgaatatatatgaacatgttggggtgaggatgcatcgcctttctgtgtgtcagtgggaagtgaagttatggttggattgtgatggacaagcaagcggtgcttggagagtagttgttaccaatgtaactggccacacctgcactgtcgatatttaccgagaagtggaggattctaatacacataaacttttctaccactctgttacaccatcactgggtcctttgcatggcattgtgttggatgaaccatacaagccattggatgctattgacctcaaacgttactctgctaggaagaacgaaactacgtactgctatgacttcccgctggcttttgaaacagcactgaagaggtcatggaaatcaaccctctctgttgttgctgaagctaatgagcataataagagctatgctaaagtgacagagcttatgtttgctgattcaactggatcatggggtactcctttggttccagttgagcgttctccaggtatcaatgatattggcattgtcgcttggatcatgaagctctccacaccagaatttccaagtggccgggagattattgttgtttcaaatgatgtgacatttaaagctggatcatttggtcctagggaagatgctttctttgatgcggtcaccaatcttgcttgtgagaggaaacttcctcttatctacttgtcagcaactgctggtgctaggctcggtgtagctgaggaaataaaagcatgcttcaatgttggttggtctgatgacgagagccctgaacgtggttttcattacatttacctcactgaacaagattattcgcgcctgagttcttcggttatagcccatgaactgaaactagaaagtggagaaactagatgggttgttgataccattgttggaaaagaggatggactcggttgtgagaacttgcatggaagtggtgccattgccagtgcctattctaaagcatacaaggagacctttactctgacattcgtaactggacgagctgttggaattggtgcttatcttgctcggttaggcatgaggtgtatacagcgtcttgatcagccaattattttgacaggattttctgcgctgaataagcttctggggcgggaggtatacagctctcacatgcaactaggtggccccaaaatcatggctacaaatggtgtcgtccatctgactgtgtcagatgaccttgaaggtgtttctgcaatcttgaaatggctcagctatgttcctccttatgttggtggtcctcttcctatcatgaagcctcttgacccaccggatagacctgtaacatacttccctgagaattcatgtgatgctcgtgcagctatctgcggtgtgcaggacagtcaaggcaagtggatgggtggtatgtttgacagagaaagcttcgtggagacattagaaggctgggcaaaaactgttgtcaccggaagagcaaagcttggtggaattccagttggtgtcatagctgtggaaacccagactatgatgcaagtcatccctgctgatccaggtcagcttgattctgccgagcgtgtggttcctcaagcagggcaggtgtggtttcctgattctgccaccaaaacagcccaggcattgctggatttcaaccgtgaagagcttccgctgttcatcctcgctaactggagaggcttttctggtgggcaaagggatctgtttgaaggaatccttcaggctggttctaatattgttgagaatctgaggacatataaccagcctgcttttgtgtatattccaatgggcggagagcttaggggaggtgcatgggttgtggtagatagcaaaatcaatccagaacacattgagatgtatgctgagagaactgcaaaaggtaatgtccttgaaccagaaggattggttgagatcaaattcaggccaaaggaactggaagaatgcatgctaaggcttgacccggagttgatcaagctgagtacaaggctgagagaaatgaagaaggaaaatgctggcctctcggaaatggacaccactaggaggagtattattgctcggatgaagcaactgatgcctatatatacccaggttgctacacggtttgctgaattgcatgacacctctgctagaatggctgccaaaggtgtgatcggaaaggttgtcgattgggaagaatctcggtcctttttctataggaggttgcgaaggagagttactgaagatgcacttgccaaggaaatcagagaagctgctggcgagcagctgtcccagaaatctgcattggactatatcaagaaatggtacctttcttccaatggatctgatggaaacagtgaaaagtggaataacgatgaagctttctttgcttggaaagatgatccaacaaactatgagaatcaactcgaggagttgaaggctgaaagagtatccaagtggctctcgcgtctcgctgaaagccctgatgtgaaagctttgccaaatggtctttcaattgttcttaacaagatgaatccttcaaagagggagcaggttattgatggtctcaggcagcttctgggttga

SEQ ID NO: 9937 - protein, 2260 aa, Oryza sativa subsp
MEGSYQMNGILNGMSNSRHPSSPSEVDEFCKALGGDSPIHSVLVANNGMAAVKFMRSIRTWALETFGTEKAILLVAMATPEDLKINAEHIRIADQFVEVPGGTNNNNYANVQLIVEIAERTHVSAVWPGWGHASENPELPDALKEKGIIFLGPPSAAMAALGDKIGSSLIAQAAGVPTLPWSGSHVKIPPESCNSIPEEMYRSACVSTTEEAVASCQVVGYPAMIKASWGGGGKGIRKVHNDDEVRALFKQVQGEVPGSPIFIMKVASQSRHLEVQLLCDKHGNVAALHSRDCSVQRRHQKIIEEGPITVAPSETVKELEQAARRLAKCVHYVGAATVEYLYSMETGEYYFLELNPRLQVEHPVTEWIAEINLPAAQVVVGMGVPLYNIPEIRRFYGMEHGGGYDAWRKISAVATKFDLDNAQSVKPKGHCVAVRVTSEDPDDGFKPTSGRVEELNFKSKPNVWAYFSVKARHVFAFGESRSLAIANMVLGLKEIQIRGEIRTNVDYTVDLLNAAEYRENKIHTGWLDSRIAMRVRAERPPWYLSVVGGALYEASSRSSSVVTDYVGYLSKGQIPPKHISLVNLTVTLNIEGSKYTIETVRRGPRSYTLRMNGSEIEAEIHSLRDGGLLMQLDGNSHVIYAETEAAGTRLLINGRTCLLQKEHDPSKLLADTPCKLLRFLVADGSHVDADTPYAEVEVMKMCMPLLLPASGVIHFVMPEGQAMQVLYLYFTLLLFVCILFAYIFYKVTKMSILLQAADLIARLDLDDPSSVRRAEPFHGTFPKLGPPTAVSGKVHQKFAASVNSAHMILAGYEHNINEVVQDLLNCLDSPELPFLQWQELMSVLATRLPKDLRNELDGKYKEYELNSDFRKNKDFPAKLLRGIIEANLAYCSEKDRVTNERLVEPLMSLVKSYEGGRESHARVVVKSLFEEYLSVEELFSDNIQSDVIERLRLQHAKDLEKVVYIVFSHQYTCYSPENDTFFTLQLALKASQLLEHTKLSELRTSIARSLSELEMFTEEGERVSTPRRKMAINERMEDLVGAPLAVEDALVALFDHSDPTLQRRVVETYIRRLYQPYLVKGSVRMQWHRSGLIALWEFSEEHIKQRNGQDAMSLKQQVEDPEEKRWGVMVVIKSLQYLSSAIDAALKETSHYKAGAGNVSNGNSASSSHGNMLHIALVGINNQMSTLQDSGDEDQAQERINKISKILKDSTVTSHLNGAGVRVVSCIIQRDEGRPPMRHSFQWSVDKIYYEEDPMLRHVEPPLSTFLELNKVNLDGYNEVKYTPSRDRQWHIYTLIKNKKDQRSNDQRLFLRTIVRQPGVTNGFLSGNVDNEVGRAQASSSYTSSSILRSLMAALEEIELHAHNETVRSSYSHMYLCILRVQQLFDLIPFSRTIDNVGQDEATACTLLKNMALNIYEHVGVRMHRLSVCQWEVKLWLDCDGQASGAWRVVVTNVTGHTCTVDIYREVEDSNTHKLFYHSVTPSLGPLHGIVLDEPYKPLDAIDLKRYSARKNETTYCYDFPLAFETALKRSWKSTLSVVAEANEHNKSYAKVTELMFADSTGSWGTPLVPVERSPGINDIGIVAWIMKLSTPEFPSGREIIVVSNDVTFKAGSFGPREDAFFDAVTNLACERKLPLIYLSATAGARLGVAEEIKACFNVGWSDDESPERGFHYIYLTEQDYSRLSSSVIAHELKLESGETRWVVDTIVGKEDGLGCENLHGSGAIASAYSKAYKETFTLTFVTGRAVGIGAYLARLGMRCIQRLDQPIILTGFSALNKLLGREVYSSHMQLGGPKIMATNGVVHLTVSDDLEGVSAILKWLSYVPPYVGGPLPIMKPLDPPDRPVTYFPENSCDARAAICGVQDSQGKWMGGMFDRESFVETLEGWAKTVVTGRAKLGGIPVGVIAVETQTMMQVIPADPGQLDSAERVVPQAGQVWFPDSATKTAQALLDFNREELPLFILANWRGFSGGQRDLFEGILQAGSNIVENLRTYNQPAFVYIPMGGELRGGAWVVVDSKINPEHIEMYAERTAKGNVLEPEGLVEIKFRPKELEECMLRLDPELIKLSTRLREMKKENAGLSEMDTTRRSIIARMKQLMPIYTQVATRFAELHDTSARMAAKGVIGKVVDWEESRSFFYRRLRRRVTEDALAKEIREAAGEQLSQKSALDYIKKWYLSSNGSDGNSEKWNNDEAFFAWKDDPTNYENQLEELKAERVSKWLSRLAESPDVKALPNGLSIVLNKMNPSKREQVIDGLRQLLG

SEQ ID NO: 9938 - DNA, 1344 bp, Magnetospirillum gryphiswaldense
  CDS (1)..(1344): transl_table=11
atgttcgaaaaggtactgatcgccaatcgcggcgaaatcgcactgcgcatccatcgcgcctgccgggaaatgggcattcgcacggtcgctgtccattccaccgccgacaacgacgccatgcatgtgcgcctggccgacgaggccgtgtgcatcggcccgccctcggccaaggattcgtacctgaacaaggcggcgatcctgtcggcggcgaccatcaccggcgccgatgccatccaccccggctacggcttcttgtcggaaaacgccgatttcgcccagatggtcgaggaacacggcttcgtcttcatcggccccaccgccgaccatatccgcatgatgggcgacaagatcaccgccaagcaggcggcggcggcagccggtctgccctgcgtgcccggctctgaaggcgccttggaaacggtcgacgatgcgctcgaatgcgccgccaagatcggctatccggtgctgatcaaggccaccgccggcggcggcggcaagggcatgaaggtggcccgttcggccgacgaactgtccgaggcctataagatggccaggaacgaagccaaggcggcgttcggcaatgccgacgtctacctggaaaagtacctgggcaagccgcgccatatcgaaatgcagattctggccgacaattacggcgcggtggtgcatttgggtgaacgcgattgttcgttgcagcgtcgccatcagaaggtgctggaagaagcgccgtcgccggcgctcaacgacgaacagcgcgcccgcatcggcgacatcgcccgcaaggcggtgcagaagctgggctaccgcaatgccggcaccttggaatttttgttcgaggacggcgagttctatttcatcgaaatgaacacccgcctgcaggtcgagcacccgatcaccgaggccatcaccggcatcgatctggtgcgcgagcaattgcgcatcgccgccggcgcccccctgggctacacccaggaagacgtccgcttccagggccatgccttcgaatgccgcgtcaacgccgaagacccgcagaccttcgtgccctcgcccggtcgcatcaccggctatcacgcccccggcggcttgggcgtgcgcgtcgattccggcctttatgccaattaccgtatcccgccccattacgacagcatgatcgccaagctgatcgtctcgggcaattcccgcaacgaggcgctgatgcgcctgcgccgggccttgggcgagtacgtcatcgacggcatcaagaccaccctgcccctgcataaccgtctggtgcaggaccaggatttcgtcaacggcgattacgatatccactggctggaaaagtttgtcgaccgacataactga

SEQ ID NO: 9939 - protein, 447 aa, Magnetospirillum gryphiswaldense
MFEKVLIANRGEIALRIHRACREMGIRTVAVHSTADNDAMHVRLADEAVCIGPPSAKDSYLNKAAILSAATITGADAIHPGYGFLSENADFAQMVEEHGFVFIGPTADHIRMMGDKITAKQAAAAAGLPCVPGSEGALETVDDALECAAKIGYPVLIKATAGGGGKGMKVARSADELSEAYKMARNEAKAAFGNADVYLEKYLGKPRHIEMQILADNYGAVVHLGERDCSLQRRHQKVLEEAPSPALNDEQRARIGDIARKAVQKLGYRNAGTLEFLFEDGEFYFIEMNTRLQVEHPITEAITGIDLVREQLRIAAGAPLGYTQEDVRFQGHAFECRVNAEDPQTFVPSPGRITGYHAPGGLGVRVDSGLYANYRIPPHYDSMIAKLIVSGNSRNEALMRLRRALGEYVIDGIKTTLPLHNRLVQDQDFVNGDYDIHWLEKFVDRHN

SEQ ID NO: 9940 - DNA, 2030 bp, Glycine max
  CDS (90)..(1709)
atccgcatcaaaagaccttctctttctcttgccatcatttcattccccatacgctccatccatcaccctttctttcattctgttgggaaatggaagtcacactttcagcgtgcaagtccattagctcgccttctgttcccgtcgcagctttatttgcggggaaagcaggaactaagagttcgcaatgcagttttttagctggagcaaacaaagtgaggtttcctaggcaagtcggtcaagttagccacgttcgcaaacagcgccaaacgcgtcactgtggtgctctccacgcgacttgcagcggtgacaagatcctgatcgcgaatagaggcgagattgcggttcgcgttattcgaaccgctcatgaattggggattccgtgtgtggctgtgtactccaccattgataaggacgcccttcatgtcaaactggctgatgaagctgtatgcatcggcgaagcgccgagtagccagtcgtacttgctgatcccgaatgttctgtcggctgctattagccgcagatgcacgatgttgcatcctggctatggttttcttgcggagaatgctgtgtttgttgaaatgtgcagggaacatggaatcaactttattgggcccaaccctgacagtattcgggttatgggtgacaaagcaactgccagagagacaatgaagaaagcaggtgttcccaccgttccaggaagtgatggccttttacagagcacagaagaagctattaggctggcaaatgagattggtttccctgtgatgatcaaggcaacagctggtggtggaggacgtggcatgcgtcttgctaaagaacctgatgagtttgtgaagttgttacagcaagctaagagtgaggcagctgctgcatttggcaatgacggggtttatttggagaagtacattcaaaacccaaggcacattgagttccaggttcttgcagataaatatggtaatgttgttcactttggagaacgtgattgcagcattcagaggcgtaatcagaaactgcttgaagaagcaccatctcctgccctgacccctgagttgcgaaaggcaatgggagatgcagcagttgctgctgctgcatctattggttacataggtgttggaacgattgagtttcttttggatgaaagaggttccttttactttatggagatgaacacacgtatccaggttgagcatcctgtgacagaaatgatttcctcaacagatttgatagaagagcaaattcgtgtagctatgggagaaaaacttcgatacaaacaggaggatattgtcctcagaggacattctattgaatgccgtatcaatgcagaagatgcttttaagggatttagaccagggccaggtagaattacagcatacttgccatctggaggtccatttgttagaatggatagccatgtttatcctgattatgtggttcctccaagctatgactcccttcttggaaagctgattgtatgggctccaacaagagaaaaagcaattgaacgcatgaaaagggcacttgatgacactattatcacaggagttcctactacaattgattatcataaacttatccttgacatagaggatttcagaaatggaaaggttgatactgcttttattccaaaacacgaggaagagttggcaatgcctccgcagaagatggtactcgctaacagggtgaacgaactagctggttcaactgcctgatgaatatgattgtgtgatgtcagaattgctttttgtaatcgccgtgttgtcagtgcctcgaagtgaatgttttaatgaaattttgataattagtctcgtacattccttttcttcacataattatattgtaaaatcaattaattcaagtttgatttcatcccgaatattattgcaaggaattaagaataggtccttgcatttttttcggaagtcatagttgtcacaatggttggtttagaggatcttgtattaagagctcgatgctagatacagtaataaaaacttaaccttatcctaatagactgggtttgttatatgtaa

SEQ ID NO: 9941 - protein, 539 aa, Glycine max
MEVTLSACKSISSPSVPVAALFAGKAGTKSSQCSFLAGANKVRFPRQVGQVSHVRKQRQTRHCGALHATCSGDKILIANRGEIAVRVIRTAHELGIPCVAVYSTIDKDALHVKLADEAVCIGEAPSSQSYLLIPNVLSAAISRRCTMLHPGYGFLAENAVFVEMCREHGINFIGPNPDSIRVMGDKATARETMKKAGVPTVPGSDGLLQSTEEAIRLANEIGFPVMIKATAGGGGRGMRLAKEPDEFVKLLQQAKSEAAAAFGNDGVYLEKYIQNPRHIEFQVLADKYGNVVHFGERDCSIQRRNQKLLEEAPSPALTPELRKAMGDAAVAAAASIGYIGVGTIEFLLDERGSFYFMEMNTRIQVEHPVTEMISSTDLIEEQIRVAMGEKLRYKQEDIVLRGHSIECRINAEDAFKGFRPGPGRITAYLPSGGPFVRMDSHVYPDYVVPPSYDSLLGKLIVWAPTREKAIERMKRALDDTIITGVPTTIDYHKLILDIEDFRNGKVDTAFIPKHEEELAMPPQKMVLANRVNELAGSTA

SEQ ID NO: 9942 - DNA, 6936 bp, Triticum aestivum
  CDS (1)..(6936)
atgggatccacacatttgcccattgtcggccttaatgcctcgacaacaccatcgctatccactattcgcccggtaaattcagccggtgctgcattccaaccatctgccccttctagaacctccaagaagaaaagtcgtcgtgttcagtcattaagggatggaggcgatggaggcgtgtcagaccctaaccagtctattcgccaaggtcttgccggcatcattgacctcccaaaggagggcacatcagctccggaagtggatatttcacatgggtccgaagaacccaggggctcctaccaaatgaatgggatactgaatgaagcacataatgggaggcatgcttcgctgtctaaggttgtcgaattttgtatggcattgggcggcaaaacaccaattcacagtgtattagttgcgaacaatggaatggcagcagctaagttcatgcggagtgtccgaacatgggctaatgaaacatttgggtcagagaaggcaattcagttgatagctatggctactccagaagacatgaggataaatgcagagcacattagaattgctgatcaatttgttgaagtacccggtggaacaaacaataacaactatgcaaatgtccaactcatagtggagatagcagtgagaaccggtgtttctgctgtttggcctggttggggccatgcatctgagaatcctgaacttccagatgcactaaatgcaaacggaattgtttttcttgggccaccatcatcatcaatgaacgcactaggtgacaaggttggttcagctctcattgctcaagcagcaggggttccgactcttccttggagtggatcacaggtggaaattccattagaagtttgtttggactcgatacccgcggagatgtataggaaagcttgtgttagtactacggaggaagcacttgcgagttgtcagatgattgggtatcccgccatgattaaagcatcatggggtggtggtggtaaagggatccgaaaggttaataatgacgatgatgtcagagcactgtttaagcaagtgcaaggtgaagttcctggctccccaatatttatcatgagacttgcatctcagagtcgacatcttgaagttcagttgctttgtgatcaatatggcaatgtagctgcgcttcacagtcgtgactgcagtgtgcaacggcgacaccaaaagattattgaggaaggaccagttactgttgctcctcgcgagacagtgaaagagctagagcaagcagcaaggaggcttgctaaggctgtgggttatgttggtgctgctactgttgaatatctctacagcatggagactggtgaatactattttctggaacttaatccacggttgcaggttgagcatccagtcaccgagtggatagctgaagtaaacttgcctgcagctcaagttgcagttggaatgggtatacccctttggcaggttccagagatcagacgtttctatggaatggacaatggaggaggctatgacatttggaggaaaacagcagctcttgctactccatttaacttcgatgaagtggattctcaatggccaaagggtcattgtgtagcagttaggataaccagtgaggatccagatgacggattcaagcctaccggtggaaaagtaaaggagatcagttttaaaagcaagccaaatgtttgggcctatttctctgttaagtccggtggaggcattcatgaatttgctgattctcagtttggacatgtttttgcatatggagtgtctagagcagcagcaataaccaacatgtctcttgcgctaaaagagattcaaattcgtggagaaattcattcaaatgttgattacacagttgatctcttgaatgcctcagacttcaaagaaaacaggattcatactggctggctggataacagaatagcaatgcgagtccaagctgagagacctccgtggtatatttcagtggttggaggagctctatataaaacaataacgagcaacacagacactgtttctgaatatgttagctatctcgtcaagggtcagattccaccgaagcatatatcccttgtccattcaactgtttctttgaatatagaggaaagcaaatatacaattgaaactataaggagcggacagggtagctacagattgcgaatgaatggatcagttattgaagcaaatgtccaaacattatgtgatggtggacttttaatgcagttggatggaaacagccatgtaatttatgctgaagaagaggccggtggtacacggcttctaattgatggaaagacatgcttgttacagaatgatcacgatccttcaaggttattagctgagacaccctgcaaacttcttcgtttcttggttgccgatggtgctcatgttgaagctgatgtaccatatgcggaagttgaggttatgaagatgtgcatgcccctcttgtcacctgctgctggtgtcattaatgttttgttgtctgagggccagcctatgcaggctggtgatcttatagcaagacttgatcttgatgacccttctgctgtgaagagagctgagccatttaacggatctttcccagaaatgagccttcctattgctgcttctggccaagttcacaaaagatgtgccacaagcttgaatgctgctcggatggtccttgcaggatatgatcacccgatcaacaaagttgtacaagatctggtatcctgtctagatgctcctgagcttcctttcctacaatgggaagagcttatgtctgttttagcaactagacttccaaggcttcttaagagcgagttggagggtaaatacagtgaatataagttaaatgttggccatgggaagagcaaggatttcccttccaagatgctaagagagataatcgaggaaaatcttgcacatggttctgagaaggaaattgctacaaatgagaggcttgttgagcctcttatgagcctactgaagtcatatgagggtggcagagaaagccatgcacactttattgtgaagtcccttttcgaggactatctctcggttgaggaactattcagtgatggcattcagtctgatgtgattgaacgcctgcgccaacaacatagtaaagatctccagaaggttgtagacattgtgttgtctcaccagggtgtgagaaacaaaactaagctgatactaacactcatggagaaactggtctatccaaaccctgctgtctacaaggatcagttgactcgcttttcctccctcaatcacaaaagatattataagttggcccttaaagctagcgagcttcttgaacaaaccaagcttagtgagctccgcacaagcattgcaaggagcctttcagaacttgagatgtttactgaagaaaggacggccattagtgagatcatgggagatttagtgactgccccactgccagttgaagatgcactggtttctttgtttgattgtagtgatcaaactcttcagcagagggtgatcgagacgtacatatctcgattataccagcctcatcttgtcaaggatagtatccagctgaaatatcaggaatctggtgttattgctttatgggaattcgctgaagcgcattcagagaagagattgggtgctatggttattgtgaagtcgttagaatctgtatcagcagcaattggagctgcactaaagggtacatcacgctatgcaagctctgagggtaacataatgcatattgctttattgggtgctgataatcaaatgcatggaactgaagacagtggtgataacgatcaagctcaagtcaggatagacaaactttctgcgacactggaacaaaatactgtcacagctgatctccgtgctgctggtgtgaaggttattagttgcattgttcaaagggatggagcactcatgcctatgcgccataccttcctcttgtcggatgaaaagctttgttatgaggaagagccggttctccggcatgtggagcctcctctttctgctcttcttgagttgggtaagttgaaagtgaaaggatacaatgaggtgaagtatacaccgtcacgtgatcgtcagtggaacatatacacacttagaaatacagagaaccccaaaatgttgcacagggtgtttttccgaactcttgtcaggcaacccggtgcttccaacaaattcacatcaggcaacatcagtgatgttgaagtgggaggagctgaggaatctctttcatttacatcgagcagcatattaagatcgctgatgactgctatagaagagttggagcttcacgcgattaggacaggtcactctcatatgtttttgtgcatattgaaagagcaaaagcttcttgatcttgttcccgtttcagggaacaaagttgtggatattggccaagatgaagctactgcatgcttgcttctgaaagaaatggctctacagatacatgaacttgtgggtgcaaggatgcatcatctttctgtatgccaatgggaggtgaaacttaagttggacagcgatgggcctgccagtggtacctggagagttgtaacaaccaatgttactagtcacacctgcactgtggatatctaccgtgaggtcgaagatacagaatcacagaaactagtgtaccactctgctccatcgtcatctggtcctttgcatggcgttgcactgaatactccatatcagcctttgagtgttattgatctgaaacgttgctccgctagaaataacagaactacatactgctatgattttccgttggcatttgaaactgcagtgcagaagtcatggtctaacatttctagtgacactaaccgatgttatgttaaagcgacggagctggtgtttgctcacaagaacgggtcatggggcactcctgtaattcctatggagcgtcctgctgggctcaatgacattggtatggtagcttggatcttggacatgtccactcctgaatatcccaatggcaggcagattgttgtcatcgcaaatgatattacttttagagctggatcgtttggtccaagggaagatgcattttttgaaactgttaccaacctagcttgtgagaggaagcttcctctcatctacttggcagcaaactctggtgctcggatcggcatagcagatgaagtaaaatcttgcttccgtgttggatggtctgatgatggcagccctgaacgtgggtttcaatatatttatctgactgaagaagaccatgctcgtattagcgcttctgttatagcgcacaagatgcagcttgataatggtgaaattaggtgggttattgattctgttgtagggaaggaggatgggctaggtgtggagaacatacatggaagtgctgctattgccagtgcctattctagggcctatgaggagacatttacgcttacatttgtgactggaaggactgttggaataggagcatatcttgctcgacttggcatacggtgcatacagcgtactgaccagcccattatcctaactgggttctctgccttgaacaagcttcttggccgggaagtttacagctcccacatgcagttgggtggccccaaaattatggcgacaaacggtgttgtccatctgacagtttcagatgaccttgaaggtgtatctaatatattgaggtggctcagctatgttcctgccaacattggtggacctcttcctattacaaaatctttggacccacctgacagacccgttgcttacatccctgagaatacatgcgatcctcgtgctgccatcagtggcattgatgatagccaagggaaatggttggggggcatgttcgacaaagacagttttgtggagacatttgaaggatgggcgaagtcagttgttactggcagagcgaaactcggagggattccggtgggtgttatagctgtggagacacagactatgatgcagctcatccctgctgatccaggccagcttgattcccatgagcgatctgttcctcgtgctgggcaagtctggtttccagattcagctactaagacagcgcaggcaatgctggacttcaaccgtgaaggattacctctgttcatccttgctaactggagaggcttctctggtggacaaagagatctttttgaaggaatccttcaggctgggtcaacaattgttgagaaccttaggacatacaatcagcctgcctttgtatatatccccaaggctgcagagctacgtggaggggcttgggtcgtgattgatagcaagataaatccagatcgcattgagttctatgctgagaggactgcaaagggcaatgttctcgaacctcaagggttgatcgagatcaagttcaggtcagaggaactccaagagtgcatgggtaggcttgatccagaattgataaatctgaaggcaaagctccagggagtaaagcatgaaaatggaagtctacctgagtcagaatcccttcagaagagcatagaagcccggaagaaacagttgttgcctttgtatactcaaattgcggtacggttcgctgaattgcatgacacttcccttagaatggctgctaagggtgtgattaagaaggttgtagactgggaagattctaggtcgttcttctacaagagattacggaggaggatatccgaggatgttcttgcgaaggaaattagaggtgtaagtggcaagcagttttctcaccaatcggcaatcgagctgatccagaaatggtacttggcctctaagggagctgaaacaggaagcactgaatgggatgatgacgatgcttttgttgcctggagggaaaaccctgaaaactaccaggagtatatcaaagaactcagggctcaaagggtatctcagttgctctcagatgttgcagactccagtccagatctagaagccttgccacagggtctttctatgctattagagaagatggatccctcaaggagagcacagtttgttgaggaagtcaagaaagtccttaaatga

SEQ ID NO: 9943 - protein, 2311 aa, Triticum aestivum
MGSTHLPIVGLNASTTPSLSTIRPVNSAGAAFQPSAPSRTSKKKSRRVQSLRDGGDGGVSDPNQSIRQGLAGIIDLPKEGTSAPEVDISHGSEEPRGSYQMNGILNEAHNGRHASLSKVVEFCMALGGKTPIHSVLVANNGMAAAKFMRSVRTWANETFGSEKAIQLIAMATPEDMRINAEHIRIADQFVEVPGGTNNNNYANVQLIVEIAVRTGVSAVWPGWGHASENPELPDALNANGIVFLGPPSSSMNALGDKVGSALIAQAAGVPTLPWSGSQVEIPLEVCLDSIPAEMYRKACVSTTEEALASCQMIGYPAMIKASWGGGGKGIRKVNNDDDVRALFKQVQGEVPGSPIFIMRLASQSRHLEVQLLCDQYGNVAALHSRDCSVQRRHQKIIEEGPVTVAPRETVKELEQAARRLAKAVGYVGAATVEYLYSMETGEYYFLELNPRLQVEHPVTEWIAEVNLPAAQVAVGMGIPLWQVPEIRRFYGMDNGGGYDIWRKTAALATPFNFDEVDSQWPKGHCVAVRITSEDPDDGFKPTGGKVKEISFKSKPNVWAYFSVKSGGGIHEFADSQFGHVFAYGVSRAAAITNMSLALKEIQIRGEIHSNVDYTVDLLNASDFKENRIHTGWLDNRIAMRVQAERPPWYISVVGGALYKTITSNTDTVSEYVSYLVKGQIPPKHISLVHSTVSLNIEESKYTIETIRSGQGSYRLRMNGSVIEANVQTLCDGGLLMQLDGNSHVIYAEEEAGGTRLLIDGKTCLLQNDHDPSRLLAETPCKLLRFLVADGAHVEADVPYAEVEVMKMCMPLLSPAAGVINVLLSEGQPMQAGDLIARLDLDDPSAVKRAEPFNGSFPEMSLPIAASGQVHKRCATSLNAARMVLAGYDHPINKVVQDLVSCLDAPELPFLQWEELMSVLATRLPRLLKSELEGKYSEYKLNVGHGKSKDFPSKMLREIIEENLAHGSEKEIATNERLVEPLMSLLKSYEGGRESHAHFIVKSLFEDYLSVEELFSDGIQSDVIERLRQQHSKDLQKVVDIVLSHQGVRNKTKLILTLMEKLVYPNPAVYKDQLTRFSSLNHKRYYKLALKASELLEQTKLSELRTSIARSLSELEMFTEERTAISEIMGDLVTAPLPVEDALVSLFDCSDQTLQQRVIETYISRLYQPHLVKDSIQLKYQESGVIALWEFAEAHSEKRLGAMVIVKSLESVSAAIGAALKGTSRYASSEGNIMHIALLGADNQMHGTEDSGDNDQAQVRIDKLSATLEQNTVTADLRAAGVKVISCIVQRDGALMPMRHTFLLSDEKLCYEEEPVLRHVEPPLSALLELGKLKVKGYNEVKYTPSRDRQWNIYTLRNTENPKMLHRVFFRTLVRQPGASNKFTSGNISDVEVGGAEESLSFTSSSILRSLMTAIEELELHAIRTGHSHMFLCILKEQKLLDLVPVSGNKVVDIGQDEATACLLLKEMALQIHELVGARMHHLSVCQWEVKLKLDSDGPASGTWRVVTTNVTSHTCTVDIYREVEDTESQKLVYHSAPSSSGPLHGVALNTPYQPLSVIDLKRCSARNNRTTYCYDFPLAFETAVQKSWSNISSDTNRCYVKATELVFAHKNGSWGTPVIPMERPAGLNDIGMVAWILDMSTPEYPNGRQIVVIANDITFRAGSFGPREDAFFETVTNLACERKLPLIYLAANSGARIGIADEVKSCFRVGWSDDGSPERGFQYIYLTEEDHARISASVIAHKMQLDNGEIRWVIDSVVGKEDGLGVENIHGSAAIASAYSRAYEETFTLTFVTGRTVGIGAYLARLGIRCIQRTDQPIILTGFSALNKLLGREVYSSHMQLGGPKIMATNGVVHLTVSDDLEGVSNILRWLSYVPANIGGPLPITKSLDPPDRPVAYIPENTCDPRAAISGIDDSQGKWLGGMFDKDSFVETFEGWAKSVVTGRAKLGGIPVGVIAVETQTMMQLIPADPGQLDSHERSVPRAGQVWFPDSATKTAQAMLDFNREGLPLFILANWRGFSGGQRDLFEGILQAGSTIVENLRTYNQPAFVYIPKAAELRGGAWVVIDSKINPDRIEFYAERTAKGNVLEPQGLIEIKFRSEELQECMGRLDPELINLKAKLQGVKHENGSLPESESLQKSIEARKKQLLPLYTQIAVRFAELHDTSLRMAAKGVIKKVVDWEDSRSFFYKRLRRRISEDVLAKEIRGVSGKQFSHQSAIELIQKWYLASKGAETGSTEWDDDDAFVAWRENPENYQEYIKELRAQRVSQLLSDVADSSPDLEALPQGLSMLLEKMDPSRRAQFVEEVKKVLK

SEQ ID NO: 9944 - DNA, 1542 bp, Sulfolobus metallicus
  CDS (1)..(1542): transl_table=11
atgccaccatttggaaaagtacttgtttcaaatagaggagagatagccgtaagcgtaatgaagagaattaaagagatgggaatgaaggcagtagctgtctactctgaggcagataaatatgccctccacgtaaaatatgcggacgaagcctactacataggacctgcaccttctattgagagttatctgaacattgaaaggattatagatgcagcggagaaagcacatgcagacgcagtacatccgggttacggtttcctgtcggagagagcagacttcgctgaggccgtagagaaggcaggtatgactttcattggaccctcatctgaggtaatgaacagggtaaagagtaagctagacggaaaaagaattgcaaaagaagcaggaacgcctattgcccccggatctgacggaccagttggatcgttggatgaggcattgaaacttacagagaaaataggatacccagtaatggtaaaagcagcttatggaggtggaggtatagggataacaagagccgacaatcctgatcagttgatggacatatggggtagaaaccaaaggttagctaaggaagccttcggtaggccagacttgtatatagagaaagctgcggttagaccgagacacatcgagactcagcttattggagataaatacggaacttatgtagttgcatttgaaagggagtgtacaatccagaggagaaatcagaaacttatagaggaggctccgtctccggccctaacttgggaaaagagggaagagttcattgatgcatcagttaagttcggcaagaagattggttacttcgctttaggaactatggaattcgcatactctgacacgaccaaggatctgtacttcctggagcttaacaagagattacaagtagagcatggaattactgagcttgtaactgggatcgatctagtgaaactccaaataaggttagtagcaggagaacatatgcctttcactcaggaggaactaaagaagagactcagaggacacgcaatagaatataggataaacgctgaagatccgttaaacaacttcaccggtagttcaggttttgtaacatattataaggaaccaagcggacctggagtgaggcttgatacagggataatggaaggaagctatgtacctccattctatgattcattggtagctaagctcatggtatacggagagaacagagctagggcaatagaagtaggaaggagagcattgagagacctacagataggaggtataaagaccacaatacctctctacaagctaataatggatgacgaagattaccagaatggaaacttcactaccgcatacatagcggataagagtgagatattcacaaagaagctcagggagaaggaaatgctgaagacagctttagctgcatcagtctacaatagaggattgctgagaggatctagcggaaataacaacgtacaagctcaagataacggcaaacctagatctgcatggaagacatatggagttcaggctcaggcctctgcaagggtgatgtggtaa

SEQ ID NO: 9945 - protein, 513 aa, Sulfolobus metallicus
MPPFGKVLVSNRGEIAVSVMKRIKEMGMKAVAVYSEADKYALHVKYADEAYYIGPAPSIESYLNIERIIDAAEKAHADAVHPGYGFLSERADFAEAVEKAGMTFIGPSSEVMNRVKSKLDGKRIAKEAGTPIAPGSDGPVGSLDEALKLTEKIGYPVMVKAAYGGGGIGITRADNPDQLMDIWGRNQRLAKEAFGRPDLYIEKAAVRPRHIETQLIGDKYGTYVVAFERECTIQRRNQKLIEEAPSPALTWEKREEFIDASVKFGKKIGYFALGTMEFAYSDTTKDLYFLELNKRLQVEHGITELVTGIDLVKLQIRLVAGEHMPFTQEELKKRLRGHAIEYRINAEDPLNNFTGSSGFVTYYKEPSGPGVRLDTGIMEGSYVPPFYDSLVAKLMVYGENRARAIEVGRRALRDLQIGGIKTTIPLYKLIMDDEDYQNGNFTTAYIADKSEIFTKKLREKEMLKTALAASVYNRGLLRGSSGNNNVQAQDNGKPRSAWKTYGVQAQASARVMW

SEQ ID NO: 9946 - DNA, 2080 bp, Glycine max
  CDS (153)..(1772)
acccgcatcaaaagtcactccattcccatcagaacacaaaacacagcatttcccttagcgtaggtaaagccatagtatccatcactcactctttcgcaagcattctttctgtttatatatttcactcaccaataccttcattgtgttaggaaatggaagtcacactttcagcctgcaagtccgttagctcgccttctgttcccgtcgcaggtttgtttgcggggaatggaggaattaagagctcgcaatgcagtttcttagcgggagcgagcaaagtgaggtttcctaggcaagtaggtcaagttagccaccttcgcaaacagcgccaaacgcgtcactgcggtgctctccacgcgacttgcagcggtgacaagatcctgatcgcgaacagaggcgagattgccgtccgcgttattcgaaccgctcatgaattggggattccttgtgtggctgtgtactccaccatcgacaaggacgcgcttcatgtcaaattggctgatgaagccgtttgcatcggggaagcgccgagtagccagtcctacttgctgatcccgaatgttctgtcagctgctattagccgcagatgcaccatgttgcatcctggctatggttttcttgcggagaatgcagtgtttgttgaaatgtgcagagaacatggaatcaactttattgggcctaaccctgacagtattcgggttatgggtgacaaagcaactgccagagagacaatgaagaaagcaggtgttcccaccgttccgggaagtgatggccttttacagagcacagaagaagctatcagactggcaaatgagattggtttccctgtgatgatcaaggcaacagctggtggtggaggacgtggcatgcgtcttgctaaagaacctgctgagtttgtgaagtttttacagcaagctaagagtgaggcagctgctgcatttggcaatgatggggtttatttggagaagtacattcaaaacccaaggcacattgagttccaggttcttgcagataaatatggtaatgttgttcactttggagaacgtgattgcagcattcagaggcgcaaccagaaactgcttgaagaagcaccatctcctgccctgacccctgagttgcgaaaggcaatgggagatgcagcagttgcagctgctgcatctattggttacataggtgttggaacggttgagttccttttggatgaaagaggttccttttactttatggagatgaacactcgtatccaggttgagcatccggtgacagaaatgatttcctcaacggatttgatagaagagcaaattcgtgtagctatgggagaaaaacttcgatacaaacaggaggatattgtcctcagaggacattctattgaatgccgtatcaatgcagaagatgcttttaagggatttagaccagggccaggtagaattactgcatacttgccatccggaggtccatttgttagaatggatagccatgtttatcctgattatgtggttcctccaagctatgattcccttcttggaaagctgattgtatgggccccaactagagaaaaagcaattgaacgcatgaaaagggcacttgatgatactattatcacaggagttcctactacaattgattatcataaacttatccttgacatagaggatttcagaaatggcaaggttgatactgcttttattccaaaacacgaggaagagttggcaatgccaccgcagaagatggtactcgctaacagggtgaatgaactagctggttcaactgcctgatgaatatgattgtgtgatgccagaattgctttgttgtaatcaccgtgtcgttagtgccttgaagtcaatgttttattgaaattttgataattagtctcgtacattcctatttcttcacataattatattgtaatatcaattaatttcatcccaaatattagtgcaaggaataaggaataactccttgcatttttcttccaaagttagttgtctaaacggtttagaggatctttgtcccaaggcttgtttgtaattcttgtattaagagctcgttgctagatacactaataaaaacttaatcttatcct

SEQ ID NO: 9947 - protein, 539 aa, Glycine max
MEVTLSACKSVSSPSVPVAGLFAGNGGIKSSQCSFLAGASKVRFPRQVGQVSHLRKQRQTRHCGALHATCSGDKILIANRGEIAVRVIRTAHELGIPCVAVYSTIDKDALHVKLADEAVCIGEAPSSQSYLLIPNVLSAAISRRCTMLHPGYGFLAENAVFVEMCREHGINFIGPNPDSIRVMGDKATARETMKKAGVPTVPGSDGLLQSTEEAIRLANEIGFPVMIKATAGGGGRGMRLAKEPAEFVKFLQQAKSEAAAAFGNDGVYLEKYIQNPRHIEFQVLADKYGNVVHFGERDCSIQRRNQKLLEEAPSPALTPELRKAMGDAAVAAAASIGYIGVGTVEFLLDERGSFYFMEMNTRIQVEHPVTEMISSTDLIEEQIRVAMGEKLRYKQEDIVLRGHSIECRINAEDAFKGFRPGPGRITAYLPSGGPFVRMDSHVYPDYVVPPSYDSLLGKLIVWAPTREKAIERMKRALDDTIITGVPTTIDYHKLILDIEDFRNGKVDTAFIPKHEEELAMPPQKMVLANRVNELAGSTA

SEQ ID NO: 9948 - DNA, 1620 bp, Arabidopsis thaliana
  CDS (1)..(1620)
  misc_feature (1053)..(1053): n is a, g, c or t
atggacgcttctatgattaccaattccaaatccattacttctccaccctctttagccttagggaagtcaggaggaggaggagttatcagaagttcactatgtaacttaatgatgccaagcaaagttaacttccctagacaaagaactcaaactctaaaggttagccagaagaaactcaagagagctactagtggtggtcttggtgttacatgcagtggtggtgataagattctcgtagcgaatcgaggtgaaattgcagttcgtgttatcagaactgctcatgaaatggggattccttgtgttgctgtgtattctactatagataaagatgctcttcatgttaaattagctgatgaagctgtttgtattggtgaagctcctagtaaccagtcgtatttggtgattccgaatgttctgtctgcggctattagccgtggatgtacaatgcttcatcctggatatggttttctttcggagaacgctctctttgttgaaatgtgtagagaccatgggatcaattttattggacctaatcctgataccatccgtgttatgggagacaaagcgactgcaagagagacaatgaaaaatgcaggggttcccactgtaccagggagtgatgggctattgcagagtacagaagaagctgtcagggtcgccaatgagattggtttccctgtaatgatcacggcaacagctggtggtggtggacgtggaatgcgtcttgctaaggaaccgggagagtttgtaaaactgttgcagcaagctaagagcgaggctgctgctgcttttgggaatgatggatgttatctggagaagttcgttcaaaaccctagacatattgagttccaggtgctggcagataaatttggaaatgttgttcactttggtgagcgtgactgcagcatccagaggcgtaaccaaaagcttctggaagaaccttctccagcattgaccgctgaattgcgaaaagccatgggtgatgcagcagtcgcagcagcagcatccattgggtacattggtgttggtactgtggagtttcttttagatganagaggttccttctacttcatggaaatgaacactaggatccaggtggagcatcctgtgacagagatgatttactctgttgatttgatagaggagcagattcgtgttgcaatgggagagaaacttcgttacaaacaggaagatattgtgctcagagggcactcaattgaatgtcgtatcaatgcagaagatccatttaaaggattcagacctggacctggcagaataacatcatacctgccatctggaggtcctttcgttagaatggacagccatgtctattccgactatgttgtgcctccaagctatgattctcttcttgggaagcttattgtgtgggctccaacgagggaaaaagcaattgaacggatgaagcgggcgcttaatgacactatcattacaggggttccaacgactatcaattaccacaaacttatccttgatgttgaggatttcaaaaatggaaaagttgatacagctttcatcgtcaagcatgaagaggagctagctgagttagtgggatatgaagcctttggtaaagctgaacatagagataggagaattgcatga

SEQ ID NO: 9949 - protein, 539 aa, Arabidopsis thaliana
  misc_feature (351)..(351): The Xaa at location 351 stands for Asp, or Glu.
MDASMITNSKSITSPPSLALGKSGGGGVIRSSLCNLMMPSKVNFPRQRTQTLKVSQKKLKRATSGGLGVTCSGGDKILVANRGEIAVRVIRTAHEMGIPCVAVYSTIDKDALHVKLADEAVCIGEAPSNQSYLVIPNVLSAAISRGCTMLHPGYGFLSENALFVEMCRDHGINFIGPNPDTIRVMGDKATARETMKNAGVPTVPGSDGLLQSTEEAVRVANEIGFPVMITATAGGGGRGMRLAKEPGEFVKLLQQAKSEAAAAFGNDGCYLEKFVQNPRHIEFQVLADKFGNVVHFGERDCSIQRRNQKLLEEPSPALTAELRKAMGDAAVAAAASIGYIGVGTVEFLLDXRGSFYFMEMNTRIQVEHPVTEMIYSVDLIEEQIRVAMGEKLRYKQEDIVLRGHSIECRINAEDPFKGFRPGPGRITSYLPSGGPFVRMDSHVYSDYVVPPSYDSLLGKLIVWAPTREKAIERMKRALNDTIITGVPTTINYHKLILDVEDFKNGKVDTAFIVKHEEELAELVGYEAFGKAEHRDRRIA

SEQ ID NO: 9950 - DNA, 3819 bp, Ostreococcus tauri
  CDS (1)..(3819)
atggcgtccagcgcgcgcgccgccggcgcgtcggtgatcaaaacctctcgcgcgcgagacggaaagaagcgcgcgtgcgtccgcgcgcgcgtctccagcgcgcgcgcggggacggcgaacgagggacgtgatgtcgatggatcgaacggaccgccgcggggggtcgtggacgcgagaagacggacgggaggtcggtcgaggacggcggcgggcgcgcggacgggcggcgggcgcgacgcggagacgccgggcggtgatcgagagggcgtgatcgcgagcgcgacggcgaacggtgagaatgcgacgagtggtggacggacgatcgaggatatcctgcgagcgaagagtggattcacgaagattttgtgcgcgaatcgcggggaaatcgcggttcgcgtgttccgagcgggacaagagctcgggatgaagacggtggcgatcttcgcggacgccgatcgacagtccacgcacagatacaaggcggatgagtcgtacgaggtgggggtgggtaaggcgcccgtggcggcgtacttggattacgaaagcatcatccgctgcgccaaggagaacggggcgcaggcgattcaccccgggtacggtttgttgagcgagaacgcgacgttcgcgagacgctgcgaggaggagggcatcgttctcatcggtccgcgatcgcagacgttgacggagatgggcgacaaggtgatcgcgaagcaaaaggcgacggagtgcggcttgccgctcgtcccgggcactgcgacggcgacaatggacgtgaacgacgcgctggaattcgcgagagagttcgggatgccgatcatgcttaaggccgccatgggcggaggtggacgcggtatgcgcgttgtcaaggagtttgacgagctcgaggacgctttcaagcgagcgtcgagcgaagcgcagacggcattcggtgacgggcgaatgttcctggagcgatacgtcgaggcgccgcgacacatcgaggtgcaaattctcgccgacaactacgggaacgtcgtccaccttggcgagcgcgattgctcggtgcaacggcgtcatcagaaggtggtcgagctcgccccggcgccgaacctcgatccggtactccgcgatacgttgtgcaacgacgccatcaagctcgccaagcacgtcaactaccgcaacgccgggaccgtggagttcatggtcgacaaggaaggtcgtcactacttcttggaagtgaatccgcgtattcaggtcgaacacacggtgacggaggaagtcaccggtgtcgatttggtgcagtcacaaatcctcatcgcgggtggtcaaaagctcagcgacatcggaatcaactcccaagaggacatcgtgctcagaggttttgcgatgcagtgcagaatcaccactgaagacccatcgatgaactttgccccggatttcggtaaggttgaagtgtatcgccccccgggcggcatgggtgttcgcctcgacggtgaagtcgtcgtcggctctcgcgtttcgcccaactacgactctcttctcgtcaagctcacgtgcacggagaagacgttcgatgctgcggtgcagaagatgtatcgttccttgaacgagttccgcattcgtggtgtcaagacgaacattccgttcttgttgaacgtcatgcagaatgagacgttcttgagcgccaactttgccacggatttcatcgacagcacgccgagcttgttcaagctcgattcgtacatcgatgacacgcaaaagctcctgaactacctcggtgatgttgcagtgaacggatcctctcacccaggtgcggtgggtccggcgcctacgtgcgtggaaccgccggttccggagccgaagaagttattggacgaccttcagggtaaggggttcaaggctattttggataaggaaggtccggcgggcttcgccaaggcggttcgcaaccacaagggtctactcatcatggacaccacgtggcgtgacgctcaccagtcgctccttgcgactcgagtacgcactcacgatatgcgacgctctgctccgcttacgcgaagtgctctcgatggcgcgtactctttggaaatgtggggtggtgctacgttcgacgtggctcttcgattcctgcaggaagatccctggcgacgacttgaacttctccgcgagcaagtaccgaacattccgttccaaatgctccttcgaggtgctaacgcggttggttacacgagttacgccgacaacgtcgtgcaggctttcgtgcaccaagcgaagaagtctggcgtcgacatcttccgcgtgttcgactccttgaactacgaagacaacctcatgttcggtattgatgccgtccgcaacgcgaacggtgttgttgaggcgacgatttgctacagcggtgacgtgagtgatccgaagagaacgaagtacactttggattactacgtcgcgctcaccgaaaagctcgtcgcccacggtattgacgtcctcgccatcaaagatatggccggtctgctcaagccacgtgcagcgacgatgctcgtggaggcgattcgagcaaaattccccgatttgccgatccatgtgcacacacatgacacggcctccaccggtgtcgcatcgatgcttgcttgcgcgaacgccggtgccgacgtcgttgacgtgtgcatggacgccttgtccggcacgacgtctcaacccagcatcggcgccgtcctgaactctgtcgctggaaccgatctcgacacgggtatggacatcgaagaagtgttaaaactcaacttgttctgggaacaaacgagaggtctttactctccatacgaaagcggcatcaagagcggcagctcggatgtatacattcacgaaatgccgggcggtcagtacacgaacttgaagtttcaagcttacgcgaacggcttgggtagtgagtgggatcgtatcaaggactcgtacgcgactgcgaacagaattctgggtgacattgtgaaagtgacaccgtcctccaaggtagttggcgactttgctcagttcttggtcgcgaacaacttggatgagaaatccctcctcgagaaagctgacacgctctcgttcccgacgtccgtcgtcgaatacttccaaggttacttggggcagccggttggcggcttccctgagccgcttcgctccaaggttgtcaagggcaaggacatcatcaacggtcgcccgggcgcgtcgcttccagagctggatctgtccaagctccaaaacgatttggctcgcaagcacgtgggtcgccgcgcgatcacgcacaaggacactctcgcggcggcactttatcccaaagtgtttgacgaatacgtcgtcaagcgcgacactgtcggtccggttggcttgttgccaaccaaggcgttcttgaagggcctcgacatcgacgaagagattgaggtcaccacggatcgtggcgtgagcacgaacatcaagctcaaggctgtcggtgagctcttgcccagcgggagccgcgaggtgttcttcgaggtcaacggcatcccgcgcgtggtggagatccacgaccgtaaggtgcttgaatccacgaagtctggcgtggtttccactgcgcgggagaagagcgacccgctcgatgagggttcgatcggcgcgccgatgtccggcgacgtcgtcgacgttctcatcgccccgggccaaaaggtcaaggctggcgagtccctcgtcgtcctcagtgcgatgaagatggagaccacggtggcgtcgcccgtctcaggcacgctcaagcacgtcgtcgtcgtcaagggtgactcgtgcgccgctggggacttactgtgcgccatcgataccgatgctgcctag

SEQ ID NO: 9951 - protein, 1272 aa, Ostreococcus tauri
MASSARAAGASVIKTSRARDGKKRACVRARVSSARAGTANEGRDVDGSNGPPRGVVDARRRTGGRSRTAAGARTGGGRDAETPGGDREGVIASATANGENATSGGRTIEDILRAKSGFTKILCANRGEIAVRVFRAGQELGMKTVAIFADADRQSTHRYKADESYEVGVGKAPVAAYLDYESIIRCAKENGAQAIHPGYGLLSENATFARRCEEEGIVLIGPRSQTLTEMGDKVIAKQKATECGLPLVPGTATATMDVNDALEFAREFGMPIMLKAAMGGGGRGMRVVKEFDELEDAFKRASSEAQTAFGDGRMFLERYVEAPRHIEVQILADNYGNVVHLGERDCSVQRRHQKVVELAPAPNLDPVLRDTLCNDAIKLAKHVNYRNAGTVEFMVDKEGRHYFLEVNPRIQVEHTVTEEVTGVDLVQSQILIAGGQKLSDIGINSQEDIVLRGFAMQCRITTEDPSMNFAPDFGKVEVYRPPGGMGVRLDGEVVVGSRVSPNYDSLLVKLTCTEKTFDAAVQKMYRSLNEFRIRGVKTNIPFLLNVMQNETFLSANFATDFIDSTPSLFKLDSYIDDTQKLLNYLGDVAVNGSSHPGAVGPAPTCVEPPVPEPKKLLDDLQGKGFKAILDKEGPAGFAKAVRNHKGLLIMDTTWRDAHQSLLATRVRTHDMRRSAPLTRSALDGAYSLEMWGGATFDVALRFLQEDPWRRLELLREQVPNIPFQMLLRGANAVGYTSYADNVVQAFVHQAKKSGVDIFRVFDSLNYEDNLMFGIDAVRNANGVVEATICYSGDVSDPKRTKYTLDYYVALTEKLVAHGIDVLAIKDMAGLLKPRAATMLVEAIRAKFPDLPIHVHTHDTASTGVASMLACANAGADVVDVCMDALSGTTSQPSIGAVLNSVAGTDLDTGMDIEEVLKLNLFWEQTRGLYSPYESGIKSGSSDVYIHEMPGGQYTNLKFQAYANGLGSEWDRIKDSYATANRILGDIVKVTPSSKVVGDFAQFLVANNLDEKSLLEKADTLSFPTSVVEYFQGYLGQPVGGFPEPLRSKVVKGKDIINGRPGASLPELDLSKLQNDLARKHVGRRAITHKDTLAAALYPKVFDEYVVKRDTVGPVGLLPTKAFLKGLDIDEEIEVTTDRGVSTNIKLKAVGELLPSGSREVFFEVNGIPRVVEIHDRKVLESTKSGVVSTAREKSDPLDEGSIGAPMSGDVVDVLIAPGQKVKAGESLVVLSAMKMETTVASPVSGTLKHVVVVKGDSCAAGDLLCAIDTDAA

SEQ ID NO: 9952 - DNA, 1335 bp, Hydrogenobacter thermophilus
  CDS (1)..(1335): transl_table=11
atgataaagaaggttttgatagccaacaggggtgagatagctgtaagggtgataaggacttgtaaggagatgggtttgaagacggtgagtatctattcggaagcggatagggattgtatgcatgtaaaacttgcggacaaaagtgtgtgtataggtcctgcggaggcaagcaagagttatttagatattcctcgtatcatgtccgctatagaggtctcagacgctgacgctgtgcatccgggatatggcttccttgcggaaaacccacgctttgcggagatagtaagcgccagtaataagattttcataggcccgccttcgcatgtgttggagcttataggcgataagataatgtccaaggaggtggctaaaaaggtgggtattcctttggtgccggggagtgatggctgtgtggacataaaggaagctatagatacagccaataggataggctaccctgtggttataaaggcatctgctggtggtggtggaaggggcataagggttgtcaggaacgaaaaggaactcagagaaaagctacccttggctatagaggaggctaaggtggcttttggcgatgggagggtatacatagaaaaataccttataaatcctaagcatattgaggtgcaggtgctggcagacaaatacggtcatgtaatatctcttggagagagagaatgctctatccaaagaaggaaccaaaagcttatagaggaggcgccaagcatctccatagatgaggtgcaaaggaagcagatagaagaagctgccgttgagttttgtaaagctataggttatgagggtgcagggacggttgaatttctcatggatcaagacgggaagttttactttatggagatgaacggaaggattcaggtggagcatcctgttactgaaatgataacgggtattgacatagtaaagtggcagataaagatagccagaggggaaaggctaaatataaaaagtgtagaaagaaggggatttgccatagagttcagaataaatgcggaagaccccaacaactttatgcccacacccggcaaaatagaggagctatacttacccggtggctttggtgtcagggtggatacgcacatttactgcggatacgcggtaccaccttattacgactctctaattgccaagctcatagtctggggagaggacagaaagtcagtcataaggagggcaaagagagcgctggaggagtttgtcatatctgggcaaggtctaaaaaccaacatagattttcacaggagggtgatatctacaagagagtttgcggaaggcaagcatcatataaagttcatagaggagatgatggtataa

SEQ ID NO: 9953 - protein, 444 aa, Hydrogenobacter thermophilus
MIKKVLIANRGEIAVRVIRTCKEMGLKTVSIYSEADRDCMHVKLADKSVCIGPAEASKSYLDIPRIMSAIEVSDADAVHPGYGFLAENPRFAEIVSASNKIFIGPPSHVLELIGDKIMSKEVAKKVGIPLVPGSDGCVDIKEAIDTANRIGYPVVIKASAGGGGRGIRVVRNEKELREKLPLAIEEAKVAFGDGRVYIEKYLINPKHIEVQVLADKYGHVISLGERECSIQRRNQKLIEEAPSISIDEVQRKQIEEAAVEFCKAIGYEGAGTVEFLMDQDGKFYFMEMNGRIQVEHPVTEMITGIDIVKWQIKIARGERLNIKSVERRGFAIEFRINAEDPNNFMPTPGKIEELYLPGGFGVRVDTHIYCGYAVPPYYDSLIAKLIVWGEDRKSVIRRAKRALEEFVISGQGLKTNIDFHRRVISTREFAEGKHHIKFIEEMMV

SEQ ID NO: 9954 - DNA, 3591 bp, Phaeosphaeria nodorum
  CDS (1)..(3591)
atggcttcgcttgtaactgataagaatgcctcgtcggccattgacgagaatgatttcgacgaggagcatggcgagcaccacccccaccgcaactcggtgcaccaccagctgcgagcgagcagctccattatgcagctgaagaagctgttggtcgccaaccgaggagaaatccccatccgcattttcaggacagcccacgagctgtctctgcacacagtcgcagtctacagtcatgaggaccgcctcagcatgcatcggcagaaggctgatgaggcatatgaaatcggcgctcgcggccaatacactcctgtcggagcttacctggccggcgacgagatcatcaagatcgcagtcgagcacaatgtgaacatgattcaccccggctacggtttcctgtcagagaacgccgaattcgcgcggaacgtcgagaaggccggtcttatttttgtaggaccgtctcctgacaccatcgacgcacttggcgacaaagtctccgcccgaaaactcgccatcaagtgcaatgtcccagttgtgcctggtacgcctggcccagtcgagaagttcgaagacgtcaaggccttcacagatgaattcggtttccccatcatcatcaaggccgcattcggaggtggcggccgtggaatgcgtgtagtccgcgagcagtcgacgctcaaggactcgtttgagcgcgcaacttcagaggccaagtccgcctttggcaacggcactgttttcgtcgagcgcttcctcgacaagcccaagcacattgaagtccagctgctcggtgacaaccttggcaatgtcgtacacttgtacgagcgtgactgctccgtccagcgtcgtcatcagaaggtcgttgagattgctccggctaaggatctcccggttgagacccgtgacaacattctggctgatgccgttagactcgctcagtctgtcaagtaccgcaatgcgggtactgctgagttcttggtcgaccagcagaataggtactactttattgagatcaacccacgtatccaggtcgagcacaccatcacagaagaggtcactggaatcgatatcgtggctgcacagattcagattgctgctggtgcatcacttgagcagctcggtctgacccaggaccacatctccacacgcggttttgccttccaatgccgtatcaccacagaagacccggcacagagctttgcaccagataccggaaagattgaggtctaccgatctgctggtggtaatggtgtaagattggacggaggaaatggtttcgctggagccattatcactcctcactacgacagtatgcttgtaaagtgctcgtgccgtggttccacatacgagattgtccgccgaaagatgttgcgtgcgctcgttgagttccgtattcgtggcgtcaagaccaacatccccttcttgatcaagctcctcacacaccccacattcgttgacggacaatgttggacgaccttcatcgacgacactcctgcgctcttcgatctcatcggctcccagaaccgtgcacagaagctcctcgcataccttggagatcttgcagtcaacggcagtcagatcaagggacaaatcggcgagcccaagttcaagggcgaaatccccattcccaagatcttcgacagcgctggtaagcaggtcgatacctctgcaccatgcgctacaggatggaggaacatccttgtcaaggagggccctgcagcattcgcaaaggctgtccgtgccaacaagggctgcttgatcatggacaccacatggcgtgacgcccatcagtcgctgctagctacccgtgtacgaacagttgacctgctcaacatcgccaaggagaccagccacgcgtatgccaacgcctgggctctcgagtgctggggaggtgccacgttcgacgtggccatgcgcttcctctacgaggacccatgggagcgtctgaggaagatgaggaagcttgtacccaacattcccttccaaatgcttctccgtggtgccaacggtgtcgcatactcatcgcttcccgacaacgccattttccacttctgtgagcaggcaaagaagaacggtgtcgacatcttccgcgtttttgacgctttgaacgatgttgagcagcttgaggtcggtatcaaagctgttctcaaggctggcggtgttgccgagggtaccgtgtgttactccggagatatgctgaaccccaagaagaagtacaacctcgagtactacgtcagtgtggtcgacaagatcgtggccatgggcgctcatgtactaggtattaaggacatggctggtgttcttaagcctcgtgcggcccgtcttctcattggtaccatccgtgagaagtaccccgacctccccatccatgtgcacactcacgactctgccggtactggtgtcgcctccatggtggcttgtgctgaagctggtgccgatgccgtcgatgctgccatcgacagcatgtctggtatgacttcccagcccagcattggtgccatcctggcgtctcttgagggaaccgacttcgactctggtctcgatgtccacatgatccgcaacctggacgcatactgggcccagctgcgtctgctctactctcccttcgaggctggtctcactggccccgacccagaggtctacgagcacgagatccctggtggtcaactcaccaacctcatcttccaggcttctcagcaaggtctcggtgagcaatgggcgcagaccaagaaggcctacgagcaggccaacgacttgctcggcgacattgtcaaggtcacacctacctccaaggttgttggtgacttggcccagtttatggtgtccaacaagctttcatacgatgatgttctggccaaggccgagcagcttgacttcccatcctcagtcctggaatttttcgagggtctgatgggtcagccatacggcggcttccctgagcctctccgatcacaagctctccgtgagcgaaggaagatggataaacgacctggtctgtaccttgaccccgttgacattaccaaggtcaaggccgacttgaaggccaaatggggtgatgccaccgagtgcgacgtagcatcctccattatgtaccccaaggtcttcgaggactacaagaagtggacctccaagtacggtgatctctccgtgctccccacccgctacttcttgtctcgcccagaaatcggcgaggagttccacgttgagctcgagaagggtaaggtgctcatcctcaagctccttgctatcggtccgctgtccgagcagaccggtcttcgtgaggtcttctacgagatgaacggcgagacccgtactgtgaccgttgaggatcagcacgcggccatcgacaacgtctcacgaccaaaggccgaccccaccgacagcagccaggttggttcgcccatgtctggtgttttggttgaggtccgtgtccacgatggcagcgacgtcaagaagggtgacccagttgctatccttagcgccatgaagatggaaatggtcatttcagctcctcactccggaaaggtcagcaacctgtctgtccgcgagggcgactcggtcgattctggcgaccttgtctgcaagcttgtcaagtga

SEQ ID NO: 9955 - protein, 1196 aa, Phaeosphaeria nodorum
MASLVTDKNASSAIDENDFDEEHGEHHPHRNSVHHQLRASSSIMQLKKLLVANRGEIPIRIFRTAHELSLHTVAVYSHEDRLSMHRQKADEAYEIGARGQYTPVGAYLAGDEIIKIAVEHNVNMIHPGYGFLSENAEFARNVEKAGLIFVGPSPDTIDALGDKVSARKLAIKCNVPVVPGTPGPVEKFEDVKAFTDEFGFPIIIKAAFGGGGRGMRVVREQSTLKDSFERATSEAKSAFGNGTVFVERFLDKPKHIEVQLLGDNLGNVVHLYERDCSVQRRHQKVVEIAPAKDLPVETRDNILADAVRLAQSVKYRNAGTAEFLVDQQNRYYFIEINPRIQVEHTITEEVTGIDIVAAQIQIAAGASLEQLGLTQDHISTRGFAFQCRITTEDPAQSFAPDTGKIEVYRSAGGNGVRLDGGNGFAGAIITPHYDSMLVKCSCRGSTYEIVRRKMLRALVEFRIRGVKTNIPFLIKLLTHPTFVDGQCWTTFIDDTPALFDLIGSQNRAQKLLAYLGDLAVNGSQIKGQIGEPKFKGEIPIPKIFDSAGKQVDTSAPCATGWRNILVKEGPAAFAKAVRANKGCLIMDTTWRDAHQSLLATRVRTVDLLNIAKETSHAYANAWALECWGGATFDVAMRFLYEDPWERLRKMRKLVPNIPFQMLLRGANGVAYSSLPDNAIFHFCEQAKKNGVDIFRVFDALNDVEQLEVGIKAVLKAGGVAEGTVCYSGDMLNPKKKYNLEYYVSVVDKIVAMGAHVLGIKDMAGVLKPRAARLLIGTIREKYPDLPIHVHTHDSAGTGVASMVACAEAGADAVDAAIDSMSGMTSQPSIGAILASLEGTDFDSGLDVHMIRNLDAYWAQLRLLYSPFEAGLTGPDPEVYEHEIPGGQLTNLIFQASQQGLGEQWAQTKKAYEQANDLLGDIVKVTPTSKVVGDLAQFMVSNKLSYDDVLAKAEQLDFPSSVLEFFEGLMGQPYGGFPEPLRSQALRERRKMDKRPGLYLDPVDITKVKADLKAKWGDATECDVASSIMYPKVFEDYKKWTSKYGDLSVLPTRYFLSRPEIGEEFHVELEKGKVLILKLLAIGPLSEQTGLREVFYEMNGETRTVTVEDQHAAIDNVSRPKADPTDSSQVGSPMSGVLVEVRVHDGSDVKKGDPVAILSAMKMEMVISAPHSGKVSNLSVREGDSVDSGDLVCKLVK

SEQ ID NO: 9956 - DNA, 2097 bp, Aedes aegypti
  CDS (1)..(2097)
atgctgttcaaagtgtggcacgcagtggccggtggaaggttcctttcgaccagcgcggcgcggcatggctcgaaaaaagtccccacccggcagatcaacaagctgctgatagcaaatcgaggagagatcgcatgtcgagttatgcggactgcgaatcgactgggcattcaaacggtggccgttttctccgatgctgacgagcggtccctacatgccaaaatggccaatgaggcgtacaatattggacccccggcgtcgcagcagtcttatctgcgaggggagaagattctggaggtggccaaaagagccggatgtcaagccattcacccgggatatggattcctgtcggagaatgtggagtttgctgagctgtgccaacaggagggagtgatcttcattggtcccccggccagtgcaattcgggacatgggtatcaagagcacgtcgaaacatattatgagcgaggcgggagttccgatcatcaacggatatcacggagaggaccaatcggatgagcgtctgatgcaggaagcgaagaagattggctttccgctaatgattaaggcggttcgcggtggaggcggaaagggcatgagaattgccgagacggaagcggactttttcccggctttgcagtcggccaggaccgaatcggagaaggctttcggcgatagttcgatgctgctggaaaggtatgtccgatcgccacgccatgtggaagtgcaggtctttgccgatcaccatgggaatgcggtttacctgtatgagcgggattgttccgttcagaggcgtcatcagaagatcatcgaggaagctcctgcccctggactgtcggaagaattgcgggttcagttgggtgaggccgcagttcgagctgccaaggccgtgaattacgttggtgccggaactgtggagtttatcctggacaaagaggacttgtctttccacttcatggagatgaacactcgtctacaggtggagcatccgatcactgagatgatcaccggaacggatctggttgaatggcagattaaggttgcttctggagagccacttccgatgactcaagagcacattcgcaaggctggtcatgcattcgaggccagaatctacgccgaggatccagcgggaggatttctgccgggagctggtcccttgaattacctctcgacgccagtgccttccaatactaccagagtggagaccggtgtccgccaaggagatgaagtgtccatccactacgatccgatgattgccaaattggtcgtttggggagagaaccgtccgagtgcccttcaactcctcattgaacagctgcgtaactaccaaatcgctggacttcaaacgaacatcaacttcctgattgacctggccaaacacagtcatttccaggcggcggatgtccacactggattcatcgatcagcacatggaaaccttgttcccggtgaaaacggtccccgctgagaaaatcgctcaaatggcagtggcttacgttctgaacgaaaatgccagcacacgcaagtcgttgaatcgactgaacccatccgatttggaattgaacttccgaccgaattatactccgaccaggaaattcgacctgaaagttggagaaaaggaacacaaggttgaagtgaaatcgaaaggagtggactttgaagttcgcgttgacggaggcgcttggttgcacgtgaaagctactaggaagccacacgagaatcgattcttgctgcagacgaatatcaatggacacgtttcttgcttcaacaccgtgattgagagcggttctgtcgctttgtatgatgatagtggtctcacatccgccgaagttgttcagcccaaattcgtgactgccgacagtgccatagagggagccaacgccggttccgtcattgccccaatgccaggagtgttggacaaggtgttcgttaagccgggagattcggtgaaggccggcactccgctcgccgtgttgattgccatgaagatggaacacgtcctgaaggcagccagtgatggaatcgtgaaggccgtccccaacgccgaaggttccaacgtgcagaagggagccgttctgattgcattcgaatcgaactag

SEQ ID NO: 9957 - protein, 698 aa, Aedes aegypti
MLFKVWHAVAGGRFLSTSAARHGSKKVPTRQINKLLIANRGEIACRVMRTANRLGIQTVAVFSDADERSLHAKMANEAYNIGPPASQQSYLRGEKILEVAKRAGCQAIHPGYGFLSENVEFAELCQQEGVIFIGPPASAIRDMGIKSTSKHIMSEAGVPIINGYHGEDQSDERLMQEAKKIGFPLMIKAVRGGGGKGMRIAETEADFFPALQSARTESEKAFGDSSMLLERYVRSPRHVEVQVFADHHGNAVYLYERDCSVQRRHQKIIEEAPAPGLSEELRVQLGEAAVRAAKAVNYVGAGTVEFILDKEDLSFHFMEMNTRLQVEHPITEMITGTDLVEWQIKVASGEPLPMTQEHIRKAGHAFEARIYAEDPAGGFLPGAGPLNYLSTPVPSNTTRVETGVRQGDEVSIHYDPMIAKLVVWGENRPSALQLLIEQLRNYQIAGLQTNINFLIDLAKHSHFQAADVHTGFIDQHMETLFPVKTVPAEKIAQMAVAYVLNENASTRKSLNRLNPSDLELNFRPNYTPTRKFDLKVGEKEHKVEVKSKGVDFEVRVDGGAWLHVKATRKPHENRFLLQTNINGHVSCFNTVIESGSVALYDDSGLTSAEVVQPKFVTADSAIEGANAGSVIAPMPGVLDKVFVKPGDSVKAGTPLAVLIAMKMEHVLKAASDGIVKAVPNAEGSNVQKGAVLIAFESN

SEQ ID NO: 9958 - DNA, 2115 bp, Aedes aegypti
  CDS (1)..(2115)
atgctgttcaaagtgtggcacgcagtggctggcggaaggttcctctcgaccagcgcggcgcggcatggctcgaaaaaagtccccacccggcagatcaacaagctgctgatagcaaatcgaggagagatcgcatgccgagttatgcggactgcgaatcgactgggcattcaaacggtggccgttttctccgatgctgacgagcggtccctacatgccaaaatggccaatgaggcgtacaatattggacccccggcgtcgcagcagtcttatctgcgaggggagaagattctggaggtggccaaaagggccggatgtcaagccattcacccgggatatggtttcctgtcggagaatgtggagtttgctgagctgtgccaacaggagggagtgatcttcattggtcccccggccagtgcaattcgggacatgggtatcaagagcacgtcgaaacatattatgagcgaggcgggagttccgatcatcaacggatatcacggagaggaccaatcggatgagcgtctgatgcaggaagcgaagaagattggctttccgctaatgattaaggcggttcgcggtggaggcggaaagggcatgagaattgccgagacggaagcggactttttcccggccttgcagtcggccaggaccgaatcggagaaggctttcggagacagttcgatgctgctggaaaggtatgtccgatcgccacgccatgtggaagtgcaggtctttgccgatcaccatgggaacgcggtttacctgtatgagcgggattgttccgttcagaggcgtcatcagaagatcatcgaggaagctcctgcccctgggctgtcggaagaactgcgggttcagttgggagaagccgccgttcgagctgccaaggccgtgaattacgttggtgccggaacggtggagtttatcctggacaaagaggacttgtctttccacttcatggagatgaacactcgtctacaggtggagcatccgatcactgagatgatcaccggaacggatctggttgaatggcagattaaggtggcttctggagagccacttccgatgactcaagagcacattcgcaagactggtcatgcattcgaggccagaatctacgccgaagacccggcgggaggattcctgccaggagctggtcccttgaattacctctcgacgccagtgccttccaataccaccagagtagagaccggtgtccgccagggagatgaagtatccatccactacgatccgatgattgccaaattggtcgtttggggagagaaccgtccgagtgcccttcaacttctcattgaacagctgcgtaactaccaaatcgctggacttcaaacgaacatcaacttcctgattgacctggccagacacggtcattttcaggcggcggatgtccacactggattcatcgatcagcacatggaaaccttgttcccggtgaaaacggtccttgctgagaaaatcgctcaaatggcagtggcttacgttctgaacgaaaatgccagcacacgcaagtcgttgaatcgactgaacccattcgatttggaattgaacttccgaccgaattatactccgaccaggaaattcgacctgaaagttggagaaaaggaacacaaggttgaagtgaaatcgaaaggagtggactttgaagttcgcgttgacggaggcgcttggttgcacgtgaaagctactaggaagccacacgagaatcgattcttgctgcagacgaatatcaatggacacgtttcttgcttcaacaccgtgattgagagcggttctatcgctttgtatgatgatagtggtctcacatccgccgaagttgttcagcccaaattcgtgactgccgacagtgccatagagggagccaacgccggttccgtcattgccccaatgccaggagtgttggacaaggtgttcgttaagccgggagattcggtaaaggccggcactccgctcgccgtgttgattgccatgaagatggaacacgtcctgaaggcagccagtgatggaatcgtgaaggccgtccccaacgccgaaggttccaacgtgcagaagggagccgttctgattgcattcgaatcaactaggctaatagaggtgccttaa

SEQ ID NO: 9959 - protein, 704 aa, Aedes aegypti
MLFKVWHAVAGGRFLSTSAARHGSKKVPTRQINKLLIANRGEIACRVMRTANRLGIQTVAVFSDADERSLHAKMANEAYNIGPPASQQSYLRGEKILEVAKRAGCQAIHPGYGFLSENVEFAELCQQEGVIFIGPPASAIRDMGIKSTSKHIMSEAGVPIINGYHGEDQSDERLMQEAKKIGFPLMIKAVRGGGGKGMRIAETEADFFPALQSARTESEKAFGDSSMLLERYVRSPRHVEVQVFADHHGNAVYLYERDCSVQRRHQKIIEEAPAPGLSEELRVQLGEAAVRAAKAVNYVGAGTVEFILDKEDLSFHFMEMNTRLQVEHPITEMITGTDLVEWQIKVASGEPLPMTQEHIRKTGHAFEARIYAEDPAGGFLPGAGPLNYLSTPVPSNTTRVETGVRQGDEVSIHYDPMIAKLVVWGENRPSALQLLIEQLRNYQIAGLQTNINFLIDLARHGHFQAADVHTGFIDQHMETLFPVKTVLAEKIAQMAVAYVLNENASTRKSLNRLNPFDLELNFRPNYTPTRKFDLKVGEKEHKVEVKSKGVDFEVRVDGGAWLHVKATRKPHENRFLLQTNINGHVSCFNTVIESGSIALYDDSGLTSAEVVQPKFVTADSAIEGANAGSVIAPMPGVLDKVFVKPGDSVKAGTPLAVLIAMKMEHVLKAASDGIVKAVPNAEGSNVQKGAVLIAFESTRLIEVP

SEQ ID NO: 9960 - DNA, 1419 bp, Myxococcus xanthus
  CDS (1)..(1419): transl_table=11
ttgtcttgggagggagcgagggttaggttcgccgccctttcgcacccgcaccccaggggtttcgccatgttccagaagctgctcatcgccaaccggggagagattgcccgccgcatcggcgtggtggcccggggcatggggctcaagacggtcgccgtctattcggacgcggacgctgagctgcccttcgtgaaggaggccgacgaggcggtgcgcatcggccccgcgccggccaaggacagctacctcaataccgccgccatcctggaagccgcgaagcagacgggtgcgcaggccatccacccgggctacggcttcctgtcggagaacggcgagttcgcccaggcctgcgcggacgcggggctcatcttcgtgggaccgccgccggaggccatggcgcggatgaaggacaagagccaggcccgaaagttggtgtccgccgcgggggtccccgtggtgcccggcagcgagggcgtggtgcccgacgtggccagcgcgctggcggaggccgagcgcatcggctacccggtgctcgtcaaggcggccagcggcggcggcggcattggcatggcggtggccaggaacgccgcggagatggagaaggtctaccgccagtgcacggaccgggcgaaggccgccttcggcaaggaaggcgtgtacgtggagcgctacttcccggcgccccggcacatcgaggtccagattctgggggaccagcacggccacctcatccactgtctggagcgggaatgttccatccagcggcgccaccagaaggtggtggaggaagccccctccgtgctgttcgcggacgggcgcaacccggagctggcgcagaagctcttcacggccgcggtggccgcggcgaaggcctttggttacgccaacgccggcacggtggagttcctctactcggacggtgaggtctacttcatcgagatgaacgcccgcctccaggtggagcacccggtgacggagctgaccacggggctggacctcatcggctggcagctgcgcatcgccgcgggcgagcgcctcacggtgaagcaggaggacgtgaagcggcgcggggcggcgctggagttccgcatctacgccgaggacccggtgaagttcttcccgtctcccgggccgctgaaggtgttccagccgcccacgggcgagggcgtccggctggacgcgggctacggcgagggcaacaccgtcacgccgaactacgacccgatgattgccaagctcatcgtcaccggtgagacgcgggcgcaggcgattgagcgctccgtgacggcgctccagtcgttccgcatcgaaggcatcaagacgaacatcccgctccacctgcgcatcgtgcaggatgcggccttccaggccggcgagctggacacgaacttcctggagcaccacgccaagccggcgtag

SEQ ID NO: 9961 - protein, 472 aa, Myxococcus xanthus
MSWEGARVRFAALSHPHPRGFAMFQKLLIANRGEIARRIGVVARGMGLKTVAVYSDADAELPFVKEADEAVRIGPAPAKDSYLNTAAILEAAKQTGAQAIHPGYGFLSENGEFAQACADAGLIFVGPPPEAMARMKDKSQARKLVSAAGVPVVPGSEGVVPDVASALAEAERIGYPVLVKAASGGGGIGMAVARNAAEMEKVYRQCTDRAKAAFGKEGVYVERYFPAPRHIEVQILGDQHGHLIHCLERECSIQRRHQKVVEEAPSVLFADGRNPELAQKLFTAAVAAAKAFGYANAGTVEFLYSDGEVYFIEMNARLQVEHPVTELTTGLDLIGWQLRIAAGERLTVKQEDVKRRGAALEFRIYAEDPVKFFPSPGPLKVFQPPTGEGVRLDAGYGEGNTVTPNYDPMIAKLIVTGETRAQAIERSVTALQSFRIEGIKTNIPLHLRIVQDAAFQAGELDTNFLEHHAKPA

SEQ ID NO: 9962 - DNA, 1347 bp, Candidatus Kuenenia stuttgartiensis
  CDS (1)..(1347): transl_table=11
atgttttcccggataatggttgcaaatagaggtgaaattgctttgagaatcattagggcatgccgcgaaatggggatagagactgtcgctgtttgctcaaaatcggatgcaaatgccacttatttaaagctagccgatatcgtagtgtgtattggacctgctgatgcggaaggtagttatttaaatattccgagcatcatcagcgctgcagagatcacggatatagaagcaatccatcctgggtatggttttttatcggaagtgagtcattttgcggaagtttgtgaatcgtcaaatatcgtatttattggcccgaaatctgatgcattgaggaagcttggcaataagactgaagcaaggaaaattgcaatagaaaacaaggtccctgttgttcccggaagtttgtctgtaataaaaagtcagcaggaagcgttaagcgttgcacatgaaataggttttcccgtaatcattaaagcttctttagggggcggtggacggggaatgcgggtagctcataatgatataagcctcattaattcattgactattgcccaaagagaggctaaggctgcattcaaggattcgtctatttatatagaaaaatatattgaagatgcacgtcacattgaggtgcaaatagttggagataattacgggaatattatacatttgggcgaaagggactgcaccatgcagcgaagacaccaaaaactaatcgaagagtcccctgcaccatacattaccgatcgggcgcgggaagatatttgtaaggctgccataaaaatggcaaaatccattaattatacaaatgccggaactgttgaatttttattagataaggaaaataattattatttcatagaggtgaatacacgtttgcaggtagaacatccggttacggaaatggtgacgggaatagatttagtgaaattacaaataaagattgccagtggagagagattaaatattaaacagaaaaaaattcgcagtcagggggttgctatagaatgcaggatcaatgcagaagatccttataatgattttcggccgcaaccggggaagatcacaaattatcatcctccaggagggagaggggttagggtggattctcacattcactccggctatgaaatcccgccgtactatgattcattaatcgctaagttgattgtacatcaaaacacacgtgaggaagcaattgcctgtatgcgtagggcattgagtgaatacgttatcgaaggagtgaaaactaccattccgttacaattggatttaataacacatcctcaatttgcaaatgggaatataaatacaaattttgtcgataatcttatggcaaaaacttaa

SEQ ID NO: 9963 - protein, 448 aa, Candidatus Kuenenia stuttgartiensis
MFSRIMVANRGEIALRIIRACREMGIETVAVCSKSDANATYLKLADIVVCIGPADAEGSYLNIPSIISAAEITDIEAIHPGYGFLSEVSHFAEVCESSNIVFIGPKSDALRKLGNKTEARKIAIENKVPVVPGSLSVIKSQQEALSVAHEIGFPVIIKASLGGGGRGMRVAHNDISLINSLTIAQREAKAAFKDSSIYIEKYIEDARHIEVQIVGDNYGNIIHLGERDCTMQRRHQKLIEESPAPYITDRAREDICKAAIKMAKSINYTNAGTVEFLLDKENNYYFIEVNTRLQVEHPVTEMVTGIDLVKLQIKIASGERLNIKQKKIRSQGVAIECRINAEDPYNDFRPQPGKITNYHPPGGRGVRVDSHIHSGYEIPPYYDSLIAKLIVHQNTREEAIACMRRALSEYVIEGVKTTIPLQLDLITHPQFANGNINTNFVDNLMAKT

SEQ ID NO: 9964 - DNA, 1617 bp, Medicago truncatula
  CDS (1)..(1617)
atgtccgcagcctgcaattctctcacctcaccatccaccgtcacaggtttatttgcgacgagaggaggaggattgaacaagaattcacattctcagtgcactttcttgaccggaacaaacaagctgaagtttccgaggcaaactactcaaccttgtaaacaacgccaaacgcgtcattgcggtgctcttcgtgcaacttgtcgtcttgagaagatattggttgccaatcgaggcgagattgctgttcgtgttattcgtactgctcatgaattggggattccttgtgttgctgtttattccaccattgataaagatgctcttcatgttaaattggctgatgaatctgtttgtattggtgaagctcccagtagccaatcgtatttagtgattccaaatgttctggctgctgctaccagccgccaatgtacaatgttgcatcctggatatggttttcttgcagagaatgctgtttttgttgaaatgtgtagagatcatggagtcaattttattggacctaaccctgacagtattcgggttatgggtgacaaagcaactgcaagagaaacaatgaagaaagcaaatgttcctactgttccaggaagtgaggggcttttgcagaccactgaagaagctatcagactggcacacgagattggtttccctgtgatgatcaaggcaaccgcaggtggtggaggacgtggcatgcgtcttgctaaagaacctaaagagtttgtgaagttattacagcaagctaagagtgaggcagctgctgcatttggaaatgatggggtttatttggagaagtacattcaaaacccaaggcacattgaattccaggttcttgcagataaatatggtaatgttgttcactttggagaacgtgattgcagtatccagaggcgtaatcagaaactgctcgaagaagcaccgtctcctgcattgaccccagagttacggaaggcaatgggagatgcagcagttcaggctgccgcatctatcggttacataggtgttggaacggttgagttccttttggatgaaaggggttctttttacttcatggagatgaacactcgtatccaggttgaacatcccgtgacagaaatgatttcctcagttgatttgatagaagagcaaattcgtgtagctatgggagaaaagcttcgatacaaacaggaggatattgtactcagaggacattccattgaatgccgtatcaatgcagaagatgctttcaagggatttagaccagggccaggtagaattacagcatacttgccgtctggtggtccatttgtcaggatggatagccatatttatcctgattatgttgttcctccaagctatgactctcttcttggaaagctgattgtatgggctccgactagagaaaaagcaattgaacgcatgaaaagggcactcgatgacactattatcacaggagttcctacaacaattgattatcataaacttatccttgacatagaggatttcaaaaatggcaaggttgatactgcttttattccaaagcacgaggaggagttggctgtgcccccacaacagaagatggtattagttaacaaggtggtgacagaaccagctggctcgactgcctga

SEQ ID NO: 9965 - protein, 538 aa, Medicago truncatula
MSAACNSLTSPSTVTGLFATRGGGLNKNSHSQCTFLTGTNKLKFPRQTTQPCKQRQTRHCGALRATCRLEKILVANRGEIAVRVIRTAHELGIPCVAVYSTIDKDALHVKLADESVCIGEAPSSQSYLVIPNVLAAATSRQCTMLHPGYGFLAENAVFVEMCRDHGVNFIGPNPDSIRVMGDKATARETMKKANVPTVPGSEGLLQTTEEAIRLAHEIGFPVMIKATAGGGGRGMRLAKEPKEFVKLLQQAKSEAAAAFGNDGVYLEKYIQNPRHIEFQVLADKYGNVVHFGERDCSIQRRNQKLLEEAPSPALTPELRKAMGDAAVQAAASIGYIGVGTVEFLLDERGSFYFMEMNTRIQVEHPVTEMISSVDLIEEQIRVAMGEKLRYKQEDIVLRGHSIECRINAEDAFKGFRPGPGRITAYLPSGGPFVRMDSHIYPDYVVPPSYDSLLGKLIVWAPTREKAIERMKRALDDTIITGVPTTIDYHKLILDIEDFKNGKVDTAFIPKHEEELAVPPQQKMVLVNKVVTEPAGSTA

SEQ ID NO: 9966 - DNA, 2232 bp, Medicago truncatula
  CDS (1)..(2232)
atgtcttcttccttattcttcttactattccgtcgaaatgctaataccaagatcaaaaccaacctcacgcactcaaactgtcacgtgcgcgcacgtgagttctcatcatcggaaccaaagaaaaaagaacgaatagaaaaaattctaatagcaaacagaggcgaaatagcatgcagaatcaccagaaccgctaagagactcggaattcgcaccgtcgctgtttacagcgacgccgatagaaactccctccacgtcgcatcttccgatgaagccattcgaatcggtcctccacctgctcgtctcagttacctcagctcttcttccattctcgacgctgctttgcgttctggtgctcaggctattcatcctggatatggatttttatcggagagtgctgattttgctcagctttgtgaagacaatgggattgcttttattggacctcctgcatctgcgatccgagacatgggtgacaagagtgcatcgaagagaataatgggggctgcaggggtgccgcttgtgcctggatatcatggagatgaacaagatattgataaaatgaagctggaggcggatcaaattggttatccggtcctcattaagccaacccatggaggaggaggaaagggtatgaggattgtgcacactccagatgaatttgctgaatcattccttgcagcacaacgtgaagcagctgcttctttcggtgtaaacacaattttgctggagaagtatattacacaaccgaggcacatagaagtccaaatatttggggataagcatgggaatgttctgcatttaaatgagagagactgcagtgtgcagagaagacaccaaaaaataattgaagaagctccagcaccaaacatttctcctgagtttcgtgcacacttgggtcaagcggctgtttctgcagcaaaggcagttaactattacaatgctgggacagtggagtttatagttgatacagtctctggccagttttactttatggagatgaatacccgtcttcaggttgagcatcctgtcacagagatgattgttggtcaagatcttgttgaatggcaaatacatgttgcgaatggagatcctcttccactgagtcaatcacaaataccaatattaggtcatgcttttgaagctcgaatctatgctgaaaatgttccaaaaggatttcttcctgcaactggagtactgcaccattatcaagttccagtctcatcaggggtccgggtggatactggggttaaagaaggagatgctgttagcatgcactacgatccaatgattgctaagcttgtagtgcagggagaaaatcgtgctgcagcattggtcaaactgaaggatagtttgacaaagtttcaggttgcaggtctaccaactaatgtcaactttcttctaaagctcgctaatcaccgggcatttgaaaatggcaatgtggagactcattttattgataattacaaggaagatctctttgtggatgctacaaattcagagtctgccaaagaagcatatgaagctgctaggcgcagtgcatcccttgtagctgcatgtctcattgagaaagaacatttcatatcagctagaaacccccctggtggcagcagcttacaccctatatggtatacttcaccgccttttagagtccatcatcaagctaagcgtatgatagaacttgagtgggataatgagtatgatagtggtagttcaaagatcctgaagcttactatcacttacctgcctgatgggaggtacctgattgagacagatgaaaatggaagtcctggtttagaagttaaagcaacatatgtaaaagatcatgattttagagttgaagctgatggtgtaatcaacgatgttaaccttgctgtatactcgaaggagcaaatgaagcatattcatatttggcaagggtcctttcatcattatttcaaagagaaaataggcctcactttgtctgaggatgaggaatcccaacataaaccaaaatccgaatcatctggagttcctcgaggagctgttgtggcacccatggcaggcttggtagttaaggttctagtaaagaacgagacaagagtagaggtgggacaacccgtgttagtattagaagcgatgaagatggagcatgttgtaaaggcaccatcatctggctatgtacacggactacaagttacagtgggtgaacaggtttctgatggtagtgttctcttcaatgtaaaggatcaataa

SEQ ID NO: 9967 - protein, 743 aa, Medicago truncatula
MSSSLFFLLFRRNANTKIKTNLTHSNCHVRAREFSSSEPKKKERIEKILIANRGEIACRITRTAKRLGIRTVAVYSDADRNSLHVASSDEAIRIGPPPARLSYLSSSSILDAALRSGAQAIHPGYGFLSESADFAQLCEDNGIAFIGPPASAIRDMGDKSASKRIMGAAGVPLVPGYHGDEQDIDKMKLEADQIGYPVLIKPTHGGGGKGMRIVHTPDEFAESFLAAQREAAASFGVNTILLEKYITQPRHIEVQIFGDKHGNVLHLNERDCSVQRRHQKIIEEAPAPNISPEFRAHLGQAAVSAAKAVNYYNAGTVEFIVDTVSGQFYFMEMNTRLQVEHPVTEMIVGQDLVEWQIHVANGDPLPLSQSQIPILGHAFEARIYAENVPKGFLPATGVLHHYQVPVSSGVRVDTGVKEGDAVSMHYDPMIAKLVVQGENRAAALVKLKDSLTKFQVAGLPTNVNFLLKLANHRAFENGNVETHFIDNYKEDLFVDATNSESAKEAYEAARRSASLVAACLIEKEHFISARNPPGGSSLHPIWYTSPPFRVHHQAKRMIELEWDNEYDSGSSKILKLTITYLPDGRYLIETDENGSPGLEVKATYVKDHDFRVEADGVINDVNLAVYSKEQMKHIHIWQGSFHHYFKEKIGLTLSEDEESQHKPKSESSGVPRGAVVAPMAGLVVKVLVKNETRVEVGQPVLVLEAMKMEHVVKAPSSGYVHGLQVTVGEQVSDGSVLFNVKDQ

SEQ ID NO: 9968 - DNA, 2190 bp, Magnaporthe grisea 70
  CDS (1)..(2190)
atgcgctcaatcacaaaagccaacgctcggcttcccctccgccatgcatcccgccgcctcctctcgtccagcgcatccgccagcaacaacaacaacaacaccatctcgcaagcagcatcatccttggcccaatcaataacaccgaccacgaccccgataacatccctcttgatcgccaaccgcggcgaaatcgccctccgcatccaccgcaccgccacccgcctcggcatccctacaaccacagtcttcaccgacgtcgaccgccactcccagcatgccgccgcctctccctcctccatcgcgctcggatccgacccgcgcgcctacctcgacggagaccgcatctcacgcctagctgccgacaagctcgggcccggcgtcgcgttgcacccgggctacggcttcctctcggagaatgccgccttcgccaggctgtgcgcggaccgcggcgtcaactttgtcggcccgcccgcctccgccatggccgacatgggcgacaaggcgcgctccaagcacatcatgtcggccgccggcgtcccctgcgtccccggctaccacggcgaggagcagtccgcggcctttttggccgaaaaggccgccgagattgacgcccgcgccgaggcccgcgccagttttggtcccgacggcgagatcatgctcgtcgaaaagtacatcacgcgcccgcgccacgtggaggtccaggtgtttgccgaccgccacggcggctgcgtggccctgggcgagcgcgactgcagcatccagcgcaggcatcaaaaggtcattgaggagtcgcccgcgccgggactgtcggaagagctgaggcaggacctctgggccaaggcgcggacggctgccctggcggtggggtacgtgggcgccggcacggtcgagttcattctggacagggataccgaccgtttctactttatggagatgaacacccgcctccaggtcgagcaccccgtcagcgagatggttaccggcacagacctggtcgagtggcagctgcgggtcgcggccggggagaggttacccatgacgcaggctgagattgagcaaaagatcgccgagcggggctgggcgattgaagcccgcatctacgcagagaacccagagaagggcttcatgcccgattcaggaaagctggttcacctggtgactccgaaaacggacacggaagtgcaccgaccagaggatgcggcggtgcggatagacgctggtttcgtcgagggcgacaccgtatcgcaggcgtacgacggcatgatcgccaagctcatcgttcgcggtgcggacagagagacggccatcaagaggatggagctggctctgagggaatacgaagtggtggggctatcgaccaacattgagttcctcaagaggctctgtcgcagccccgcattcatccaaggtgatctggacaccggctatatcgaccggtggagagaggagctgttccagccgaggagggtcgaggacgaggtttttgtccaggctgccctgggcctactggctcccgtcaagcagacggtccaacaaatgggactgggcgcccacggagagactcttggtttcggcgaggcagctgccagcactggcgagaggagatttgcgttcaaggtgacggatggttacgccgagcaggctgctgagggcaagggtgaggatgtggtcgaggtgactttaacccaacgtgggaacaacctatacaatgcgcgtgtggcgcgaaggggagagcagacgcctatcgagtttgacaatgtcacctcggaacccactgagagcagcgacctcaagacaaaagtcaagtccttcttcccgctgtccagggtggagtcgactgtggtgcgggaccccatcaacagcgacaagatcaccgtgttccagctgggcacaaagacggacttgagcttggtgcagccgggctggttcgacaaggctctaggcctgaaggaggcggccgcgtcggtcgtcgcgccgatgccgtgcaggatcatgagggtcgaggttgcggagggtgacagcgtcgaaaaggggacacctttggttgtgatcgagtccatgaagatggaaacagtcatccgctcgccccaagccggtgtggtcaagaagttggcgcacaaggagggtgacatttgcaaggctgggacagtattggtgcttttcgaagaggacgcggccgagcagtcataa

SEQ ID NO: 9969 - protein, 729 aa, Magnaporthe grisea 70
MRSITKANARLPLRHASRRLLSSSASASNNNNNTISQAASSLAQSITPTTTPITSLLIANRGEIALRIHRTATRLGIPTTTVFTDVDRHSQHAAASPSSIALGSDPRAYLDGDRISRLAADKLGPGVALHPGYGFLSENAAFARLCADRGVNFVGPPASAMADMGDKARSKHIMSAAGVPCVPGYHGEEQSAAFLAEKAAEIDARAEARASFGPDGEIMLVEKYITRPRHVEVQVFADRHGGCVALGERDCSIQRRHQKVIEESPAPGLSEELRQDLWAKARTAALAVGYVGAGTVEFILDRDTDRFYFMEMNTRLQVEHPVSEMVTGTDLVEWQLRVAAGERLPMTQAEIEQKIAERGWAIEARIYAENPEKGFMPDSGKLVHLVTPKTDTEVHRPEDAAVRIDAGFVEGDTVSQAYDGMIAKLIVRGADRETAIKRMELALREYEVVGLSTNIEFLKRLCRSPAFIQGDLDTGYIDRWREELFQPRRVEDEVFVQAALGLLAPVKQTVQQMGLGAHGETLGFGEAAASTGERRFAFKVTDGYAEQAAEGKGEDVVEVTLTQRGNNLYNARVARRGEQTPIEFDNVTSEPTESSDLKTKVKSFFPLSRVESTVVRDPINSDKITVFQLGTKTDLSLVQPGWFDKALGLKEAAASVVAPMPCRIMRVEVAEGDSVEKGTPLVVIESMKMETVIRSPQAGVVKKLAHKEGDICKAGTVLVLFEEDAAEQS

SEQ ID NO: 9970 - DNA, 1725 bp, Aspergillus oryzae
  CDS (1)..(1725)
atgagaaaagaattgaagaaagtactgattgcgaatcgcggggagatcgccatccgcattatccgagcttgctgcgattacgacatcaaatcagtcgcggtgtactcagacctagatgtggactctccttttgtgcgactagccgatgaggcctatgggctgaagggctttcaaacagtcgatacctatcttaatatcgacaagcttattgcggtggcaaaacgttctggagcagatgccattcacccaggatacgggttcttatctgagcgggcggaattcgcccaggcagtcctagatgcagggttaacctggatcgggcccgacccgagtgtgatcgaagcgcttggtgacaaggtcgaggcgcgacgcatcgcgttacgggtcggtgcaccgctcgtagctggcagcaacgggcctgtgtcgacagcaaaggaagtgatggcattcacccgagagcatggcctcccgattgtgatcaaggctgcccatggaggcggtggtcgcggtctgaaggtcgcatggactatggacgaagtaacagaatgctatggatctgccgtgagggaagccacggcggcctttggtcggggcgaatgcttcgtagagcgctttctccaccgtcctcgacatattgaggctcagattctagctgacaagcatggtaacgtcgtggtggtcgggacgcgagattgctccgtacaaagacgacaccaaaagctgatcgaagaagccccagccccacttctcactacagagcagcaggagaaaattcagaatgccgctcagtcaatctgttccgcggctggttattcgggtgcaggaacggtggaatttctcctaggagtcgacggcagtatctccttcctagaggtcaacacccgacttcaagttgagcatcctttccgtattgccgaggggctcccgctgagcatctcgtccccgattcctccccggggtcattctatcgaattccgcatcaatgcagaagacccagggcgggggttcctaccaacgcgagggcaaatcacgacatttcaacccccatccggccccggtatccgcctggacagtggtgttgtccaaggctcgacgatcccggcggtttacgactccctgatggcgaagctgatcctctctggtgcaacccgtgaacaggcactacgtcgcgcccgtcgtgcgttgaaagaattccagataagcggggttgcaactgttttgccgttccatattgagacacttaactcgaacgacttcctaggtaccgatggctttaatgtgcacactcgctgggtagagaccgatttcgccgcgacactagctcctggtccacggccggacccagtacccgacctagagctcattcggactcatttagaaatcgatggcaagctcgtctcgttgggcttacccagtatgctcctgagcggaattgggtcagtagcagctggttcatcggccagtgctcagcagaaaagtgcaaagaaagacaacggagacatcttagcaccgttgtctggaacacttcgggctttgaaggtccccgacggagcttccgtccgcaacggtgagttactggctgttatggaggcgatgaaaatggaaacacaggttacggcgccgagggatggggttgtccgccttctcaccaaagagggtgaatatgtgcaggcagggggggtgatacttacgtttgagcaagaagaactcatgttcaagaattga

SEQ ID NO: 9971 - protein, 574 aa, Aspergillus oryzae
MRKELKKVLIANRGEIAIRIIRACCDYDIKSVAVYSDLDVDSPFVRLADEAYGLKGFQTVDTYLNIDKLIAVAKRSGADAIHPGYGFLSERAEFAQAVLDAGLTWIGPDPSVIEALGDKVEARRIALRVGAPLVAGSNGPVSTAKEVMAFTREHGLPIVIKAAHGGGGRGLKVAWTMDEVTECYGSAVREATAAFGRGECFVERFLHRPRHIEAQILADKHGNVVVVGTRDCSVQRRHQKLIEEAPAPLLTTEQQEKIQNAAQSICSAAGYSGAGTVEFLLGVDGSISFLEVNTRLQVEHPFRIAEGLPLSISSPIPPRGHSIEFRINAEDPGRGFLPTRGQITTFQPPSGPGIRLDSGVVQGSTIPAVYDSLMAKLILSGATREQALRRARRALKEFQISGVATVLPFHIETLNSNDFLGTDGFNVHTRWVETDFAATLAPGPRPDPVPDLELIRTHLEIDGKLVSLGLPSMLLSGIGSVAAGSSASAQQKSAKKDNGDILAPLSGTLRALKVPDGASVRNGELLAVMEAMKMETQVTAPRDGVVRLLTKEGEYVQAGGVILTFEQEELMFKN

SEQ ID NO: 9972 - DNA, 6852 bp, Aspergillus oryzae
  CDS (1)..(6852)
atggcccacgtcaacggaacctcgacagcccaatacaacctcccctcacattttatcggtggtaaccaccttgaagctgcagcgccaagcagtgttaaggactttgtggccaagcatggcggtcattcagtaattagttcggttttgattgccaacaatggtatcgcagctgtgaaagaaatccgttcggtccggaaatgggcctacgaaacattcggcaatgaacgtgcgattcagtttacggtgatggcaacgccagaagatttgcgggcaaatgcagactatatccgtatggcggaccaatatgttgaggttccggggggcacaaataacaacaactatgcgaacgtcgagctgatcgttgatgttgccgaacgaatggacgtccacgcggtgtgggccggatggggtcatgcttctgaaaacccccgcttacctgagtctctcgctgcttctcccaagaagatccttttcattggaccaccggcctcggccatgcgctcactgggtgataagatttcgtccacaattgtcgctcaacatgctggtgtgccttgcatcccgtggtccggaactggtgtcgaggaggtgaaggtcgacgacaagggcattgtcactgtcgaagatgaagtttataaccgcggctgcaccttctcaccggaggaaggtctccagaaagccaaggaaattggtttccctgtgatgatcaaggcctccgaaggtggaggaggaaagggtatccgtaaagttgaaagtgaagaggacttcgttaacttgtacaatgccgccgcgaatgaaattcctggatccccgattttcattatgaagcttgctggaaatgcccgccacttggaagttcagctgctggccgatcagtacggcaacaacatctccttgtttggcagagattgctcggtccaacggcgacaccagaagatcattgaagaggctcccgtaacaatcgccaaacccacgacattccaggctatggagcgtgcggctgtcagcctcggaaagctggttggttacgtgtcagctggtaccgtggaatatctgtactcccatgcagatgacaagttctacttcttggaactgaatcctcgtctccaggtcgagcaccctacaactgaaatggtttcgggtgtcaacttgccagctgcccaacttcagattgctatgggtattcccctgcaccggattcgcgacatccgcttgctctatggtgtggacccgaacacatcttccgagattgacttcgacttctccaacgaagaaagctacaagacgcaacgccgcccgcaacctaagggacatacgactgcttgccgtattacctccgaagatcccggcgagggcttcaagccttccagtggtaccatgcacgaactgaacttccgcagttcgtctaatgtttggggttacttctctgtcggtacagccggaggtattcacagtttctcagacagtcagttcggtcatatcttcgcctatggtgagaatcgttctgcgtcaaggaaacacatggttatcgccttgaaggaattgagtatccgtggtgatttccggacgactgtcgagtacttgatcaagctactggaaactcctgcattcgaggacaacacaatcacgactggatggcttgatcagctgatcaccaataaactcactgctgaacgccctgatcccattgttgccgtgctgtgtggtgcggttactaaggcacaccaggccagcgaagcaggtgtagaggagtaccggaagggtctcgagaagggtcaagtgccctcgaaggacgttttgaagaccgttttccctgttgatttcatttacgaaggtctgcgctacaaattcaccgccactagagcaagcttggacagctaccacctgttcattaacggatccaagtgctctgtcggcgtccgtgcgttggccgatggtggcttgctggtcctcctcgacggtcgcagccacaacgtctactggaaggaggaagcggctgcgacacgcctcagtgtcgatggtaagacctgcctgctagagcaggagaacgacccgacacagctccgcacgccatctcccggaaaacttgtcaagttcactgttgagaatggtgagcacgtccgggctggtcaggccttcgctgaagtcgaggtgatgaagatgtacatgcctttgatcgctcaggaagatggaattgtccaattgatcaagcagcctggtgctactttggaggccggtgatatcctcggtatcctcgctttggatgatccttcccgcgttaaacatgcccagccgttcaccgggcagttgccggatcttggacctcctcaggttgtgggtaacaagcctccacagaggttcttcctgctccatagcatcctggaaaacattctgcgaggatttgataaccaagtaatcatgggtactacgctcaaggagcttgtggaagtccttcgggaccctgagcttccctacggagagtggaatgctcaatcctctgctctgcactctcgtatgcctcagagactggacactcagcttcaaaacattgtcgatcgtgcacgcgcccgcaagactgaattcccagccaagcagcttcagaagactattgctcgatttattgaagaaaatctcaatcccgcggatgctgaaatcctgagaacaactctcttgcctctggagcaagtcatcaacaagtatatcgacggactgaagaccaacgaattcaatgtcttcattggactcttggagcaatactacgatgtggagaagctattctccggtcgcaacactcgtgacgaagatgctatcctgaaactccgagacgagcataaggatgatattattagcgttgtccagactgtgctctcccatagtcgcattggtgccaagaataacctgatccttgccattctggcaatgtaccgtcccaaccaacctggcgtcggcaacgttagcaagcacttcaagccgatcctccagaaactcacagaactcgaatcccgatccgccgctaaggtcactctgaaggcacgtgaggttctcatccagtgcgctcttccctctttggaggaacgtctctcgcaaatggaactaattttgcgttcctcggttgttgagtcgcgctacggtgagaccggttgggaccatcgcgaacccgatttcggcgtgttgaaggaggtggtcgattcgaagtacactgttttcgatgtgctgcctcgattcttcgtgcatcaagatgcgtgggtcacgctggctgctctcgaggtctatgttcgccgtgcctaccgtgcctacaccttgaaaggcattcagtatcactcttccggcgagccgcccctgctgtcgtgggacttcacccttgataagcttggacaacctgagtttggcggcgtcacgtctacacacccgtcgactccaagcaccccaacaaccgagagcaatcccttccgcaggctgaactccatcagtgacatgtcctatctggtcaatgatggaagcaacgagcctaccagaaagggtgtccttcttccagttcagtacttggaggatgcagaggaatacctccctagagccctggaggtctttcctcgggctggctcaaaggccaagaagccttctgataatggccttcttgccacactggagggcaagcgtcgaccagctcctcgaattgaaagcgacaacgagttgactggtgtttgcaatatcgctatccgcgatgttgaagaccttgacgacacacagattgtctctcaaattaatggaattctggctgatgtcaaggatgagttgcttgctcgtcgcatccgccgtgtgacttttatctgtggcaagaatggcatctacccaggttactacaccttccgaggacctacttacgaggaggatgagagcatccgtcacagcgagcctgccctggcgttccagctggaactcggccgtttgtccaagtttaagatcaagccagtgttcacagaaaaccgtaacattcacgtctatgaagcgattggtaagggtccggagagtgacaaagcattggacaagcggtactttgtgcgtgcggtagtgcgtccgggccgccttcgtgacgatatccctacggctgagtatctgatctccgaggctgaccgactgatgaacgatatcttggatgctctcgagatcattggcaacaacaactctgatttgaaccacatcttcatcaacttctctcctgtgttcaacctgcagccgaaggacgtcgaggaggctctggctggcttcttggatcgtttcggccgtcgcctctggcgacttcgcgtcactggtgctgaaatccgtatcctgtgcactgaccccaccaccggagtcccataccctctgcgtgtgatcatcaccaacacctatggtttcatcattcaggtggaactctacattgagaagaagtccgaaaagggcgaatgggtcttccacagcattggtggtaccaacaagctcggatccatgcatttgcgccctgtctccacgccctaccccaccaaggagtggctccaacctaagcggtacaaggctcatctgatgggcactcaatatgtgtacgatttccctgagctcttcagacaagcattccagaatagctggaccaaagccatcgcaaaggtgccatcattggcggagcagcgccctcccgttggtgaatgcatcgactacacggagcttgtgctggatgacactgacaacctggtggaaatctcgagaggccctggtacgaacacgcacggtatggttggttggctcgtgactgcccgtactcctgaatatcctcgtggacggcgattcatcatcgttgccaatgatatcacattccaaattggatcgtttggtccacaggaggacaagttcttccacaagtgtactgagctggcaagaaagcttggcattcctcgtatctacctttctgccaactcgggtgctcgtatcggaatggctgatgagctgattccctacttctcggtcgcttggaatgatcctggaaaacccgaggctgggttcaagtacctctacctgactcccgaggtcaaggagaagttcgacgcgagcaaaaagaaggaagttatcactgagttgataaacgatgaaggtgaagagcggcacaagatcaccactatcatcggtgcaaaggacggccttggtgttgagtgtcttaagggctctggtctaattgcaggtgctacctccaaggcctacgaagacatcttcaccatcactctggtcacttgccgttcggttggtatcggtgcctatctcgtccgtctcggacaaagagctatccaggtcgagggccagccaattatcctcacaggtgctccggctattaacaagctgttgggcagagaggtctacacatccaacctccaacttggtggaacgcagattatgtataggaacggagtttcgcacatgactgcgaatgatgatttcgaaggtgtgcagaagattgtggaatggatgtccttcgttcctgacaggaagggatcacccaatcccatccgtccttggtcggacaattgggaccgtgacatcgagtaccaccctccgcccaagcaggcctatgaccctcgctggctcattgccggtaaagaggatgaggagggcttccttccgggcttgtttgatgcgggatctttcgaagaagctcttggtggctgggctcgtactgttgttgttggtcgcgcgcgactgggtggtatccctatgggtgtcatcgctgttgagacccgctcggtggagaacgttactccagccgacccggccaaccctgactcgatggagatgatcagcaccgaagccggtggagtgtggtaccccaactctgccttcaagacagcccaagcccttcgtgacttcaacaatggtgaacaactgcctgtcatgatcctggccaactggaggggtttctcaggtggacagcgcgatatgtacaacgaggttctgaagtatgggtcatacatcgtcgatgctttggtcaaatatgagcagcccatcttcgtctacatcccgcccttcggtgaactccgtggtggttcttgggtcgtcattgaccctacaatcaatccagaccaaatggagatgtacgctgatgaggaagctcgcggtggtgttcttgagcctgagggtattgttaacatcaaataccgccgtgacaagcagttggataccatggctcgcctggatgctacttatggtgagctccgacgctctctggaagactcgtcgctcagtaaagagcagctgtcggagatcaagactaagatggctgcccgcgaggagcaacttctgcccgtctatttgcagattgctctgcagtttgctgatcttcatgatcgtgctggccgcatggaggccaagaacactattcgccggccgctcacctggaagaacgcacgtcgattcttctactggcgtgtgcgtcgccgtctcagcgaggaacttatcctcaagcgcatggttgctgcggcaccgtctcccgcaccccgcgacgccagcagtggtgccatcccgaccaccccagccggaaacgtctcttctactgaatccgctcgctcgactcaccttcacaccctgcgtacctggactggaatgcttgatgacgagttggagcgtgatgaccaacgtgtggccttgtggtatgaggagaacaagaagctaatccagacaaagattgaatccctcaagaccgagtccgttgctgcagatgttgcgcaattgcttatcggcaacaaggacggtggattgaagggtgtccagcaggttctgagcatgctgcctgtcgaagagaaggaagctgttcttaagtacctttcgtcataa

SEQ ID NO: 9973 - protein, 2283 aa, Aspergillus oryzae
MAHVNGTSTAQYNLPSHFIGGNHLEAAAPSSVKDFVAKHGGHSVISSVLIANNGIAAVKEIRSVRKWAYETFGNERAIQFTVMATPEDLRANADYIRMADQYVEVPGGTNNNNYANVELIVDVAERMDVHAVWAGWGHASENPRLPESLAASPKKILFIGPPASAMRSLGDKISSTIVAQHAGVPCIPWSGTGVEEVKVDDKGIVTVEDEVYNRGCTFSPEEGLQKAKEIGFPVMIKASEGGGGKGIRKVESEEDFVNLYNAAANEIPGSPIFIMKLAGNARHLEVQLLADQYGNNISLFGRDCSVQRRHQKIIEEAPVTIAKPTTFQAMERAAVSLGKLVGYVSAGTVEYLYSHADDKFYFLELNPRLQVEHPTTEMVSGVNLPAAQLQIAMGIPLHRIRDIRLLYGVDPNTSSEIDFDFSNEESYKTQRRPQPKGHTTACRITSEDPGEGFKPSSGTMHELNFRSSSNVWGYFSVGTAGGIHSFSDSQFGHIFAYGENRSASRKHMVIALKELSIRGDFRTTVEYLIKLLETPAFEDNTITTGWLDQLITNKLTAERPDPIVAVLCGAVTKAHQASEAGVEEYRKGLEKGQVPSKDVLKTVFPVDFIYEGLRYKFTATRASLDSYHLFINGSKCSVGVRALADGGLLVLLDGRSHNVYWKEEAAATRLSVDGKTCLLEQENDPTQLRTPSPGKLVKFTVENGEHVRAGQAFAEVEVMKMYMPLIAQEDGIVQLIKQPGATLEAGDILGILALDDPSRVKHAQPFTGQLPDLGPPQVVGNKPPQRFFLLHSILENILRGFDNQVIMGTTLKELVEVLRDPELPYGEWNAQSSALHSRMPQRLDTQLQNIVDRARARKTEFPAKQLQKTIARFIEENLNPADAEILRTTLLPLEQVINKYIDGLKTNEFNVFIGLLEQYYDVEKLFSGRNTRDEDAILKLRDEHKDDIISVVQTVLSHSRIGAKNNLILAILAMYRPNQPGVGNVSKHFKPILQKLTELESRSAAKVTLKAREVLIQCALPSLEERLSQMELILRSSVVESRYGETGWDHREPDFGVLKEVVDSKYTVFDVLPRFFVHQDAWVTLAALEVYVRRAYRAYTLKGIQYHSSGEPPLLSWDFTLDKLGQPEFGGVTSTHPSTPSTPTTESNPFRRLNSISDMSYLVNDGSNEPTRKGVLLPVQYLEDAEEYLPRALEVFPRAGSKAKKPSDNGLLATLEGKRRPAPRIESDNELTGVCNIAIRDVEDLDDTQIVSQINGILADVKDELLARRIRRVTFICGKNGIYPGYYTFRGPTYEEDESIRHSEPALAFQLELGRLSKFKIKPVFTENRNIHVYEAIGKGPESDKALDKRYFVRAVVRPGRLRDDIPTAEYLISEADRLMNDILDALEIIGNNNSDLNHIFINFSPVFNLQPKDVEEALAGFLDRFGRRLWRLRVTGAEIRILCTDPTTGVPYPLRVIITNTYGFIIQVELYIEKKSEKGEWVFHSIGGTNKLGSMHLRPVSTPYPTKEWLQPKRYKAHLMGTQYVYDFPELFRQAFQNSWTKAIAKVPSLAEQRPPVGECIDYTELVLDDTDNLVEISRGPGTNTHGMVGWLVTARTPEYPRGRRFIIVANDITFQIGSFGPQEDKFFHKCTELARKLGIPRIYLSANSGARIGMADELIPYFSVAWNDPGKPEAGFKYLYLTPEVKEKFDASKKKEVITELINDEGEERHKITTIIGAKDGLGVECLKGSGLIAGATSKAYEDIFTITLVTCRSVGIGAYLVRLGQRAIQVEGQPIILTGAPAINKLLGREVYTSNLQLGGTQIMYRNGVSHMTANDDFEGVQKIVEWMSFVPDRKGSPNPIRPWSDNWDRDIEYHPPPKQAYDPRWLIAGKEDEEGFLPGLFDAGSFEEALGGWARTVVVGRARLGGIPMGVIAVETRSVENVTPADPANPDSMEMISTEAGGVWYPNSAFKTAQALRDFNNGEQLPVMILANWRGFSGGQRDMYNEVLKYGSYIVDALVKYEQPIFVYIPPFGELRGGSWVVIDPTINPDQMEMYADEEARGGVLEPEGIVNIKYRRDKQLDTMARLDATYGELRRSLEDSSLSKEQLSEIKTKMAAREEQLLPVYLQIALQFADLHDRAGRMEAKNTIRRPLTWKNARRFFYWRVRRRLSEELILKRMVAAAPSPAPRDASSGAIPTTPAGNVSSTESARSTHLHTLRTWTGMLDDELERDDQRVALWYEENKKLIQTKIESLKTESVAADVAQLLIGNKDGGLKGVQQVLSMLPVEEKEAVLKYLSS

SEQ ID NO: 9974 - DNA, 2136 bp, Aspergillus oryzae
  CDS (1)..(2136)
atgccactctcgtcccttctccgcactgcttcccgtctgaggccgacagccgcccagaaagcgagaagagctgcatctacggtgtcttcgactactcccaaaacacagaattcattggactcgattctcatcgcaaatagaggagaaattgctttacgagtcggacgcaccgcggctcaacatggcatccgcgtaactacattatacacagatcccgatagccgggctcagcatgcgttgagctccccattcgcgttcaatctaggatccgtttcagcttatctcgatggagaccgtatcattgagattgcgaagcgggagggttgtcaagggatacacccaggctacggatttttaagtgagaattcggaatttgcgcgaaaatgcacagaagccgggctggtcttcattggacctccatggaaggccatcgaggacatgggggataagagccagtctaagaaaatcatgacggcggcaggcgttccttgcgttcctggttaccacggtcagaatcaagatcccagcttcctcgaagccgaagcggataagatcaaatatcctgtgctcatcaaggcaatcaagggaggtggcggaaagggaatgcgtatcgcccatagcaagtctgagttccaggctcaactgcaatctgcaaagtcagaagccatgaactcgttcggagatgaccatgtgttggtggagaagtacatcaccactccacggcacattgaagtccaagtgttcgcagacaaacatgggaacagcgtggctttgggagaaagagactgcagtatacaaagacggcaccagaagattctcgaggagtcacccgctcctcacttgcctgatgctacgaggaaagatctctgggcaaaggcacgggcggctgctgaggccgtaggctatgaaggtgccggtaccgttgagtttatctttgataacgataccggggaattctttttcatggaaatgaacactagacttcaggttgagcatccggtgactgagatggtcactggccaggacctggtctactggcaactcaaagtggctgaaggcgctaagcttccattgacccaggaggaagtagaagctcacatggcgagccgtggacatgccatagaggcgagaatctatgcagagaaccccgatcagggattcatacctgattctggcacactgctgcacgttcgcactcctaccccctcagaagacgtcagaatagacgcaggcttcgtcgccggcgatgaagtttcagctcattacgatccaatgattgccaaattgatcgtgagaggcaatacgcgagaggaggctctccgcaagcttgcgtctgcgttagaagagtacgaagtcgcagggccaattaccaacattgaattcctgaagacggtctgcaagagccctgattttgtcgccggggaggtagaaactggatacattgaaaagcatcgcgaagaactgttcactcgcgaggctatcgaaccagaggtgctcgcacaagccgcattggcttgtctgcaccacgactctaccccggtcgctcggaagcaggcaagtttcgaaggctctgctgtcgggttcagcccgagctatcaatcacggcagataacattcgcagatctgacgcctggagccaaggatggcaccaagtttgatgtccgtgttcaacaaacggatgacaacacattcaatgtagaagttggcgggcgcacctttgagcaggtggtcagccacagcaatctcgggtcgcatatcgttacatctttctttcctcacacgcgattggacaccacggtgattcgtgatggcgactccgttatcgctttccagaaagggacgcagtatcgtttgacgataccaagggccaagtggatggacaaagcactgggaatgaaggacgttaccaacagcgttctggccccaatgccgtgcaaagtgctgcgagtggaagttcaggcaggcgacgtagttgaaaaagaccagccactggtggttattgagagtatgaaaatggaaacggtcatccgcagcccgcaaaagggaaccatttccaaagtggtacatcaaaaaggagaccaatgtaaaagcggcacacccctggttgaatttgctgaggagagcggtgagaactag

SEQ ID NO: 9975 - protein, 711 aa, Aspergillus oryzae
MPLSSLLRTASRLRPTAAQKARRAASTVSSTTPKTQNSLDSILIANRGEIALRVGRTAAQHGIRVTTLYTDPDSRAQHALSSPFAFNLGSVSAYLDGDRIIEIAKREGCQGIHPGYGFLSENSEFARKCTEAGLVFIGPPWKAIEDMGDKSQSKKIMTAAGVPCVPGYHGQNQDPSFLEAEADKIKYPVLIKAIKGGGGKGMRIAHSKSEFQAQLQSAKSEAMNSFGDDHVLVEKYITTPRHIEVQVFADKHGNSVALGERDCSIQRRHQKILEESPAPHLPDATRKDLWAKARAAAEAVGYEGAGTVEFIFDNDTGEFFFMEMNTRLQVEHPVTEMVTGQDLVYWQLKVAEGAKLPLTQEEVEAHMASRGHAIEARIYAENPDQGFIPDSGTLLHVRTPTPSEDVRIDAGFVAGDEVSAHYDPMIAKLIVRGNTREEALRKLASALEEYEVAGPITNIEFLKTVCKSPDFVAGEVETGYIEKHREELFTREAIEPEVLAQAALACLHHDSTPVARKQASFEGSAVGFSPSYQSRQITFADLTPGAKDGTKFDVRVQQTDDNTFNVEVGGRTFEQVVSHSNLGSHIVTSFFPHTRLDTTVIRDGDSVIAFQKGTQYRLTIPRAKWMDKALGMKDVTNSVLAPMPCKVLRVEVQAGDVVEKDQPLVVIESMKMETVIRSPQKGTISKVVHQKGDQCKSGTPLVEFAEESGEN

SEQ ID NO: 9976 - DNA, 1575 bp, Aspergillus oryzae
  CDS (1)..(1575)
atgtgtgcccagtctattcagcggctcctggtcgcaaacagcagaggcgaaatcgctgtccgtattcttcaagctgcacgcgaactttcgccatcaattgagacatttgctctttatacagatgacgatcgttctcactgtgatattggacgtccccaccatgcagtgcgaataccatctgctgcggcctacttggacatcccgttgctcgttaatctgagccgcgaacataacattgactctgtgcaccccggatatggcttccttagcgagagtgcagaatttgccagtcgtatgcatgatgctggaattactgtcattggtcctggacccgagacactgtcctgcacaggagacaaactcaaagccaaacagctggcaacgcaatgtaaagttcccgttctgccggctatgccaagatccacctccgatttgaaagagatacgcacgtttgcgcggcaggtcgggtaccccattatgatcaaggcggttgatggtggaggaggccgcggtatccgcttggtgcggcaggaaggcgagctggagcacgccgtgcgggcagcaactaacgagtcaccatcacagacggtttttgtggaaaaggccgctgtggatggatttcaccacgttgaggtccaagtcgtgggtgacggtattgacgtgtgtcacctctgggagcgtgactgtagcttgcagcgtcgtttccagaaggtcgttgaattcgctccgtcgcttatgcaaaaccgggaggtggtggagcaagtattgaatgccgcccttcgcatggcaaaggcaattcgataccgatctcttggaacagtcgaattcctagttcacaaccaccgaagagagttctatttcctcgagatcaaccctcgcctgcaggtggagcataccattactgagaacattaccagtgtggatttggtgcagacacagctcaaacttgccatgggattgtcgctcgctcaagttgggttgctgaaagaccgcccggtacaggctcagggccactctatccaactgcgattgtgcgccgaagacccaactagggatttccacttaagtataggcaagatcactgaatttatcgtgccaagtggccacggcgttcgcattgacacccacgttgatacgtcgggttcaagccccgttacggttggagcgaattttgataacatgttggcaaaggtcatcgtcactgcgcccagttgggaggccaccgtctcgaaagctcggcgagtgctaaccgatatcaagatatctggggtgcagaccaatttgaacctgttacgaggagttctttcccatgatgacattttgacaggacaggtcgatacacagtggctggaaagacatcttggacatgtgatccaatcaggagagacaattgctcaatctgtgtcagaaaatcaagtagtggcatttgtcaagcagatgaagatggagcttgaggtgcgaagcccacgagggggccgagttcggtgggtatatcaaatggatgaagaggaagaagacgtggcagagggtatgttgttggtggaacttgaggaagaagtccggggaaagttgtag

SEQ ID NO: 9977 - protein, 524 aa, Aspergillus oryzae
MCAQSIQRLLVANSRGEIAVRILQAARELSPSIETFALYTDDDRSHCDIGRPHHAVRIPSAAAYLDIPLLVNLSREHNIDSVHPGYGFLSESAEFASRMHDAGITVIGPGPETLSCTGDKLKAKQLATQCKVPVLPAMPRSTSDLKEIRTFARQVGYPIMIKAVDGGGGRGIRLVRQEGELEHAVRAATNESPSQTVFVEKAAVDGFHHVEVQVVGDGIDVCHLWERDCSLQRRFQKVVEFAPSLMQNREVVEQVLNAALRMAKAIRYRSLGTVEFLVHNHRREFYFLEINPRLQVEHTITENITSVDLVQTQLKLAMGLSLAQVGLLKDRPVQAQGHSIQLRLCAEDPTRDFHLSIGKITEFIVPSGHGVRIDTHVDTSGSSPVTVGANFDNMLAKVIVTAPSWEATVSKARRVLTDIKISGVQTNLNLLRGVLSHDDILTGQVDTQWLERHLGHVIQSGETIAQSVSENQVVAFVKQMKMELEVRSPRGGRVRWVYQMDEEEEDVAEGMLLVELEEEVRGKL

SEQ ID NO: 9978 - DNA, 3582 bp, Aspergillus oryzae
  CDS (1)..(3582)
atggcggctccgtttcgtcagcctgaggaggcggtcgatgacaccgagttcatcgatgaccaccatgaacacctccgtgataccgtgcaccatcggttgcgcgccaattcctccattatgcacttccagaagatcctcgtcgccaaccgtggtgagatccccattcgtatcttcagaacggcccacgagctgtcattgcagacggttgctatctactctcatgaggatcgactgtcaatgcaccgtcaaaaggccgatgaggcctacatgattggccaccgcggtcagtacacccctgtcggtgcgtacctggcgggcgatgagatcatcaagatcgccctggagcacggtgtccagctgatccacccgggctacggtttcttgtccgagaacgccgacttcgcccgcaaggttgagaacgccggcattgtctttgtgggacccactcccgataccattgacagcttgggtgacaaggtgtcggcccgtcggctggccattaagtgcgaggtccctgtcgttccgggtacggagggccccgtcgagcgctatgaggaggtcaaggcgttcacagacacctatggcttccccatcatcatcaaggctgcctttggcggtggtggccgtggtatgcgtgtggtccgtgaccaggccgagctgcgtgactcgttcgagcgagccacctctgaggcccgctccgccttcggcaatggtaccgtcttcgtcgagcgcttcctcgacaaacccaagcacattgaagtccagcttctgggtgacagccacggcaacgttgtccatctgtttgagcgtgactgctccgtgcagcgtcgtcaccagaaggtcgttgaggttgctccggctaaggacctgccagccgatgtccgggaccgcatcctggccgatgctgtgaagctggccaagtccgtcaactaccgtaacgccggtacagctgagttcctggtggaccagcagaaccgccactacttcattgaaatcaatcctcgtatccaagtcgagcacaccatcaccgaagagattactggtatcgatatcgtggctgcacagatccagattgctgctggtgcaagcctcgagcaactgggcctgactcaggaccgcatctccgcccgcggatttgccattcaatgtcgtatcaccacggaagatcccgccaaggggttctctccggatactggtaagattgaggtttatcgttccgctggtggtaacggtgtccgtctggatggtggtaacggtttcgctggtgctatcatcacccctcactacgactccatgctggtcaagtgtacctgccgtggttcgacctatgaaatcgctcgtcgcaaggttgtgcgtgccttggtcgagttccgtattcgtggtgtgaagaccaacattcccttcctgacttcgcttctgagccacccgaccttcgtcgatggaaactgctggaccactttcatcgacgacacccctgaattgttctctcttgtcggcagtcagaaccgtgcccagaagctgctcgcatacctcggcgatgtagctgtcaacggtagtagcatcaagggccaaattggcgagcccaagctcaagggtgatgtcatcaagccgaagcttttcgatgccgagggcaagccgcttgacgtttccgccccctgcaccaagggttggaagcagattctggaccgggagggcccggctgcctttgcgaaggccgtgcgtgccaacaagggttgcttgatcatggatactacctggcgtgacgcccaccagtctttgctggccacccgtgtgcgtaccatcgacttgttgaacatcgcccatgagaccagctacgcctactccaatgcgtacagtttggaatgctggggtggtgctaccttcgatgtggccatgcgtttcctctatgaggacccctgggaccgcctgcgcaagatgcgtaaggctgttcctaacatcccattccagatgttgctccgtggtgccaacggtgtcgcctactcttccctcccagacaacgccatctaccacttctgtaagcaggctaagaagtgcggtgtcgacattttccgtgttttcgacgccctcaacgatgtcgatcagctcgaggtcggtatcaaggctgttcatgctgccgagggtgttgtcgaggccaccatgtgctacagcggtgacatgctgaacccccacaagaagtacaacctggagtactacatggccttggtggataagattgtagccatgaagcctcacatccttggtatcaaggatatggccggtgtgctgaagccccaggccgctcgcctgttggtgggctccatccgtcagcgctaccctgaccttcccatccacgtccacacccacgactccgctggtactggtgtagcttccatgattgcctgtgcccaggcgggtgccgacgccgtggacgccgcgaccgacagcatgtccggtatgacctcccagcctagcattggtgccattctggcctctcttgagggcactgagcaagaccccggtctcaacctcgcccacgtgcgcgctattgatagctactgggcacagctgcgcttgctctactctcctttcgaggcgggtctcactggccccgaccctgaggtctacgagcacgagatccctggtggtcagttgaccaaccttatcttccaggccagtcagctcggcttgggccagcagtgggccgaaaccaagaaggcctatgaggcggctaatgatttactcggcgacattgtaaaggtcactcccacctccaaggtggtcggtgacttggctcagttcatggtctcgaacaaactgactccggaggatgttgttgagcgtgctggtgagctggacttccctggttctgtgctcgaattcctcgaaggtctcatgggacagcccttcggtggattccccgagccattgcgctcccgcgccctgcgcgatcgccgcaagctcgagaagcgtccaggtctctacctcgagcctttggatttggctaagatcaagagccagatccgtgagaagttcggtgctgctactgagtatgacgtggccagctatgccatgtatcccaaggtcttcgaggactacaagaagttcgtccagaagttcggtgatctctccgtcttgcccacacggtacttcttggccaagcctgagattggcgaggagttccacgttgagctggagaagggtaaggtgctcatcctgaagttgttggccatcggccctctttcagagcagactggtcagcgtgaggtcttctacgaagtcaacggtgaggtgcgccaggtcgctgttgatgacaacaaggcttccgtggacaacacttcacgccctaaggccgatgtgggtgacagcagccaggtcggtgctcctatgagcggtgtggttgttgaaatccgtgtccacgatggtctggaggttaagaagggtgacccacttgccgtcctgagtgccatgaagatggaaatggttatctctgctcctcacagtggaaaggtctccagcttgctggtcaaggagggcgattctgtggatggccaggatctcgtctgcaagatcgtcaaagcgtaa

SEQ ID NO: 9979 - protein, 1193 aa, Aspergillus oryzae
MAAPFRQPEEAVDDTEFIDDHHEHLRDTVHHRLRANSSIMHFQKILVANRGEIPIRIFRTAHELSLQTVAIYSHEDRLSMHRQKADEAYMIGHRGQYTPVGAYLAGDEIIKIALEHGVQLIHPGYGFLSENADFARKVENAGIVFVGPTPDTIDSLGDKVSARRLAIKCEVPVVPGTEGPVERYEEVKAFTDTYGFPIIIKAAFGGGGRGMRVVRDQAELRDSFERATSEARSAFGNGTVFVERFLDKPKHIEVQLLGDSHGNVVHLFERDCSVQRRHQKVVEVAPAKDLPADVRDRILADAVKLAKSVNYRNAGTAEFLVDQQNRHYFIEINPRIQVEHTITEEITGIDIVAAQIQIAAGASLEQLGLTQDRISARGFAIQCRITTEDPAKGFSPDTGKIEVYRSAGGNGVRLDGGNGFAGAIITPHYDSMLVKCTCRGSTYEIARRKVVRALVEFRIRGVKTNIPFLTSLLSHPTFVDGNCWTTFIDDTPELFSLVGSQNRAQKLLAYLGDVAVNGSSIKGQIGEPKLKGDVIKPKLFDAEGKPLDVSAPCTKGWKQILDREGPAAFAKAVRANKGCLIMDTTWRDAHQSLLATRVRTIDLLNIAHETSYAYSNAYSLECWGGATFDVAMRFLYEDPWDRLRKMRKAVPNIPFQMLLRGANGVAYSSLPDNAIYHFCKQAKKCGVDIFRVFDALNDVDQLEVGIKAVHAAEGVVEATMCYSGDMLNPHKKYNLEYYMALVDKIVAMKPHILGIKDMAGVLKPQAARLLVGSIRQRYPDLPIHVHTHDSAGTGVASMIACAQAGADAVDAATDSMSGMTSQPSIGAILASLEGTEQDPGLNLAHVRAIDSYWAQLRLLYSPFEAGLTGPDPEVYEHEIPGGQLTNLIFQASQLGLGQQWAETKKAYEAANDLLGDIVKVTPTSKVVGDLAQFMVSNKLTPEDVVERAGELDFPGSVLEFLEGLMGQPFGGFPEPLRSRALRDRRKLEKRPGLYLEPLDLAKIKSQIREKFGAATEYDVASYAMYPKVFEDYKKFVQKFGDLSVLPTRYFLAKPEIGEEFHVELEKGKVLILKLLAIGPLSEQTGQREVFYEVNGEVRQVAVDDNKASVDNTSRPKADVGDSSQVGAPMSGVVVEIRVHDGLEVKKGDPLAVLSAMKMEMVISAPHSGKVSSLLVKEGDSVDGQDLVCKIVKA

SEQ ID NO: 9980 - DNA, 2055 bp, Aspergillus oryzae
  CDS (1)..(2055)
atggaatcacttaagacattgctggtcgcaaaccgtggcgaaatagctgtccggattttaaagacagcaaaaaaactaaatttgcgaacaattgctctctataccgagccagatgctgcttctgctcacgttcaactagcggatgaggccttcctgctcgatggaccgccttcaaaagcatacatcgatggagatcaaataattaaattagcgaaacgaaaccatgtggacgctattattccaggatatggttttctgtcagagaatgcggatttcgcaagagccattgccaaggccggtatggtctttgctgggccatcgccagaatgtatcgaagcatttgggctgaagcatacggcacgagacctcgccacaaaggctggggtgcctatcgtacctggatcaactggactggtcacgagcgaggaggatgctgtgaaggtggctaaagatctagggtttccggttatgctcaaagctaccgccggcggcggtggcatgggtctactgacatgcagctccgaagatgaagtacgcgagtcgttcgctaccgtcaggtctagaggagaggccttgttcaagaatgccggattgttcattgaacgatactatccatctagccatcatatcgaagtccaggtatttggaaatggagacggcaaagccatcgctatcggcgaacgtgagtgctctatacaacgaagacaccagaaaataatcgaagagtgtccaagcccatttgttacaagaaaccccgggcttcgagaaagcttgggcgacgctgctgttcgtcttgcagagtctatcaagtatggatcagctggaacgatcgagtatcttgtcgacgacgagactggcgcgttcttctttcttgaaatgaatactcgacttcaagtcgagcatggaataacagagttatgctacggtgttgatttggtagaactcatgttaaaacaagcagatgctcaactttcgggaaagaagggccttgaggtagcctttcttacgggcattaccgttgatgctccttcaggtgccgctatcgaggctagagtatatgccgagaatccgacgaaagacttcgctccctgtcccggaacgttacagagtgtggaatggaaggaactgccaggatcaaggattgacacgtgggtgtacagaggcattaaagtatcggcaaactatgatcctttgctggcgaaggtcatgcttcattcgcctagccgaacgcaagctattgagggaatgaggacgattttgacacagtctcgaatctgcggcccaccaactaacctggagtttttggctgagattcttacggacgagcgattcgtgaccggaaataccctaaccagattcttggatgatttccaatggaagctagttaccgctctgaagaaagtcctaaacgaaggcaacggagatataactttctccaacaagttgatctcaatgattggatgcggaaattgcgtcgacatcctgggatccaagaagggatacacacccgacagaccatggctcttcgaagagttcgaccaaatcaccttctaccgtgtctcagaagaagaatatgaaaaggagctagcccttttcaacagcggcagatacgaataccaatgggaagaagtgatatttgacatggcagagcacaacaagctcctccacgacacgaaagaagaagtagcagccatccgagctcgccagcgtaaagcacaagatgagatggacaaactcgaggcggaactcttagaacactgggcaaaggagaaagcggagaaaggtgtcccggttgatgcgattgagaatttgctaaaagatcctcaaattcttccaatcgaggctcccttaaatgctaatatttggaaagtcgaggtcaagcagggtgacaagctcgatgagggccagatcgtggttattttggaggcgatgaagctcgagatcgcagtgcggactgaattgcatgccgctggggcgacagtggaaaaggtcctggttcaaccaggtgattcaatagaggccgggaagcctttgatattggtgagaaatgcttga

SEQ ID NO: 9981 - protein, 684 aa, Aspergillus oryzae
MESLKTLLVANRGEIAVRILKTAKKLNLRTIALYTEPDAASAHVQLADEAFLLDGPPSKAYIDGDQIIKLAKRNHVDAIIPGYGFLSENADFARAIAKAGMVFAGPSPECIEAFGLKHTARDLATKAGVPIVPGSTGLVTSEEDAVKVAKDLGFPVMLKATAGGGGMGLLTCSSEDEVRESFATVRSRGEALFKNAGLFIERYYPSSHHIEVQVFGNGDGKAIAIGERECSIQRRHQKIIEECPSPFVTRNPGLRESLGDAAVRLAESIKYGSAGTIEYLVDDETGAFFFLEMNTRLQVEHGITELCYGVDLVELMLKQADAQLSGKKGLEVAFLTGITVDAPSGAAIEARVYAENPTKDFAPCPGTLQSVEWKELPGSRIDTWVYRGIKVSANYDPLLAKVMLHSPSRTQAIEGMRTILTQSRICGPPTNLEFLAEILTDERFVTGNTLTRFLDDFQWKLVTALKKVLNEGNGDITFSNKLISMIGCGNCVDILGSKKGYTPDRPWLFEEFDQITFYRVSEEEYEKELALFNSGRYEYQWEEVIFDMAEHNKLLHDTKEEVAAIRARQRKAQDEMDKLEAELLEHWAKEKAEKGVPVDAIENLLKDPQILPIEAPLNANIWKVEVKQGDKLDEGQIVVILEAMKLEIAVRTELHAAGATVEKVLVQPGDSIEAGKPLILVRNA

SEQ ID NO: 9982 - DNA, 6765 bp, Arabidopsis thaliana
  CDS (1)..(6765)
atggctggctcggttaacgggaatcatagtgctgtaggacctggtataaattatgagacggtgtctcaagtggatgagttctgtaaagcacttagagggaaaaggccgatccatagtattttgatagctaacaatggaatggcggctgtgaagtttatacgtagtgtcagaacatgggcttatgaaacatttggtacggaaaaagccatattgttggtggggatggcaacccctgaagacatgcggatcaatgcggagcatatcagaatcgctgatcagtttgttgaggttcccggaggaaccaacaataacaattatgctaacgttcagctgattgtggagatggctgaagtaacacgcgtggatgcagtttggcctggttggggtcatgcatctgaaaaccccgaattacctgatgccctagatgcaaaaggaatcatatttcttggtcctccagcatcttcaatggcagcactgggagataagattggttcttcgttgattgcacaagctgctgatgtacccactctgccatggagtggttcccatgttaaaatacctcctaatagcaacttggtaaccatcccagaggagatctaccggcaagcatgtgtctacacaactgaagaagcgattgctagctgtcaagttgtcggttacccagcaatgatcaaagcatcgtggggtggtggtggtaaaggaatcaggaaggttcataatgatgatgaggttagggctctattcaagcaagttcagggtgaggtcccaggctcaccaatattcataatgaaggttgcgtcacagagtcggcatctagaggtccagctgctctgtgacaagcatggaaatgtttcagctctgcatagccgtgattgtagcgtccagagaagacatcaaaagatcatagaggagggtccaattactgtggctccgccagaaactgtcaagaaacttgaacaagcagctagaaggttggctaagagtgttaactatgttggagctgctactattgagtatctctacagtatggacactggggagtactacttcttagagcttaaccctcgcttacaggttgagcatcctgtcactgagtggattgccgagataaatcttcctgctgcccaagttgctgtggggatgggaattcctctctggcaaatccctgagataagacggttctatggaatagaacatggtggaggttatgattcttggcgaaaaacatctgttgtagccttcccttttgactttgataaagctcaatctataaggccaaaaggtcattgtgtggctgtacgtgtgacaagtgaggatcctgatgacgggttcaaaccaaccagcggtagagttcaggagttgagttttaagagcaagccaaatgtgtgggcgtacttctctgtcaagtctggtggaggcatccacgagttctcggattcccagtttggacatgtttttgcatttggggaatccagagccctggcgatagcgaatatggttcttgggctaaaagaaattcagatccgtggagaaattaggactaacgttgactacacgatcgaccttttacatgcttctgattaccgtgataacaaaattcacactggttggttggatagtaggattgctatgcgggtcagagctgagaggcctccatggtatctctctgttgtcggcggagctctctataaagcatcagcgaccagtgctgctgtggtttcagattacgttggttatctggagaaggggcaaatccctccaaagcatatatctcttgtacattctcaagtgtctctgaatattgaaggaagtaaatatacgattgatgtagtccggggtggatcaggaacctacaggctaagaatgaacaagtcagaagtggtagcagaaatacacactctacgtgatggaggtctgttgatgcagttggatggcaaaagccatgtgatatatgcagaggaagaagctgcaggaactcgtcttctcattgatggaagaacttgtttgctacagaatgaccacgatccatcaaagttaatggctgagacaccgtgcaagttgatgaggtatttgatttccgacaacagcaatattgacgctgatacgccttatgccgaagttgaggtcatgaagatgtgcatgccacttctttcacctgcttcaggagttatccattttaaaatgtctgaaggacaagccatgcaggctggtgaacttatagccaatcttgatcttgatgatccttctgctgtaagaaaggccgaacccttccatggaagtttcccaagattagggcttccaactgcaatatccggtagagttcatcagagatgtgccgcaacattaaatgctgcacgcatgattcttgctggctatgagcataaagtagatgaggttgttcaagacttacttaattgccttgatagccctgaactcccatttcttcagtggcaagagtgctttgcagttctggcgacacgactacctaaaaatctcaggaacatgctagaatcaaagtatagggaatttgagagtatttccagaaactctttgaccaccgatttccctgccaaacttttaaaaggcattcttgaggcacatttatcttcttgtgatgagaaagagagaggtgcccttgaaaggctcattgaaccattgatgagccttgcaaaatcttatgaaggtggtagagaaagtcatgcccgtgttattgttcattctctctttgaagaatatctatcagtagaagaattattcaatgataacatgctggctgatgttatagaacgcatgcgtcagctatacaagaaagatctgttgaaaattgtggatatagtgctctcacaccagggcataaaaaacaaaaacaaactcgttctccggctcatggagcagcttgtttaccctaatcctgctgcttacagagataaacttattcgattctcaacacttaaccatactaactactctgagttggcgctcaaggcgagtcaattacttgaacagaccaaactaagtgagcttcgttcaaacattgctagaagcctttcagagttagaaatgtttacagaggacggagaaaatatggatactcccaagaggaaaagtgccattaatgaaagaatagaagatcttgtaagcgcatctttagctgttgaagacgctctcgtgggactatttgaccatagcgatcacacacttcaaagacgggttgttgagacttatattcgcagattataccagccctacgtcgttaaagatagcgtgaggatgcagtggcaccgttctggtcttcttgcttcctgggagttcctagaggagcatatggaaagaaaaaacattggcttagacgatcccgacacatctgaaaaaggattggttgagaagcgtagtaagagaaaatggggggctatggttataatcaaatctttgcagtttcttccaagtataataagtgcagcattgagagaaacaaagcacaacgactatgaaactgccggagctcctttatctggcaatatgatgcacattgctattgtgggcatcaacaaccagatgagtctgcttcaggacagtggggatgaagaccaagctcaggaaagagtaaacaagttggccaaaattcttaaagaggaagaagtgagttcaagcctctgttctgccggtgttggtgtaatcagctgtataattcagcgagatgaaggacgaacacccatgagacattctttccattggtcgttggagaaacagtattatgtagaagagccgttgctgcgtcatcttgaacctcctctgtccatttaccttgagttggataagctgaaaggatactcaaatatacaatatacgccttctcgagatcgtcaatggcatctgtatactgttacagacaagccagtgccaatcaagaggatgttcctgagatctcttgttcgacaggctacaatgaacgatggatttatattgcagcaagggcaggataagcagcttagccaaacactgatctccatggcgtttacgtcgaaatgtgttctgaggtctttgatggatgccatggaggaactggaactgaatgcccataatgctgcaatgaaaccagatcacgcacatatgtttctttgcatattgcgtgacgagcagatagatgatcttgtgcctttccccaggagagttgaagtgaatgcggaggatgaagaaactacagttgaaatgatcttagaagaagcagcacgagagatacatagatctgttggagtgagaatgcataggttgggcgtgtgcgagtgggaagtgcggctgtggttggtgtcctctggactggcatgtggtgcttggagggttgtggttgcaaacgtgacaggccgtacatgcactgtccacatataccgagaagttgaaactcctggaagaaacagtttaatctaccactcaataaccaagaagggacctttgcatgaaacaccaatcagtgatcaatataagcccctgggatatctcgacaggcaacgtttagcagcaaggaggagtaacactacttattgctatgacttcccgttggcatttgggacagccttggaactgttgtgggcatcacaacacccaggagttaagaaaccatataaggatactctgatcaatgttaaagagcttgtattctcaaaaccagaaggttcttcgggtacatctctagatctggttgaaagaccacccggtctcaacgactttgggatggttgcctggtgcctagatatgtcgaccccagagtttcctatggggcggaaacttctcgtgattgcgaatgatgtcaccttcaaagctggttcttttggtcctagagaggacgcgtttttccttgctgttactgaactcgcttgtgccaagaagcttcccttgatttacttggcagcaaattctggtgcccgacttggggttgctgaagaagtcaaagcctgcttcaaagttggatggtcggatgaaatttcccctgagaatggttttcagtatatatacctaagccctgaagaccacgaaaggattggatcatctgtcattgcccatgaagtaaagctctctagtggggaaactaggtgggtgattgatacgatcgttggcaaagaagatggtattggtgtagagaacttaacaggaagtggggccatagcgggtgcttactcaaaggcatacaatgaaacttttactttaacctttgttagtggaagaacggttggaattggtgcttatcttgcccgcctaggtatgcggtgcatacagagacttgatcagccgatcatcttgactggcttctctacactcaacaagttacttgggcgtgaggtctatagctctcacatgcaactgggtggcccgaaaatcatgggcacaaatggtgttgttcatcttacagtctcagatgatcttgaaggcgtatcagcaattctcaactggctcagctacattcctgcttacgtgggtggtcctcttcctgttcttgcccctttagatccaccggagagaattgtggagtatgtcccagagaactcttgcgacccacgagcggctatagctggggtcaaagacaataccggtaaatggcttggaggtatctttgataaaaatagtttcattgagactcttgaaggctgggcaaggacggtagtgactggtagagccaagctcgggggaatacccgttggagttgttgcagttgagacacagactgtcatgcagatcatcccagccgatcctggacagcttgactctcatgaaagagtggttccgcaagcagggcaagtctggtttcctgattcagcggccaagactgctcaagcgcttatggatttcaaccgggaagagcttccattgtttatcctagcgaactggagagggttttcaggtgggcagagagatcttttcgaaggaatacttcaggcaggttcaactatagtagaaaatctgagaacctatcgtcagccagtgtttgtgtacatcccaatgatgggagagctgcgcggtggagcgtgggttgttgttgacagccagataaattcggattatgttgaaatgtatgctgatgaaacagctcgtggaaatgtgcttgagccagaagggacaatagagataaaatttagaacaaaagagctattagagtgcatgggaaggttggaccagaagctaatcagtctgaaagcaaaactgcaagatgccaagcaaagcgaggcctatgcaaacatcgagcttctccagcaacagattaaagcccgagagaaacagcttttaccagtttatatccaaatcgccaccaaatttgcagaacttcatgacacttccatgagaatggctgcaaagggagtgatcaaaagtgttgtggaatggagcggctcgcggtccttcttctacaaaaagctcaataggagaatcgctgagagctctcttgtgaaaaacgtaagagaagcatctggagacaacttagcatataaatcttcaatgcgtctgattcaggattggttctgcaactctgatattgcaaaggggaaagaagaagcttggacagacgaccaagtgttctttacatggaaggacaatgttagtaactacgagttgaagctgagcgagttgagagcgcagaaactactgaaccaacttgcagagattgggaattcctcagatttgcaagctctgccacaaggacttgctaatcttctaaacaaggtggagccgtcgaaaagagaagagctggtggctgctattcgaaaggtcttgggttga

SEQ ID NO: 9983 - protein, 2254 aa, Arabidopsis thaliana
MAGSVNGNHSAVGPGINYETVSQVDEFCKALRGKRPIHSILIANNGMAAVKFIRSVRTWAYETFGTEKAILLVGMATPEDMRINAEHIRIADQFVEVPGGTNNNNYANVQLIVEMAEVTRVDAVWPGWGHASENPELPDALDAKGIIFLGPPASSMAALGDKIGSSLIAQAADVPTLPWSGSHVKIPPNSNLVTIPEEIYRQACVYTTEEAIASCQVVGYPAMIKASWGGGGKGIRKVHNDDEVRALFKQVQGEVPGSPIFIMKVASQSRHLEVQLLCDKHGNVSALHSRDCSVQRRHQKIIEEGPITVAPPETVKKLEQAARRLAKSVNYVGAATIEYLYSMDTGEYYFLELNPRLQVEHPVTEWIAEINLPAAQVAVGMGIPLWQIPEIRRFYGIEHGGGYDSWRKTSVVAFPFDFDKAQSIRPKGHCVAVRVTSEDPDDGFKPTSGRVQELSFKSKPNVWAYFSVKSGGGIHEFSDSQFGHVFAFGESRALAIANMVLGLKEIQIRGEIRTNVDYTIDLLHASDYRDNKIHTGWLDSRIAMRVRAERPPWYLSVVGGALYKASATSAAVVSDYVGYLEKGQIPPKHISLVHSQVSLNIEGSKYTIDVVRGGSGTYRLRMNKSEVVAEIHTLRDGGLLMQLDGKSHVIYAEEEAAGTRLLIDGRTCLLQNDHDPSKLMAETPCKLMRYLISDNSNIDADTPYAEVEVMKMCMPLLSPASGVIHFKMSEGQAMQAGELIANLDLDDPSAVRKAEPFHGSFPRLGLPTAISGRVHQRCAATLNAARMILAGYEHKVDEVVQDLLNCLDSPELPFLQWQECFAVLATRLPKNLRNMLESKYREFESISRNSLTTDFPAKLLKGILEAHLSSCDEKERGALERLIEPLMSLAKSYEGGRESHARVIVHSLFEEYLSVEELFNDNMLADVIERMRQLYKKDLLKIVDIVLSHQGIKNKNKLVLRLMEQLVYPNPAAYRDKLIRFSTLNHTNYSELALKASQLLEQTKLSELRSNIARSLSELEMFTEDGENMDTPKRKSAINERIEDLVSASLAVEDALVGLFDHSDHTLQRRVVETYIRRLYQPYVVKDSVRMQWHRSGLLASWEFLEEHMERKNIGLDDPDTSEKGLVEKRSKRKWGAMVIIKSLQFLPSIISAALRETKHNDYETAGAPLSGNMMHIAIVGINNQMSLLQDSGDEDQAQERVNKLAKILKEEEVSSSLCSAGVGVISCIIQRDEGRTPMRHSFHWSLEKQYYVEEPLLRHLEPPLSIYLELDKLKGYSNIQYTPSRDRQWHLYTVTDKPVPIKRMFLRSLVRQATMNDGFILQQGQDKQLSQTLISMAFTSKCVLRSLMDAMEELELNAHNAAMKPDHAHMFLCILRDEQIDDLVPFPRRVEVNAEDEETTVEMILEEAAREIHRSVGVRMHRLGVCEWEVRLWLVSSGLACGAWRVVVANVTGRTCTVHIYREVETPGRNSLIYHSITKKGPLHETPISDQYKPLGYLDRQRLAARRSNTTYCYDFPLAFGTALELLWASQHPGVKKPYKDTLINVKELVFSKPEGSSGTSLDLVERPPGLNDFGMVAWCLDMSTPEFPMGRKLLVIANDVTFKAGSFGPREDAFFLAVTELACAKKLPLIYLAANSGARLGVAEEVKACFKVGWSDEISPENGFQYIYLSPEDHERIGSSVIAHEVKLSSGETRWVIDTIVGKEDGIGVENLTGSGAIAGAYSKAYNETFTLTFVSGRTVGIGAYLARLGMRCIQRLDQPIILTGFSTLNKLLGREVYSSHMQLGGPKIMGTNGVVHLTVSDDLEGVSAILNWLSYIPAYVGGPLPVLAPLDPPERIVEYVPENSCDPRAAIAGVKDNTGKWLGGIFDKNSFIETLEGWARTVVTGRAKLGGIPVGVVAVETQTVMQIIPADPGQLDSHERVVPQAGQVWFPDSAAKTAQALMDFNREELPLFILANWRGFSGGQRDLFEGILQAGSTIVENLRTYRQPVFVYIPMMGELRGGAWVVVDSQINSDYVEMYADETARGNVLEPEGTIEIKFRTKELLECMGRLDQKLISLKAKLQDAKQSEAYANIELLQQQIKAREKQLLPVYIQIATKFAELHDTSMRMAAKGVIKSVVEWSGSRSFFYKKLNRRIAESSLVKNVREASGDNLAYKSSMRLIQDWFCNSDIAKGKEEAWTDDQVFFTWKDNVSNYELKLSELRAQKLLNQLAEIGNSSDLQALPQGLANLLNKVEPSKREELVAAIRKVLG

SEQ ID NO: 9984 - DNA, 6774 bp, Medicago sativa
  CDS (1)..(6774)
atggctagcgtgggccgtggaaatggatatttaaacagtgtgctaccgagtaggcaccctgctactacaaccgaagtagatgaatactgcaatgcccttggaggaaacaagccgattcatagcatattgattgcaaacaatggaatggcagcagtcaagtttatacgtagtgttaggagttgggcttacgagacatttggcacggaaaaagctatcttgttggttgccatggcaactccagaggatatgagaatcaatgcagaacatatcagaatagccgatcaatttgtggaagtacctggtgggaccaataacaataactacgccaatgtgcagcttattctagagattgctgagataactcacgttgatgcggtgtggcctggttggggtcatgcatcagaaaatcctgagcttccagatgcattaaaagcaaagggaattgtattccttggacctcctgctatatctatggcagcattgggagacaaaattggttcctcgttgattgctcaggcagcagaagttccaacccttccatggagtggttctcatgtgaaaattcctccagaaagtgacttgattactattcctgatgaaatttaccgtgcagcatgtgtttatacaacagaagaagcaattgcaagttgtcaagtagtaggttaccctgcaatgattaaggcatcttggggtggtggcggcaaaggcataagaaaggttcataatgatgatgaggttagggcattgttcaagcaagttcaaggtgaagtaccaggctcacctatatttataatgaaagttgcttcccagagccgacatcttgaagtccaattgatttgcgatcagcacggaaattttgcagcattgcacagccgtgattgtagtgttcaaagaaggcatcaaaagattattgaagagggtcccattactgtagcacctccagaaacggtgaaagaacttgaacaggcggctagaagattagctaaatctgtaaattatgtgggggcagctaccgttgagtatctttatagcatggaaactggcgagtactactttttagagttgaacccccgactacaggttgagcatcctgttactgaatggatagctgagataaatctgccagcagcacaagttgcagttgggatgggcatcccactctggcaaattcctgagattaggcgtttctatgggatggaacatggtgggggaaatgatggttggaagaaaacatcagtgttagctaccccttttgattttgacgaagcacaatctacaaagccgaaaggtcattgtgtggctgtacgagtcaccagtgaggaccccgatgatggttttacgcctacaggaggaaaagtgcaggagctcagctttaaaagcaagccaaatgtgtgggcttatttctctgttaagtccggaggaggaattcatgaattctcagattctcaatttggacatgtttttgcgtttggagaatctagagctttagcaattgcaaatatggtactggggttgaaggaaattcaaattcgaggagaaattcgtaccaacgttgattacacaattgatcttctgaatgcttcagactacagagacaacaaaattcacacaggatggctagacagtagaattgcaatgcgggttagagcagagaggcctccctggtatctgtctgttgttggtggggcactctataaagcttctgccagcagtgcagctttagtttcggactatgttggctatcttgaaaaggggcaaatccctcccaagcacatttctcttgtccattctcaagtttctttgagcattgaaggaagcaaatacacgattgacatggtacgaggaggacctggaagttacaaattgaaattgaatcaatcggagatagaagcggagatacacactttacgtgatggaggtttgctaatgcagttggatggaaacagtcatgtaatatatgcagaggaagaagcagctggaactcggcttttaatagatggaaggacttgcttgcttcagaatgatgacgatccatcaaagttaattggagagacaccgtgcaagcttctgagatatttggttgcggatgatagtcagattgatgcagacacaccatatgctgaagttgaggtcatgaagatgtgcatgcctcttctttcccctgcttctggaattattcatttcagaatggctgaaggtcaagccatgcaggctggtgaacttatagcaaagcttgatctagatgatggttctgcagtaaggaaggcagaacccttcactgggagcttccctatcctgggccctcctactgcaatttcaggtaaagttcatcagaaatgtgcagcaagcttaaacgctgcacggatgattcttgctggctatgagcacaacattgatgaagttgtggtcaaaagtttgctcaattgccttgacagccctgaactgcctttccttcaatggcaagagtgctttgcagttttggcaacccgtcttcccaaagatcttagaaacgagttggaagctaaatataaggagttcgaaattatttcaagctcccaaactattgatttccctgccaaattattgaaggcaatccttgaagctcatctttcctcctgtcctgaaaacgaaaaaggagccttagaaagactagttgaaccgctgacaagtcttgtaaagtcttatgagggtggaagagagagccatgctcataaaattgttcaatctctatttgaagagtatctttcagttgaagaactattcagtgataatatacaggctgatgtaattgaacgactccgtcttcaatacaagaaagatttgttgaagattgtagatattgtgctctctcatcagggtgtcaagagcaaaaacaagctgatactgcgactaatggataaactggtttaccctaatcctgctgcctatagggatcaattaatccgattctcccaactcaaccatatagtttattctgagttggctcttaaggcaagtcaactgttggagcaaactaaactcagtgaacttcgatccagcattgctagaagtctttctgaactagaaatgtttaccgaggatggtgaaaatattgatactccgaagaggaagagtgccattaatgacagaatggaggaccttgtgagcgctcctttggctgttgaagatgcccttgttggtttatttgatcacagcgatcacacccttcaaaggagagttgttgaaacttatatccgtaggctctatcagccatatcttgtcaaagatagcatcaggatgcagtggcacagatctggccttattgctacatgggaattcttagaagaatacgttgaacggaagaatggggttgaagacaaaacactggtggagaaacatagtgagaagaaatggggagtgatggttgtaattaaatctcttcagtttttgccagcaattatcagtgctgcattaagagaagcaaccaataactttcacgatcctcttaaaagtggttctggtgactcaagtaaccatggtaatatgatgcatattggattagtggggatcaacaaccaaatgagtttacttcaagacagtggtgatgaggatcaggctcaagaaagaattgataagttggccaaaatactcagagagcaggaaatagggtccataatacatgctgcaggtgttggagatattagctgtatcatacagagggatgaagggcgtgctccaatgaggcattcctttcactggtcatctgaaaagctatattatgtagaggaaccattgttgctccatcttgaacctcccctatccatttatcttgaactggacaagcttaagtgctatgaaaatattcgctatacaccatcccgagatcgtcaatggcacctctacacagttgtggataccaagccacaaccaattcaaagaatgtttcttcgaacacttatcagacagccaaccacaaatgaaggatactcttcttatcaaagactggatgcagaaacgtcccgtacccaattggctatgtcttatacttcaaggagcatttttaggtccctaatgggcgcaatggaggagttggaacttaactcacacaataccaccatcaaatctgaacatgctcatatgtacctctatatcatacgcgagcagcaaatagatgatcttgtgccttattccaagaaaattaacatagaagctggccaagaagaaacaacagttgaggcaatcttggaagaactggcacaggaaatccattcctctgttggtgtaagaatgcacagattaggcgttttcgtgtgggaaatcaagctctggattacagcatgtggacaggcaaatggtgcttggagggtcattgtaaacaatgtgactggtcatacatgcactgtacatatatatcgagagatggaggatgccaccactcataaagtggtctacagttcagtcactgtaaagggtccgttgcatggtgtaccggtgaatgaaaactatcaacctttgggaggtattgaccgaaaacgtcttgcagcgagaaagaacagcaccacatactgctatgatttcccccttgcatttcaaacatccttggaacagtcctggtcaatacagcagacaggaattcaaagagctaatgataaggatctcctaaaagtaacagagcttaaattttccgaaaaagctggtagttggggtacttctcttgttcctgcagagcgtcttcctggactcaatgatgttggcatggtagcctggttgatggaaatgtgtacgcctaaattcccatctggaaggacaatattggttgtttcaaacgatgtgaccttcaaggccgggtcttttggcccaagagaggatgcattctttagagcagtaactgatcttgcctgtgcaaagaaaatacctttaatttacttggcagcaaattctggtgcccgtttaggtgttgccgaggaagtcaaagcttgtttcaaagttggttggtctgaggaatctaaacctgaacatggttttcagtatgtatatttaacacctgaggattatgctcgaatcggatcatcagtgatggcacatgaattaaagcttgaaagtggagaaaccagatgggttatagataccattgttggcaaagaagatggactgggagttgaaaacttgagtggtagtggggccattgccggtgcctattcaagggcatacaaggaaacctttacattgacatatgttaccggtaggactgttggaattggtgcttatcttgctaggcttgggatgaggtgcatacagaggcttgatcaacctataattcttaccgggttttcagcattaaacaaacttcttggtagggaggtgtacagctctcacatgcaacttggtggaccgaaaatcatggcaacaaatggagtcgttcatctcacagtttcggacgaccttgaaggcgtttcttctattttgaagtggcttagctacgttccttctcatgtaggtggtgcacttcccattgtaaagccccttgatcccccagagagggaagtggagtatttaccggaaaattcatgcgatcctcgtgctgccatttccggaactctggatgttaatggaaagtggctgggaggcatttttgacaaggacagctttgtggagacactagaaggatgggctagaacagttgttacaggaagggcaaagcttggaggaatccctgtgggaattgttgcggtggaaacacaaacagttatgcaaataatacctgctgatccaggtcaacttgattctcacgagagggttgttcctcaagccgggcaggtgtggtttcctgattctgcgaccaagacggcccaagcgatattggatttcaacagagaagaactcccacttttcattatcgcaaactggagaggcttttcaggtggacaaagggacctttttgaaggaattcttcaggctggttcgactattgtggagaaccttaggacatacaaacagcccatatttgtatacattccaatgatgggtgaactccgaggcggggcttgggttgttgtcgacagccgaatcaactcagaccacattgaaatgtatgctgagcgaacggccaaaggtaacgtccttgagccggaaggaatgattgaaatcaaatttagaacaagagaattgttggagtgtatgagaagacttgatcaacaattgattaatttgaaggaaaaactttctgaagccaagagtaacaaggactatggtgcatatgattctctgcagcagcagattagattccgtgagaaacagcttttgcctttgtatactcagatagctacaaaatttgctgaactccatgatacttcattaagaatgaaagcaaagggtgtaatcagagaagttcttgattggcgtaagtcgcgttctgtcttctatcagagactgcacaggagaatcggtgagcactcactgatcaacatcgtgagagatgctgctggtgaccaattgtcatatgtttctgccatgaacttgctcaaagaatggtatctgaattctgatatcgccaaaggtagagaagatgcttggttggacgatgaagccttcttcagatggagggatgatccagcaaactacgaggataaactaaaggaattgcgcgtccagagactgttgcttcagttgacaaatattggcgactcggctctagatttacaagctctacctcaaggtcttgccgcccttttaagcaagttggaagcatcaagtcgcgataagttgatcagtgaacttcgcaaagtactcggttag

SEQ ID NO: 9985 - protein, 2257 aa, Medicago sativa
MASVGRGNGYLNSVLPSRHPATTTEVDEYCNALGGNKPIHSILIANNGMAAVKFIRSVRSWAYETFGTEKAILLVAMATPEDMRINAEHIRIADQFVEVPGGTNNNNYANVQLILEIAEITHVDAVWPGWGHASENPELPDALKAKGIVFLGPPAISMAALGDKIGSSLIAQAAEVPTLPWSGSHVKIPPESDLITIPDEIYRAACVYTTEEAIASCQVVGYPAMIKASWGGGGKGIRKVHNDDEVRALFKQVQGEVPGSPIFIMKVASQSRHLEVQLICDQHGNFAALHSRDCSVQRRHQKIIEEGPITVAPPETVKELEQAARRLAKSVNYVGAATVEYLYSMETGEYYFLELNPRLQVEHPVTEWIAEINLPAAQVAVGMGIPLWQIPEIRRFYGMEHGGGNDGWKKTSVLATPFDFDEAQSTKPKGHCVAVRVTSEDPDDGFTPTGGKVQELSFKSKPNVWAYFSVKSGGGIHEFSDSQFGHVFAFGESRALAIANMVLGLKEIQIRGEIRTNVDYTIDLLNASDYRDNKIHTGWLDSRIAMRVRAERPPWYLSVVGGALYKASASSAALVSDYVGYLEKGQIPPKHISLVHSQVSLSIEGSKYTIDMVRGGPGSYKLKLNQSEIEAEIHTLRDGGLLMQLDGNSHVIYAEEEAAGTRLLIDGRTCLLQNDDDPSKLIGETPCKLLRYLVADDSQIDADTPYAEVEVMKMCMPLLSPASGIIHFRMAEGQAMQAGELIAKLDLDDGSAVRKAEPFTGSFPILGPPTAISGKVHQKCAASLNAARMILAGYEHNIDEVVVKSLLNCLDSPELPFLQWQECFAVLATRLPKDLRNELEAKYKEFEIISSSQTIDFPAKLLKAILEAHLSSCPENEKGALERLVEPLTSLVKSYEGGRESHAHKIVQSLFEEYLSVEELFSDNIQADVIERLRLQYKKDLLKIVDIVLSHQGVKSKNKLILRLMDKLVYPNPAAYRDQLIRFSQLNHIVYSELALKASQLLEQTKLSELRSSIARSLSELEMFTEDGENIDTPKRKSAINDRMEDLVSAPLAVEDALVGLFDHSDHTLQRRVVETYIRRLYQPYLVKDSIRMQWHRSGLIATWEFLEEYVERKNGVEDKTLVEKHSEKKWGVMVVIKSLQFLPAIISAALREATNNFHDPLKSGSGDSSNHGNMMHIGLVGINNQMSLLQDSGDEDQAQERIDKLAKILREQEIGSIIHAAGVGDISCIIQRDEGRAPMRHSFHWSSEKLYYVEEPLLLHLEPPLSIYLELDKLKCYENIRYTPSRDRQWHLYTVVDTKPQPIQRMFLRTLIRQPTTNEGYSSYQRLDAETSRTQLAMSYTSRSIFRSLMGAMEELELNSHNTTIKSEHAHMYLYIIREQQIDDLVPYSKKINIEAGQEETTVEAILEELAQEIHSSVGVRMHRLGVFVWEIKLWITACGQANGAWRVIVNNVTGHTCTVHIYREMEDATTHKVVYSSVTVKGPLHGVPVNENYQPLGGIDRKRLAARKNSTTYCYDFPLAFQTSLEQSWSIQQTGIQRANDKDLLKVTELKFSEKAGSWGTSLVPAERLPGLNDVGMVAWLMEMCTPKFPSGRTILVVSNDVTFKAGSFGPREDAFFRAVTDLACAKKIPLIYLAANSGARLGVAEEVKACFKVGWSEESKPEHGFQYVYLTPEDYARIGSSVMAHELKLESGETRWVIDTIVGKEDGLGVENLSGSGAIAGAYSRAYKETFTLTYVTGRTVGIGAYLARLGMRCIQRLDQPIILTGFSALNKLLGREVYSSHMQLGGPKIMATNGVVHLTVSDDLEGVSSILKWLSYVPSHVGGALPIVKPLDPPEREVEYLPENSCDPRAAISGTLDVNGKWLGGIFDKDSFVETLEGWARTVVTGRAKLGGIPVGIVAVETQTVMQIIPADPGQLDSHERVVPQAGQVWFPDSATKTAQAILDFNREELPLFIIANWRGFSGGQRDLFEGILQAGSTIVENLRTYKQPIFVYIPMMGELRGGAWVVVDSRINSDHIEMYAERTAKGNVLEPEGMIEIKFRTRELLECMRRLDQQLINLKEKLSEAKSNKDYGAYDSLQQQIRFREKQLLPLYTQIATKFAELHDTSLRMKAKGVIREVLDWRKSRSVFYQRLHRRIGEHSLINIVRDAAGDQLSYVSAMNLLKEWYLNSDIAKGREDAWLDDEAFFRWRDDPANYEDKLKELRVQRLLLQLTNIGDSALDLQALPQGLAALLSKLEASSRDKLISELRKVLG

SEQ ID NO: 9986 - DNA, 1921 bp, Nicotiana tabacum
  CDS (85)..(1695)
ctagctccgccctctctctttctctctgtcaaagtaaatagttcttggcaggaatacaggaattagattacattgatcaggaaaatggactcggcagccctgactagcgtttgtggcaaatctgctcttcgcttcactccgggtttatttctggggagaacgaatggtattaggagctcgcagtgtagctttatggcaggaaaccggataaactttccgcggcagagagctcaagcatatagagttagtactaaatctagcacacgtggtggtgctcttgctgcaacatgtcgcgccgagaagattctggtggcaaatcgaggagaaattgctgttcgtgtgattcgaactgcccatgagatgggaattccttgtgttgctgtttattcgaccatagacaaagatgccttacatgtgaagctagctgatgaatctgtttgcattggtgaagcaccaagcaatcaatcgtatttagtgatcccaaatgtcttatctgctgctatcagtcgtggatgtacaatgttgcatcctggatatggtttccttgctgagaatgcagtttttgttgagatgtgcagagaacatggaatcaactttattgggccaaatccagacagtattagagtcatgggtgacaaatccactgccagagatacaatgaagaatgctggtgttccaactgtgccaggaagtgatggactattacagagcactgaagaaggtgtaaggcttgctgaggagattggttaccctgtgatgattaaggcaacagctggtggtggtggacgtggaatgcgtcttgctaaagaacctgatgagtttgtaaaattattacagcaagctaaaagtgaagcagctgctgcatttggaaatgatggcgtttatctggagaagtacgtccaaaatcctaggcacattgaatttcaggttttggcggacaagtatggtaatgttgtacactttggagagcgtgattgcagtattcagagaaggaaccagaagttgctggaggaagcaccttcccctgcattaacaccagagctaaggaacgccatgggtgacgcagctgttgcggcagcagcatccataggttacattggtgttggtaccgtggagttcctattggatgagagagggtccttttacttcatggaaatgaacactcgtattcaggtagagcatccagtgacagaaatgatatcctctgttgatctgatagaggaacagatccgtgtggctatgggagaaaagctccgatacaaacaggaggatattgtgcttagaggacattcaattgaatgccgtataaatgcagaagatgctttcaaaaatttcagacccggaccagggagaatcactgcctatttaccagctggaggtccatttgtgcgtatggataaccacgtttatcctgactatgtggttccacctagcgacgattccctgctaggaaagctcatcgtatgggctccaacacgcgagggggctattgaacgcatgaaaagagcacttaatgacaccataattactggagttcctaccacaatagaatatcataagctcatcctcgatattgaggactttaagaatggaaagtttgatccttcttttattcccaagcatggaggagaattagctcccccccacaaaatggttccagcagctaccaaggagatggtcaatgctagtgcttaattcttcctctttttttttttttttttttctttgatatttttcctttacccttgtcggcgaatagtgaaagcagattgctcccattggatcttgaggtgactgcagttctggatataacattcatctctttgatcttagcttgaatgtatttttagatacactagactgaatgaaattctttttttggtatatgatgctcaatcgaatctgtgttaaatggcaaaag

SEQ ID NO: 9987 - protein, 536 aa, Nicotiana tabacum
MDSAALTSVCGKSALRFTPGLFLGRTNGIRSSQCSFMAGNRINFPRQRAQAYRVSTKSSTRGGALAATCRAEKILVANRGEIAVRVIRTAHEMGIPCVAVYSTIDKDALHVKLADESVCIGEAPSNQSYLVIPNVLSAAISRGCTMLHPGYGFLAENAVFVEMCREHGINFIGPNPDSIRVMGDKSTARDTMKNAGVPTVPGSDGLLQSTEEGVRLAEEIGYPVMIKATAGGGGRGMRLAKEPDEFVKLLQQAKSEAAAAFGNDGVYLEKYVQNPRHIEFQVLADKYGNVVHFGERDCSIQRRNQKLLEEAPSPALTPELRNAMGDAAVAAAASIGYIGVGTVEFLLDERGSFYFMEMNTRIQVEHPVTEMISSVDLIEEQIRVAMGEKLRYKQEDIVLRGHSIECRINAEDAFKNFRPGPGRITAYLPAGGPFVRMDNHVYPDYVVPPSDDSLLGKLIVWAPTREGAIERMKRALNDTIITGVPTTIEYHKLILDIEDFKNGKFDPSFIPKHGGELAPPHKMVPAATKEMVNASA

SEQ ID NO: 9988 - DNA, 6774 bp, Triticum aestivum
  CDS (1)..(6774)
atggtggaatctgaccagataaacgggaggatgtcctcggtcgacgagttctgtaaagcgctcgggggcgactcgccgatacacagcgtgctggttgccaacaatgggatggctgcggtcaagttcatgcgcagcatccgcacctgggccttggagacctttgggaacgagaaggccattctcttggtggctatggcaactccagaggacctcaggattaatgcggagcacataagaatcgccgaccagttcttagaagttcctggtgggacgaataacaacaactatgcaaatgtacagctcatagtggagatagcagagagaactcgggtttctgcagtttggcctggctggggtcatgcttctgagaacccagaacttccagacgcgctcatggaaaagggaatcatttttcttgggccaccatcagccgcgatgggggcactaggcgataagattggttcttctcttattgcacaagcagcaggagttccaactcttccatggagcgggtcacatgtgaaagttccgcaagaaacctgccactcaatacctgaggagatctataagaacgcttgtgtttcaactacagacgaagcagtcgctagttgtcaggtggtggggtatcctgcaatgatcaaggcatcatggggtgggggtggtaaaggaataaggaaggtacacaatgatgatgaggtcagagcattgtttaagcaagtgcaaggagaggtccccggatcgcctatatttattatgaaggtggcatctcagagccgacatctagaggttcagttgctctgtgacaagcatggcaacgtggcagcactgcacagtcgagactgtagtgttcaaagaaggcaccaaaagatcattgaggagggaccaattacagttgctcctccagaaacaattaaagagcttgagcaggcggcaaggcgactagctaaatgtgtgcaatatcagggtgctgctacagtggaatatctgtacagcatggaaacaggcgaatactatttcctggagcttaatccaaggttgcaggtagaacaccctgtgaccgaatggattgctgaaattaacttacctgcatctcaagttgtagtaggaatgggcataccactctacaatattccagagatcagacgcttttatggaatagaacatggaggtggctatcacgcttggaaggaaatatcagctgtagcaactaaatttgatttggacaaagcacagtctgtaaagccaaagggtcattgtgtagcagttagagttactagcgaggatccagatgatgggtttaagcctaccagtggaagagtggaagagctgaactttaaaagcaaacccaatgtttgggcctacttctccgttaagtccggaggtgcaattcatgagttctctgattcccagtttggtcatgtttttgcttttggggaatctaggtcattggcaatagccaatatggtacttgggttaaaagagatccaaattcgtggagagatacgcactaatgttgactacactgtggatctcttgaatgctgcagagtaccgagaaaataagattcacactggttggctagacagcagaatagctatgcgtgttagagcagagaggcccccatggtacctttcagttgttggtggagctctatatgaagcatcaagcaggagctcgagcgttgtaaccgattatgttggttatctcagtaaaggtcaaataccaccaaagcacatctctcttgtcaatttgactgtgacactgaatatagatgggggcaaatatacgattgagacagtacgaggtggaccccgtagctacaaattaagaattaatgaatcagaggttgaagcagagatacattctctgcgagatggcggactcttaatgcagttggatggaaacagtcatgtaatttacgccgagacagaagctgctggcacgcgccttctaatcaatgggagaacatgcttattacagaaagagcatgatccttccaggttgttggctgatacaccgtgcaaacttcttcggtttttggtcgcggatggttctcatgtggttgctgatacgccatatgctgaggtggaggttatgaaaatgtgcatgccactgttactaccggcctctggtgtcattcactttgtcatgcctgagggtcaggccatgcaggcaagtgatctgatagcaaggttggatcttgatgacccatcttctgtgagaagagctgaaccatttcatggcacctttccaaaacttggacctcctactgctatttctggcaaagttcaccaaaagtttgctgcaagtgtgaattctgcccacatgatccttgcaggatatgaacataacatcaatcatgttgtacaagatttgctaaactgcctagacagccctgagctccctttcctacagtggcaagaactcatgtccgttttggcaacccgactcccgaaagatcttaggaatgagttggatgctaagtacaaggagtatgagttgaatgctgacttccggaagagcaaggatttccctgccaagttgctaaggggagtcattgaggctaatcttgcatactgttccgagaaggatagggttactagtgagaggcttgtagagccacttatgagcctggtcaagtcatatgagggtggaagagaaagccatgctcgtgcggttgtcaagtctctgtttgaggagtatttatctgttgaagaactcttcagcgatgacattcagtctgatgtgatagaacgtctacgacttcaacatgcaaaagaccttgagaaggtcgtatatattgtgttctcccaccagggcgtgaaaagtaaaaataaattaatacttcggcttatggaagcattggtctatccaaatccatctgcgtacagggaccagttgattcgcttttctgcccttaaccatacagcatactctgggctggcgcttaaagcaagccaacttcttgagcacactaaattgagtgaactccgcacaagcatagcaagaagcctttcagagctggagatgtttactgaggaaggagagcggatttcaacacctaggaggaagatggctatcaatgaaaggatggaagatttagtatgtgccccggttgcagttgaagacgcccttgtggctttgtttgatcacagtgatcctactcttcagcggagagttgttgagacatacatacgcagattgtatcagcattatcttgtaaggggcagtgtccggatgcaatggcacaggtctggtctaattgctttatgggaattctctgaggaacatattgaacaaagaaatgggcaatctgcgtcacttctaaagccacaagtagaggatccaattggcaggcgatggggtgtaatggttgtaatcaagtctcttcagcttctgtcaactgcaattgaagctgcattaaaggagacttcacattacggagcaggtgttggaggtgtctcaaatggtaatcctataaattctaacagtagcaatatgctgcatattgctttggttggtatcaacaatcagatgagcactcttcaagacagtggtgatgaggatcaagcgcaagaaaggatcaacaaactctccaagattttgaaggataacactataacatcacatctcaatggtgctggtgttagggttgtcagctgcattatccaaagagatgaagggcgttcaccaatgcgccactccttcaaatggtcatctgacaagttatattatgaggaggacccgatgctccgccatgtggaacctcctttgtccaccttccttgaattggacaaagtgaatttagaaggttacaatgacgcgaaatacaccccatcacgtgatcgccagtggcacatgtacacactagtaaagaacaagaaagatccgagatcaaatgaccaaaggatgtttcttcgtaccatagtcagacagccaagtgtgaccaatgggtttttgtttggaagtattgataatgaagttcaagcctcatcatcattcacatctaacagcatactcagatcattgatggcagcgctagaagaaatagagttgcgcgctcacagtgagactgggatgtcaggccactcccacatgtatctgtgcataatgagagaacagcggttgtttgatctaattccatcttcaaggatgacgaatgaagttggtcaagatgagaagacagcatgcacattattgaagcatatgggtatgatatatatgagcatgtggtgtcaggatgcatcgctttctgtgtgccagtgggaagtgaagctatggttggattgtgatgggcaggctaatggtgcttggagagttgttgttaccagtgtaactgggcatacctgcactgttgatatttaccgagaagtggaggaccccaatacacatcagcttttctaccgctctgccacacccacagctggtcctttgcatggcattgcattgcatgagccatacaaacctttggatgctattgacctgaaacgtgccgctgctaggaaaaatgaaaccacatactgctatgatttcccattggcatttgaaacagcattgaagaagtcatgggaatctggtatttcacatgttgcagaatctaacgagcataaccagcggtatgctgaagtgacagagcttatatttgctgattcaactggatcatggggtactcctttggttccagttgagcgtcctccaggtagcaacaattttggtgttgttgcttggaacatgaagctctccacaccagaatttccaggcggccgggagattatagttgttgcaaatgatgtgacatttaaagctgggtcttttggtcctagagaagatgcattctttgatgctgtcaccaatcttgcttgtgagaggaaaattcctctaatttacttgtcagcaactgctggtgctaggctcggtgtagcagaggaaataaaggcgtgcttccatgttggatggtctgatgaccagagccctgaacgtggttttcactacatttacctcactgaacaagattattcacgtctaagctcttcagttatagcccatgagctaaaagtaccggaaagcggagaaaccagatgggttgttgataccattgttgggaaagaggacggacttggttgtgagaatctacatggaagtggtgccattgccagtgcctactctaaggcatacagagagacctttactctgacatttgtgactgggcgagctattggaattggggcttatcttgctcggttaggaatgcggtgtatacaacgtcttgatcaaccaattattttgactgggtattctgcactgaacaagctcctggggcgcgaggtgtatagctctcagatgcaactgggtggccccaaaatcatggctacaaatggagttgtccatctcactgtgtcagatgatcttgaaggtgtttctgctatcttgaaatggctcagctatgttcctccctatgttggcggtcctcttcctattgtgaaatctcttgatccaccagagagagctgtaacatatttcccagagaattcatgtgatgcccgtgccgccatctgtggcatccaggacactcaaggaggcaagtggttggatggtatgtttgacagagaaagctttgtggaaacattagaaggatgggccaaaactgttattactggaagggcaaagctaggtgggattccagttggtatcatagctgtggaaaccgagacagtgatgcaagtaatccctgctgaccctggtcagcttgattctgccgagcgtgtagtccctcaagctggacaggtgtggttcccagattcggccgcaaaaacgggccaggcactgctggatttcaaccgtgaagagctcccattgttcatacttgctaactggagaggcttttctggtgggcaaagggatctgtttgaaggaatccttcaggctggctctatgattgttgagaatctgaggacgtataagcagcctgcttttgtgtacataccaaaggctggagagctgcgtggaggtgcatgggttgtggtggacagcaagatcaatcctgagcacattgagatgtatgccgagaggactgcgagagggaatgtccttgaggcaccaggactcattgagatcaagttcaagccaaatgaactggaagagagtatgctaaggcttgaccctgagttgatcagcctcaatgccaaactcctcaaagaaactagtgctagccctagtccttgggaaacggcggcggcggcggagaccatcaggaggagcatggctgctcggaggaagcagctgatgcccatatatactcaggttgccacccggtttgctgagttgcacgacacctctgcgagaatggctgccaaaggcgtgatcagtaaggtggtggactgggaggagtcccgagccttcttctacaggagactgcgaaggaggcttgccgaggactcgctcgccaaacaagtcagagaagccgccggcgagcagcagatgcccactcacagatcggccttggaatgcatcaagaaatggtacctggcctctcagggaggagacggcgagaagtggggagacgatgaagccttcttcgcctggaaagatgatcctgacaagtatggcaagtatcttgaggagctgaaagccgagagagcgtctacactgctgtcgcatctcgctgaaacctctgatgccaaggccttgcccaacggtctatcgctcctcctcagcaaaatggatcctgcaaagagggagcaggttatggatggcctcaggcagcttcttggttga

SEQ ID NO: 9989 - protein, 2257 aa, Triticum aestivum
MVESDQINGRMSSVDEFCKALGGDSPIHSVLVANNGMAAVKFMRSIRTWALETFGNEKAILLVAMATPEDLRINAEHIRIADQFLEVPGGTNNNNYANVQLIVEIAERTRVSAVWPGWGHASENPELPDALMEKGIIFLGPPSAAMGALGDKIGSSLIAQAAGVPTLPWSGSHVKVPQETCHSIPEEIYKNACVSTTDEAVASCQVVGYPAMIKASWGGGGKGIRKVHNDDEVRALFKQVQGEVPGSPIFIMKVASQSRHLEVQLLCDKHGNVAALHSRDCSVQRRHQKIIEEGPITVAPPETIKELEQAARRLAKCVQYQGAATVEYLYSMETGEYYFLELNPRLQVEHPVTEWIAEINLPASQVVVGMGIPLYNIPEIRRFYGIEHGGGYHAWKEISAVATKFDLDKAQSVKPKGHCVAVRVTSEDPDDGFKPTSGRVEELNFKSKPNVWAYFSVKSGGAIHEFSDSQFGHVFAFGESRSLAIANMVLGLKEIQIRGEIRTNVDYTVDLLNAAEYRENKIHTGWLDSRIAMRVRAERPPWYLSVVGGALYEASSRSSSVVTDYVGYLSKGQIPPKHISLVNLTVTLNIDGGKYTIETVRGGPRSYKLRINESEVEAEIHSLRDGGLLMQLDGNSHVIYAETEAAGTRLLINGRTCLLQKEHDPSRLLADTPCKLLRFLVADGSHVVADTPYAEVEVMKMCMPLLLPASGVIHFVMPEGQAMQASDLIARLDLDDPSSVRRAEPFHGTFPKLGPPTAISGKVHQKFAASVNSAHMILAGYEHNINHVVQDLLNCLDSPELPFLQWQELMSVLATRLPKDLRNELDAKYKEYELNADFRKSKDFPAKLLRGVIEANLAYCSEKDRVTSERLVEPLMSLVKSYEGGRESHARAVVKSLFEEYLSVEELFSDDIQSDVIERLRLQHAKDLEKVVYIVFSHQGVKSKNKLILRLMEALVYPNPSAYRDQLIRFSALNHTAYSGLALKASQLLEHTKLSELRTSIARSLSELEMFTEEGERISTPRRKMAINERMEDLVCAPVAVEDALVALFDHSDPTLQRRVVETYIRRLYQHYLVRGSVRMQWHRSGLIALWEFSEEHIEQRNGQSASLLKPQVEDPIGRRWGVMVVIKSLQLLSTAIEAALKETSHYGAGVGGVSNGNPINSNSSNMLHIALVGINNQMSTLQDSGDEDQAQERINKLSKILKDNTITSHLNGAGVRVVSCIIQRDEGRSPMRHSFKWSSDKLYYEEDPMLRHVEPPLSTFLELDKVNLEGYNDAKYTPSRDRQWHMYTLVKNKKDPRSNDQRMFLRTIVRQPSVTNGFLFGSIDNEVQASSSFTSNSILRSLMAALEEIELRAHSETGMSGHSHMYLCIMREQRLFDLIPSSRMTNEVGQDEKTACTLLKHMGMIYMSMWCQDASLSVCQWEVKLWLDCDGQANGAWRVVVTSVTGHTCTVDIYREVEDPNTHQLFYRSATPTAGPLHGIALHEPYKPLDAIDLKRAAARKNETTYCYDFPLAFETALKKSWESGISHVAESNEHNQRYAEVTELIFADSTGSWGTPLVPVERPPGSNNFGVVAWNMKLSTPEFPGGREIIVVANDVTFKAGSFGPREDAFFDAVTNLACERKIPLIYLSATAGARLGVAEEIKACFHVGWSDDQSPERGFHYIYLTEQDYSRLSSSVIAHELKVPESGETRWVVDTIVGKEDGLGCENLHGSGAIASAYSKAYRETFTLTFVTGRAIGIGAYLARLGMRCIQRLDQPIILTGYSALNKLLGREVYSSQMQLGGPKIMATNGVVHLTVSDDLEGVSAILKWLSYVPPYVGGPLPIVKSLDPPERAVTYFPENSCDARAAICGIQDTQGGKWLDGMFDRESFVETLEGWAKTVITGRAKLGGIPVGIIAVETETVMQVIPADPGQLDSAERVVPQAGQVWFPDSAAKTGQALLDFNREELPLFILANWRGFSGGQRDLFEGILQAGSMIVENLRTYKQPAFVYIPKAGELRGGAWVVVDSKINPEHIEMYAERTARGNVLEAPGLIEIKFKPNELEESMLRLDPELISLNAKLLKETSASPSPWETAAAAETIRRSMAARRKQLMPIYTQVATRFAELHDTSARMAAKGVISKVVDWEESRAFFYRRLRRRLAEDSLAKQVREAAGEQQMPTHRSALECIKKWYLASQGGDGEKWGDDEAFFAWKDDPDKYGKYLEELKAERASTLLSHLAETSDAKALPNGLSLLLSKMDPAKREQVMDGLRQLLG

SEQ ID NO: 9990 - DNA, 6783 bp, Triticum aestivum
  CDS (1)..(6783)
  misc_feature (5664)..(5664): y is t or c
  misc_feature (5787)..(5787): k is g or t
  misc_feature (5823)..(5823): r is g or a
  misc_feature (5938)..(5938): y is t or c
  misc_feature (5967)..(5967): y is t or c
atggtggaatctgaccaaataaacgggacgcccaacaggatgtcctcggtcgatgaattctgtaaagcgctcgggggtgactcgccgatacacagcgtgctggttgccaacaatgggatggctgcggtcaaattcatgcgcagcatccgcacctgggccttggagacctttgggaacgagaaggccattctcttggtggctatggcaactccagaggacctcaggataaatgcggagcacataagaatcgccgaccagttcttagaagttcctggtggaacgaacaataacaactatgcaaatgtacagctcatagtggagatagcagagagaactcgggtttctgcagtttggcctggctggggtcatgcttctgagaacccagaacttccagacgcgctcatggaaaagggaatcatttttcttgggccaccatcagccgcgatgggggcactaggcgataagattggttcttctcttattgcacaagcagcaggagttccaactcttccatggagcgggtcacatgtgaaagttccgcaagaaacctgccactcaatacctgaggagatctataagaacgcttgtgtttcaactacagacgaagcagttgctagttgtcaggtggtggggtatcctgcaatgatcaaggcatcatggggcgggggtggtaaaggaataaggaaggtacataatgatgatgaggtcagagcattgtttaagcaagtgcaaggagaagtccccggatcgcctatatttattatgaaggtggcatctcagagccgacatctagaggttcagttgctctgtgacaagcatggcaacgtggcagcactgcacagtcgagactgtagtgttcaaagaaggcaccaaaagatcattgaggagggaccaattacagttgctcctccagaaacaattaaagagcttgagcaggcagcaaggcggcttgctaaatgtgtgcaatatcagggtgctgctacagtagaatatctgtacagcatggaaacaggcgaatactatttcctggagcttaatccaaggttgcaggtagaacaccctgtgaccgaatggattgctgaaataaacttacctgcatctcaagttgtagtaggaatgggcataccactctacaacattccagagatcagacgcttttatggaatagaacatggaggtggctatcacgcttggaaggaaatatcagctgttgcaactaaatttgatctggacaaagcacagtctgtaaagccaaagggtcattgtgtagcagttagagttactagcgaggatccagatgatgggtttaagcctacaagtggaagagtggaagagctgaactttaaaagtaaacccaatgtttgggcctatttctctgttaagtccggaggtgcaattcatgagttctctgattcccagtttggtcatgtttttgcttttggggaatctaggtcattggcaatagccaatatggtacttgggttaaaagagatccaaattcgtggagagatacgcactaatgttgactacactgtggatctcttgaatgctgcagagtaccgagaaaataagattcacactggttggctagacagcagaatagcaatgcgtgttagagcagagaggcccccatggtacctttcagttgttggtggagctctatatgaagcatcaagcaggagctcgagtgttgtaaccgattatgttggttatctcagtaaaggtcaaataccaccaaagcacatctctcttgtcaatttgactgtaacactgaatatagatgggagcaaatatacgattgagacagtacgaggtggaccccgtagctacaaattaagaattaatgaatcagaggttgaagcagagatacattcgctgcgagatggcggactcttaatgcagttggatggaaacagtcatgtaatttacgccgagacagaagctgctggcacgcgtcttctaatcaatgggagaacatgcttattacagaaagagcatgatccttccaggttgttggctgatacaccatgcaagcttcttcggtttttggtcgcggatggttctcatgtggttgctgatacgccatatgctgaggtggaggtgatgaaaatgtgcatgccactgttactaccggcctctggtgtcattcactttgtcatgcctgagggtcaggccatgcaggcgagtgatctgatagcaaggttggatcttgatgacccatcttctgtgagaagggctgaaccatttcatggcacctttccaaaacttggacctcctactgctatttctggcaaagttcaccaaaagtttgctgcaagtgtgaattctgcccacatgatccttgcaggatatgaacataacatcaatcatgttgtacaagatttgctgaactgcctagacagccctgagctccctttcctgcagtggcaagaactcatgtccgttttggcaacccgactcccgaaagatcttaggaatgagttggatgctaagtacaaggagtatgagttgaatgctgacttccggaagagcaaggatttccctgccaagttgctaaggggagtcattgaggctaatcttgcatactgttccgagaaagatagggtcactagtgagaggcttgtagagccacttatgagtctggtcaagtcatatgagggtggaagagaaagccatgctcgtgcggttgtcaagtctctgtttgaggagtatttatctgttgaagaactcttcagcgatgacattcagtctgatgtgatagaacgtctacgacttcaacatgcaaaagaccttgagaaggtcgtatatattgtgttctcccaccagggtgtgaaaagtaaaaataaattaatactacggcttatggaagcattggtctatccaaatccatctgcatacagggaccagttgattcgcttctctgccctgaaccatacagcatactcggggctggcgcttaaagcaagccaacttcttgagcacaccaaattgagtgaactccgcacaagcatagcaagaagcctttcagagctggagatgtttactgaggaaggagagcggatttcaacacctaggaggaagatggctatcaatgaaaggatggaagatttagtatgtgcaccggttgcagttgaagacgcccttgtggctttgtttgatcacagtgatcctactcttcagcggagagtagtcgagacatacatacgcagattgtatcagcattatcttgcaaggggcagcgtccggatgcaatggcataggtctggtctaattgctttatgggaattctctgaagagcatattgaacaaagaaatgggcaatctgcgtcacttctaaagccacaagtagaggatccaattggcaggcgatggggtgtaatggttgtaatcaagtctcttcagcttctgtcaactgcaattgaagctgcattaaaggagacttcacactacggagcaggtgttggaagtgtctcaaatggtaatcctataaatttgaacggcagcaatatgctgcacattgctctggttggtatcaacaatcagatgagcactcttcaagacagtggtgatgaggatcaagcgcaagaaaggatcaacaaactctccaagattttgaaggataacactataacatcacatctcaatggtgctggtgttagggttgtcagctgcattatccaaagagatgaagggcgttcaccaatgcgccactccttcaaatggtcatctgacaagttatattatgaggaggacccgatgctccgccatgtggaatctcctttgtccaccttccttgaattggacaaagtgaatttagaaggttacaatgacgcgaaatacaccccatcacgtgatcgccagtggcacatgtacacactagtaaagaacaagaaagatccgagatcaaatgaccaaaggatgtttcttcgtaccatagtcagacagccaagtgtgaccaatgggtttttgtttggaagtattgataatgaagttcaagcctcgtcatcattcacatctaacagcatactcagatcattgatggcagctctagaagaaatagagttgcgtgctcacagtgagactgggatgtcaggccactcccacatgtatctgtgcataatgagagaacaacggttgtttgatctaattccatcttcaaggatgacgaatgaagttggtcaagatgagaagacagcatgcacactattgaagcatatggttatgaatatatatgagcatgttggtgtcaggatgcatcgcctttccgtgtgccagtgggaagtgaagctatggttggattgtgatgggcaggctaatggtgcttggagagttgttgttaccagtgtaactggcaatacctgcactgttgatatttaccgagaagtggaggaccccaatacacataagcttttctatcgctctgccacacccacagctggtcctttgcatggcattgcattgcatgagccatacaaacctttggatgctattgacctgaaacgtgccgctgctaggaaaaatgaaaccacatactgctatgatttcccattggcatttgaaacagcattgaagaagtcatgggaatctggtatttcacatgttgcagaatctaatgagcataaccagcggtatgctgaagtgacagagcttatatttgctgattcaactggatcatggggtactcctttggttccagttgagcgtcctccaggtagcaacaattttggtgttgttgcttggaacatgaagctctccacaccagaatttccaggtggccgggagattatagttgttgcaaatgatgtgacatttaaagctgggtcttttggtcctagagaagatgcattctttgatgctgtcacaaatcttgcttgtgagaggaaaattcctctaatctacttgtcagcaactgctggtgcaaggctcggtgtagcagaggaaataaaggcatgcttccatgttggatggtctgatgaccagagccctgaacgtggttttcactacatttacctcactgaacaagattattcacgtctaagctcttcagttatagcccatgagctaaaagtaccagaaagcggagaaaccagatgggttgttgataccattgttgggaaagaggacggacttggttgtgagaatctacatggaagtggtgccattgccagtgcctactctaaggcatatagagagacatttactctgacatttgtgactggccgagctattggaattggggcctatcttgctcggttaggaatgcggtgtatacaacgtcttgatcaaccaattattttgactgggtattctgcactgaacaagctcctggggcgcgaggtttatagctctcagatgcaactgggtggccccaaaatcatggctacaaatggagttgttcatctcactgtgtcagatgatcttgaaggtgtttctgctatcttgaaatggctcagctatgttcctccctatgttggtggtcctcttcctattgtaaaatctcttgatccaccagagagagctgtaacatactttccagagaattcatgtgatgcccgtgctgccatctgtggcattcaggacactcaaggcaagtggttgagtggtatgtttgacagagaaagctttgtggaaacgttagaaggatgggccaaaactgttattacyggaagggcaaagctgggtgggattccagttggtatcatagctgtggaaaccgagacagtgatgcaagtaatccctgctgaccctggtcagcttgattctgccgagcgtgtagtccctcaagckggacaggtgtggttcccagattcggccgcaaaaacrgcccaggcactgctggatttcaaccgtgaagagctcccgttgttcatacttgctaactggagaggcttttctggtgggcaaagggatctgtttgaaggaatccttcaggctggtyctatgattgttgagaatctgaggacgtayaagcagcctgcttttgtgtacataccaaaggctggagagctgcgtggaggtgcatgggttgtggtggacagcaagatcaatccggagcacattgagatgtatgccgagaggactgcgagagggaatgtccttgaggcaccgggactcattgagatcaaattcaagccaaatgaattggaagagagtatgctagggctggaccctgagttgatcagcctcaatgctaaactcctcaaagaaactagtgctagccctagcccttgggaaacggcggcggcggcagagaccatcaggaggagcatggctgctcggaggaagcagctgatgcccatatatactcaggttgccacccggtttgctgagttgcacgacacctccgcaagaatggctgccaaaggcgtgatcagtaaggtggtggactgggaggagtcccgggccttcttctacaggagactgcgaaggaggcttgccgaggactcgctcgccaaacaagtcagagaagccgccggcgagcagcagatgcccactcacagatcagccttggagtgcatcaggaaatggtacctggcctctcaaggaggagacggcgagaagtggggcgatgatgaagccttcttcacctggaaagatgatcctgacaagtatggcaagtatcttgaggagctgaaagccgagagagcgtctacactgctgtcgcatctcgctgaaacctcggacgccaaggccttgcccaacggtctctcgctcctcctcagcaaaatggatcctgcaaagagggagcaggttatggatggcctcaggcagcttcttggttga

SEQ ID NO: 9991 - protein, 2260 aa, Triticum aestivum
  misc_feature (1980)..(1980): The Xaa at location 1980 stands for Pro, or Ser.
MVESDQINGTPNRMSSVDEFCKALGGDSPIHSVLVANNGMAAVKFMRSIRTWALETFGNEKAILLVAMATPEDLRINAEHIRIADQFLEVPGGTNNNNYANVQLIVEIAERTRVSAVWPGWGHASENPELPDALMEKGIIFLGPPSAAMGALGDKIGSSLIAQAAGVPTLPWSGSHVKVPQETCHSIPEEIYKNACVSTTDEAVASCQVVGYPAMIKASWGGGGKGIRKVHNDDEVRALFKQVQGEVPGSPIFIMKVASQSRHLEVQLLCDKHGNVAALHSRDCSVQRRHQKIIEEGPITVAPPETIKELEQAARRLAKCVQYQGAATVEYLYSMETGEYYFLELNPRLQVEHPVTEWIAEINLPASQVVVGMGIPLYNIPEIRRFYGIEHGGGYHAWKEISAVATKFDLDKAQSVKPKGHCVAVRVTSEDPDDGFKPTSGRVEELNFKSKPNVWAYFSVKSGGAIHEFSDSQFGHVFAFGESRSLAIANMVLGLKEIQIRGEIRTNVDYTVDLLNAAEYRENKIHTGWLDSRIAMRVRAERPPWYLSVVGGALYEASSRSSSVVTDYVGYLSKGQIPPKHISLVNLTVTLNIDGSKYTIETVRGGPRSYKLRINESEVEAEIHSLRDGGLLMQLDGNSHVIYAETEAAGTRLLINGRTCLLQKEHDPSRLLADTPCKLLRFLVADGSHVVADTPYAEVEVMKMCMPLLLPASGVIHFVMPEGQAMQASDLIARLDLDDPSSVRRAEPFHGTFPKLGPPTAISGKVHQKFAASVNSAHMILAGYEHNINHVVQDLLNCLDSPELPFLQWQELMSVLATRLPKDLRNELDAKYKEYELNADFRKSKDFPAKLLRGVIEANLAYCSEKDRVTSERLVEPLMSLVKSYEGGRESHARAVVKSLFEEYLSVEELFSDDIQSDVIERLRLQHAKDLEKVVYIVFSHQGVKSKNKLILRLMEALVYPNPSAYRDQLIRFSALNHTAYSGLALKASQLLEHTKLSELRTSIARSLSELEMFTEEGERISTPRRKMAINERMEDLVCAPVAVEDALVALFDHSDPTLQRRVVETYIRRLYQHYLARGSVRMQWHRSGLIALWEFSEEHIEQRNGQSASLLKPQVEDPIGRRWGVMVVIKSLQLLSTAIEAALKETSHYGAGVGSVSNGNPINLNGSNMLHIALVGINNQMSTLQDSGDEDQAQERINKLSKILKDNTITSHLNGAGVRVVSCIIQRDEGRSPMRHSFKWSSDKLYYEEDPMLRHVESPLSTFLELDKVNLEGYNDAKYTPSRDRQWHMYTLVKNKKDPRSNDQRMFLRTIVRQPSVTNGFLFGSIDNEVQASSSFTSNSILRSLMAALEEIELRAHSETGMSGHSHMYLCIMREQRLFDLIPSSRMTNEVGQDEKTACTLLKHMVMNIYEHVGVRMHRLSVCQWEVKLWLDCDGQANGAWRVVVTSVTGNTCTVDIYREVEDPNTHKLFYRSATPTAGPLHGIALHEPYKPLDAIDLKRAAARKNETTYCYDFPLAFETALKKSWESGISHVAESNEHNQRYAEVTELIFADSTGSWGTPLVPVERPPGSNNFGVVAWNMKLSTPEFPGGREIIVVANDVTFKAGSFGPREDAFFDAVTNLACERKIPLIYLSATAGARLGVAEEIKACFHVGWSDDQSPERGFHYIYLTEQDYSRLSSSVIAHELKVPESGETRWVVDTIVGKEDGLGCENLHGSGAIASAYSKAYRETFTLTFVTGRAIGIGAYLARLGMRCIQRLDQPIILTGYSALNKLLGREVYSSQMQLGGPKIMATNGVVHLTVSDDLEGVSAILKWLSYVPPYVGGPLPIVKSLDPPERAVTYFPENSCDARAAICGIQDTQGKWLSGMFDRESFVETLEGWAKTVITGRAKLGGIPVGIIAVETETVMQVIPADPGQLDSAERVVPQAGQVWFPDSAAKTAQALLDFNREELPLFILANWRGFSGGQRDLFEGILQAGXMIVENLRTYKQPAFVYIPKAGELRGGAWVVVDSKINPEHIEMYAERTARGNVLEAPGLIEIKFKPNELEESMLGLDPELISLNAKLLKETSASPSPWETAAAAETIRRSMAARRKQLMPIYTQVATRFAELHDTSARMAAKGVISKVVDWEESRAFFYRRLRRRLAEDSLAKQVREAAGEQQMPTHRSALECIRKWYLASQGGDGEKWGDDEAFFTWKDDPDKYGKYLEELKAERASTLLSHLAETSDAKALPNGLSLLLSKMDPAKREQVMDGLRQLLG

SEQ ID NO: 9992 - DNA, 6978 bp, Zea mays
  CDS (1)..(6978)
atgtcacagcttggattagccgcagctgcctcaaaggccttgccactactccctaatcgccagagaagttcagctgggactacattctcatcatcttcattatcgaggcccttaaacagaaggaaaagccatactcgttcactccgtgatggcggagatggggtatcagatgccaaaaagcacagccagtctgttcgtcaaggtcttgctggcattatcgacctcccaagtgaggcaccttccgaagtggatatttcacatggatctgaggatcctagggggccaacagattcttatcaaatgaatgggattatcaatgaaacacataatggaagacatgcctcagtgtccaaggttgttgaattttgtgcggcactaggtggcaaaacaccaattcacagtatattagtggccaacaatggaatggcagcagcaaaatttatgaggagtgtccggacatgggctaatgatacttttggatctgagaaggcaattcaactcatagctatggcaactccggaagacatgaggataaatgcagaacacattagaattgctgaccaattcgtagaggtgcctggtggaacaaacaataataactacgccaatgttcaactcatagtggggatggcacaaaaactaggtgtttctgctgtttggcctggttggggtcatgcttctgagaatcctgaactgccagatgcattgaccgcaaaagggatcgtttttcttggcccacctgcatcatcaatgaatgctttgggagataaggtcggctcagctctcattgctcaagcagccggggtcccaactcttgcttggagtggatcacatgttgaagttccattagagtgctgcttagacgcgatacctgaggagatgtatagaaaagcttgcgttactaccacagaggaagcagttgcaagttgtcaagtggttggttatcctgccatgattaaggcatcctggggaggtggtggtaaaggaataagaaaggttcataatgatgatgaggttagagcgctgtttaagcaagtacaaggtgaagtccctggctccccaatatttgtcatgaggcttgcatcccagagtcggcatcttgaagttcagttgctttgtgatcaatatggtaatgtagcagcacttcacagtcgtgattgcagtgtgcaacggcgacaccagaagattattgaagaaggtccagttactgttgctcctcgtgagacagttaaagcacttgagcaggcagcaaggaggcttgctaaggctgtgggttatgttggtgctgctactgttgagtatctttacagcatggaaactggagactactattttctggaacttaatccccgactacaggttgagcatccagtcactgagtggatagctgaagtgaatctgcctgcagctcaagttgctgttggaatgggcatacctctttggcagattccagaaatcagacgtttctatggaatggactatggaggagggtatgacatttggaggaaaacagcagctcttgctacaccatttaattttgatgaagtagattctcaatggccaaagggccattgtgtagcagttagaattactagtgaggacccagatgatggtttcaaacctactggtgggaaagtgaaggagataagttttaaaagcaagcctaatgtttgggcctacttctcagtaaagtctggtggaggcattcatgaatttgctgattctcagtttggacatgcttttgcatatggactctctagaccagcagctataacaaacatgtctcttgcattaaaagagattcagattcgtggagaaattcattcaaatgttgattacacagttgacctcttaaacgcttcagacttcagagaaaacaagatccacactggttggctggatacaagaatagctatgcgtgttcaagctgagaggcccccatggtatatctcagtggttggaggtgctttatataaaacagtaaccaccaatgcagccactgtttctgaatatgttagttatctcaccaagggccatattccaccaaagcatatatcccttgtcaattctacagttaatttgaatatagaagggagcaaatacacaattgaaactgtaaggactggacatggtagctacaggttgagaatgaatgattcaacagttgaagcgaatgtacaatctttatgtgatggtggcctcttaatgcagttggatggaaacagccatgtaatttatgcagaagaagaagctggtggtacacggcttcagattgatggaaagacatgtttattgcagaatgaccatgatccatcgaagttattagctgagacaccctgcaaacttcttcgtttcttggttgctgatggtgctcatgttgatgcggatgtaccatacgcggaagttgaggttatgaagatgtgcatgcctctcttgtcacctgcttctggtgtcattcattgtatgatgtctgagggccaggcattgcaggctggtgatcttatagcaaggttggatcttgatgacccttctgctgtgaaaagagctgagccatttgatggaatatttccacaaatggagctccctgttgctgtctctagtcaagtacacaaaagatatgctgcaagtttgaatgctgctcgaatggtccttgcaggatatgagcacaatattaatgaagtcgttcaagatttggtatgctgcctggacaaccctgagcttcctttcctacagtgggatgaacttatgtctgttctagcaacgaggcttccaagaaatctcaagagtgagttagaggataaatacaaggaatacaagttgaatttttaccatggaaaaaacgaggactttccatccaagttgctaagagacatcattgaggaaaatctttcttatggttcagagaaggaaaaggctacaaatgagaggcttgttgagcctcttatgaacctactgaagtcatatgagggtgggagagagagccatgcacattttgttgtcaagtctcttttcgaggagtatcttacagtggaagaactttttagtgatggcattcagtctgacgtgattgaaacattgcggcatcagcacagtaaagacctgcagaaggttgtagacattgtgttgtctcaccagggtgtgaggaacaaagctaagcttgtaacggcacttatggaaaagctggtttatccaaatcctggtggttacagggatctgttagttcgcttttcttccctcaatcataaaagatattataagttggcccttaaagcaagtgaacttcttgaacaaaccaaactaagtgaactccgtgcaagcgttgcaagaagcctttcggatctggggatgcataagggagaaatgagtattaaggataacatggaagatttagtctctgccccattacctgttgaagatgctctgatttctttgtttgattacagtgatcgaactgttcagcagaaagtgattgagacatacatatcacgattgtaccagcctcatcttgtaaaggatagcatccaaatgaaattcaaggaatctggtgctattactttttgggaattttatgaagggcatgttgatactagaaatggacatggggctattattggtgggaagcgatggggtgccatggtcgttctcaaatcacttgaatctgcgtcaacagccattgtggctgcattaaaggattcggcacagttcaacagctctgagggcaacatgatgcacattgcattattgagtgctgaaaatgaaagtaatataagtggaataagcagtgatgatcaagctcaacataagatggaaaagcttagcaagatactgaaggatactagcgttgcaagtgatctccaagctgctggtttgaaggttataagttgcattgttcaaagagatgaagctcgcatgccaatgcgccacacattcctctggttggatgacaagagttgttatgaagaagagcagattctccggcatgtggagcctcccctctctacacttcttgaattggataagttgaaggtgaaaggatacaatgaaatgaagtatactccttcgcgtgaccgccaatggcatatctacacactaagaaatactgaaaaccccaaaatgttgcatagggtgtttttccgaactattgtcaggcaacccaatgcaggcaacaagtttagatcggctcagatcagcgacgctgaggtaggatgtcccgaagaatctctttcatttacatcaaatagcatcttaagatcattgatgactgctattgaagaattagagcttcatgcaattaggacaggtcattctcacatgtatttgtgcatactgaaagagcaaaagcttcttgacctcattccattttcagggagtacaattgttgatgttggccaagatgaagctaccgcttgttcacttttaaaatcaatggctttgaagatacatgagcttgttggtgcaaggatgcatcatctgtctgtatgccagtgggaggtgaaactcaagttggactgtgatggccctgcaagtggtacctggagagttgtaactacaaatgttactggtcacacctgcaccattgatatataccgagaagtggaggaaatagaatcacagaagttagtgtaccattcagccagttcgtcagctggaccattgcatggtgttgcactgaataatccatatcaacctttgagtgtgattgatctaaagcgctgctctgctaggaacaacagaacaacatattgctatgattttccgctggcctttgaaactgcactgcagaagtcatggcagtccaatggctctactgtttctgaaggcaatgaaaatagtaaatcctacgtgaaggcaactgagctagtgtttgctgaaaaacatgggtcctggggcactcctataattccgatggaacgccctgctgggctcaacgacattggtatggtcgcttggatcatggagatgtcaacacctgaatttcccaatggcaggcagattattgttgtagcaaatgatatcactttcagagctggatcatttggcccaagggaagatgcattttttgaaactgtcactaacctggcttgcgaaaggaaacttcctcttatatacttggcagcaaactctggtgctaggattggcatagctgatgaagtaaaatcttgcttccgtgttggatggtctgacgaaggcagtcctgaacgagggtttcagtacatctatctgactgaagaagactatgctcgcattagctcttctgttatagcacataagctggagctagatagtggtgaaattaggtggattattgactctgttgtgggcaaggaggatgggcttggtgtcgagaacatacatggaagtgctgctattgccagtgcttattctagggcatatgaggagacatttacacttacatttgtgactgggcggactgtaggaataggagcttatcttgctcgacttggtatacggtgcatacagcgtcttgaccagcctattattttaacagggttttctgccctgaacaagctccttgggcgggaagtgtacagctcccacatgcagcttggtggtcctaagatcatggcgaccaatggtgttgtccacctcactgttccagatgtccttgaaggtgtttccaatatattgaggtggctcagctatgttcctgcaaacattggtggacctcttcctattaccaaacctctggaccctccagacagacctgttgcttacatccctgagaacacatgcgatccacgtgcagctatctgtggtgtagatgacagccaagggaaatggttgggtggtatgtttgacaaagacagctttgtggagacatttgaaggatgggcaaaaacagtggttactggcagagcaaagcttggaggaattcctgtgggcgtcatagctgtggagacacagaccatgatgcagatcatccctgctgatccaggtcagcttgattcccatgagcgatctgtccctcgtgctggacaagtgtggttcccagattctgcaaccaagaccgctcaggcattattagacttcaaccgtgaaggattgcctctgttcatcctggctaattggagaggcttctctggtggacaaagagatctctttgaaggaattcttcaggctgggtcaacaattgtcgagaaccttaggacatataatcagcctgcttttgtgtacattcctatggctggagagcttcgtggaggagcttgggttgtggtcgatagcaaaataaatccagaccgcattgagtgttatgctgaaaggactgccaaaggtaatgttctcgaacctcaagggttaattgaaatcaagttcaggtcagaggaactccaagactgtatgggtaggcttgacccagagttgataaatctgaaagcaaaactccaagatgtaaatcatggaaatggaagtctaccagacatagaagggattcggaagagtatagaagcacgtacgaaacagttgctgcctttatatacccagattgcaatacggtttgctgaattgcatgatacttccctaagaatggcagctaaaggtgtgattaagaaagttgtagactgggaagaatcacgctcgttcttctataaaaggctacggaggaggatcgcagaagatgttcttgcaaaagaaataaggcagatagtcggtgataaatttacgcaccaattagcaatggagctcatcaaggaatggtaccttgcttctcaggccacaacaggaagcactggatgggatgacgatgatgcttttgttgcctggaaggacagtcctgaaaactacaaggggcatatccaaaagcttagggctcaaaaagtgtctcattcgctctctgatcttgctgactccagttcagatctgcaagcattctcgcagggtctttctacgctattagataagatggatccctctcagagagcgaagtttgttcaggaagtcaagaaggtccttgattga

SEQ ID NO: 9993 - protein, 2325 aa, Zea mays
MSQLGLAAAASKALPLLPNRQRSSAGTTFSSSSLSRPLNRRKSHTRSLRDGGDGVSDAKKHSQSVRQGLAGIIDLPSEAPSEVDISHGSEDPRGPTDSYQMNGIINETHNGRHASVSKVVEFCAALGGKTPIHSILVANNGMAAAKFMRSVRTWANDTFGSEKAIQLIAMATPEDMRINAEHIRIADQFVEVPGGTNNNNYANVQLIVGMAQKLGVSAVWPGWGHASENPELPDALTAKGIVFLGPPASSMNALGDKVGSALIAQAAGVPTLAWSGSHVEVPLECCLDAIPEEMYRKACVTTTEEAVASCQVVGYPAMIKASWGGGGKGIRKVHNDDEVRALFKQVQGEVPGSPIFVMRLASQSRHLEVQLLCDQYGNVAALHSRDCSVQRRHQKIIEEGPVTVAPRETVKALEQAARRLAKAVGYVGAATVEYLYSMETGDYYFLELNPRLQVEHPVTEWIAEVNLPAAQVAVGMGIPLWQIPEIRRFYGMDYGGGYDIWRKTAALATPFNFDEVDSQWPKGHCVAVRITSEDPDDGFKPTGGKVKEISFKSKPNVWAYFSVKSGGGIHEFADSQFGHAFAYGLSRPAAITNMSLALKEIQIRGEIHSNVDYTVDLLNASDFRENKIHTGWLDTRIAMRVQAERPPWYISVVGGALYKTVTTNAATVSEYVSYLTKGHIPPKHISLVNSTVNLNIEGSKYTIETVRTGHGSYRLRMNDSTVEANVQSLCDGGLLMQLDGNSHVIYAEEEAGGTRLQIDGKTCLLQNDHDPSKLLAETPCKLLRFLVADGAHVDADVPYAEVEVMKMCMPLLSPASGVIHCMMSEGQALQAGDLIARLDLDDPSAVKRAEPFDGIFPQMELPVAVSSQVHKRYAASLNAARMVLAGYEHNINEVVQDLVCCLDNPELPFLQWDELMSVLATRLPRNLKSELEDKYKEYKLNFYHGKNEDFPSKLLRDIIEENLSYGSEKEKATNERLVEPLMNLLKSYEGGRESHAHFVVKSLFEEYLTVEELFSDGIQSDVIETLRHQHSKDLQKVVDIVLSHQGVRNKAKLVTALMEKLVYPNPGGYRDLLVRFSSLNHKRYYKLALKASELLEQTKLSELRASVARSLSDLGMHKGEMSIKDNMEDLVSAPLPVEDALISLFDYSDRTVQQKVIETYISRLYQPHLVKDSIQMKFKESGAITFWEFYEGHVDTRNGHGAIIGGKRWGAMVVLKSLESASTAIVAALKDSAQFNSSEGNMMHIALLSAENESNISGISSDDQAQHKMEKLSKILKDTSVASDLQAAGLKVISCIVQRDEARMPMRHTFLWLDDKSCYEEEQILRHVEPPLSTLLELDKLKVKGYNEMKYTPSRDRQWHIYTLRNTENPKMLHRVFFRTIVRQPNAGNKFRSAQISDAEVGCPEESLSFTSNSILRSLMTAIEELELHAIRTGHSHMYLCILKEQKLLDLIPFSGSTIVDVGQDEATACSLLKSMALKIHELVGARMHHLSVCQWEVKLKLDCDGPASGTWRVVTTNVTGHTCTIDIYREVEEIESQKLVYHSASSSAGPLHGVALNNPYQPLSVIDLKRCSARNNRTTYCYDFPLAFETALQKSWQSNGSTVSEGNENSKSYVKATELVFAEKHGSWGTPIIPMERPAGLNDIGMVAWIMEMSTPEFPNGRQIIVVANDITFRAGSFGPREDAFFETVTNLACERKLPLIYLAANSGARIGIADEVKSCFRVGWSDEGSPERGFQYIYLTEEDYARISSSVIAHKLELDSGEIRWIIDSVVGKEDGLGVENIHGSAAIASAYSRAYEETFTLTFVTGRTVGIGAYLARLGIRCIQRLDQPIILTGFSALNKLLGREVYSSHMQLGGPKIMATNGVVHLTVPDVLEGVSNILRWLSYVPANIGGPLPITKPLDPPDRPVAYIPENTCDPRAAICGVDDSQGKWLGGMFDKDSFVETFEGWAKTVVTGRAKLGGIPVGVIAVETQTMMQIIPADPGQLDSHERSVPRAGQVWFPDSATKTAQALLDFNREGLPLFILANWRGFSGGQRDLFEGILQAGSTIVENLRTYNQPAFVYIPMAGELRGGAWVVVDSKINPDRIECYAERTAKGNVLEPQGLIEIKFRSEELQDCMGRLDPELINLKAKLQDVNHGNGSLPDIEGIRKSIEARTKQLLPLYTQIAIRFAELHDTSLRMAAKGVIKKVVDWEESRSFFYKRLRRRIAEDVLAKEIRQIVGDKFTHQLAMELIKEWYLASQATTGSTGWDDDDAFVAWKDSPENYKGHIQKLRAQKVSHSLSDLADSSSDLQAFSQGLSTLLDKMDPSQRAKFVQEVKKVLD

SEQ ID NO: 9994 - DNA, 6915 bp, Brassica napus
  CDS (1)..(6915)
atggagatgagagctttggtttcgtgttctgctgccggaaatggagcttctgatcggtttagactctccaatgtttcaccatggatcacatcagctcgtggtgcaagtggcagtgactccccagccacagtgaagctgggaagcagctctatgatcagagccttcaaaggagtttcgatttacaaaaacaagaccagaagaaatgttttgtctcaaaggaacaaacagtttcgtcctatggcctacttaggaaggaaggacttgagcagccctgatccgacctccttctgcgataatgatatatctgaacctcaagggactggatccattaatgggaatgatcatagtgctgtaagagtgtctcaagtcgatgagttctgtaaggctcacggtggaaaaaggccaatccatcgcattttggttgctaccaacggaatggcagctgtcaagtttatacgaagtgttagagcatggtcttaccaaacatttggctcggaaaaatccatatcattggtggccatggcgactcctgaagacatgcggatcaatgcggaacatatcagaatcgctgatcagtttatgcaagtcccgggtggaacgaacaataacaattatgctaatgttcatcttattgtagagatggctgaagcaacaggtgtggatgcagtttggcctggttggggtcatgcatctgaaaaccctgagttacctgatgcattaaaggccaaaggagtcatatttcttggtcctacagcagcctcaatgttagcattaggggataagattggttcgtccttgattgcacaagctgctgatgtacctactctgccatggagtggttcccatgttaaaatacctcctggtagcagcttggtaacgatccccgaggagatgtacaggcaagcttgtgtctacactaccgaagaagcggttgctagttgtcaagttgtgggctatccggcaatgatcaaagcatcgtggggtggtggcggtaaaggcattaggaaggttcatgatgatgatgaggttagggctctattcaagcaagttcaaggtgaggtcccaggctcgccgatattcataatgaaggttgcttcacagagtcggcatttagaggtgcagctgctatgtgaccaatatggaaatgtttcagctttgcatagccgtgattgtagcgtccagagaagacaccaaaagatcatcgaggagggtcccatcactgtggctccccgagataccgtgaagaagctggagcaggcagctagaaggttggccaagagtgttaactatgttggagctgctactgttgagtttctctacagcatggacactggggactacttcttcttagagcttaaccctaggttacaggtagagcaccctgtaaccgagcggatcgctgacataaatctaccagctgcccaagttgctgtcggtatgggaatccctctctggcaaatccctgagataagacggttctatggtatagaacaatatgattcgtggaggacaacatctttgctagcctccccttttaattttgataaagctgaatctgtaaggccaaaaggtcattgtgtcgctgtccgggtgacaagcgaggatcctgatgacgggtttaaacccaccagcggtcaagtgcaggagcttagttttaagagcaacccaaatgtgtggggttacttctctgtcaagtctggtggaggcatccacgagttctcagattctcagtttggacatgtttttgcatttggggaatccagagccatggcaatagcaaatatggttcttgcgctgaaagaaattcaaattcgtggagaagttaggactaacgttgactacacgattgaccttctacatgcttttgattaccgggaaaacaaaattcacactggttggttggacagtagaattgctatgcgggtccgagcagagaggcctccatggtacctctctgttgtcagcggggctctctataaagcatcagcgactggtgctgccgtggtctcggattacattgcttatcttgacaaggggcaaattcccccaaagcatatatctcttgtgcattctcaagtgtctctgaatattgaaggaagtaaatatacgattgatgtggtccggagtggatcaggaagctacaagctaagaatgaacaactcagaagtggcagcagaaatacacactctacgtgatggaggtttgttgatgcagttggatggtaaaagccatgttatatatgcacaggaagaaacctcaggcacccgtcttctgattgacggcaaaacttgtttacttcagaatgaacacgacccttcaaaattaatggctgagacaccgtgcaagctacttaggtatctggtttcagatgatagcagcattgatgctgatacaccctatgcagaggttgaggtcatgaagatgtgcatgccgcttctttcacctgcgtcaggagttatccattttaaaatgtgtgaaggacaagtcatgctgcctggtgaacttatagccaatcttgatcttgctgatccttcgactgtaagaaaggccgaacccttccatggagggttcccaagattagggcttccaacggaaatttctgctaaagttcatcagagatgtgctgcaactttagatgctgctcgcatgattcttgccggctatgagcatcaagtagatgaggttgtgcaagactttgtttcttgccttgatagccctgaactcccattccttcagtggcaagagtgctttgcagttctggcgacacggttaccaaaagatctcagaatcatgctagaatcaaagtatatggaatatgagtgtatctccaggaactccttgaccgcagattttcctgccaaacttttaaaaggcattctagaggctcatgtagcatcttgtgatgagactgagagaggtgcccttgcaaggctcattgaaccattgatgagccttgcaaagtgttacgaaggtggtagagaaagtcatgcctgtgttattgttcgttccctctttgaggaatatctatcagtagaagaattattcaacaataacatgctggctgatgttatagaacgtatgcgtcacgaatacaagaaagatcggtccaagattgtggatatagtgctgtcacaccagggcctaaaaagcaaaaacaagctcgttctcggactcatggagcattttgttaatgctaatcctgctatgtacagggataaacttatcagattcttgaaacttaaccatactaactactctgaggtggtgctcaaggcgagtcaattactcaaacagagaaaattaagtgaacttcgttctagcatcctgtcggagttagaaatgtttgcagaggatggggaaaatatggatactcccaagaggaagtgtgccatggaagatcttgtgagcgcacctttagctgttgaagatgctctcgtgggactatttgaccacagcgaccgcacacttcaaagactggttgttgaaacttatattcgtagattgtaccagccctacgtcgttaaagagagcgtgaggatgcagtggcaccaatatggttttattgcttcctgggagttcctagacgatcatatggaaagaaaaaacagtgagggctcagatgaccaagagacatctgaaaaagtttttgttgagaagcgtagaaagaaaaaaaaggggtttatggttataatcaaatcgctggagtttctgccgaatataataactgcagcagcactgacagaaacaaaccacatcgactatggtgaatctgccggatctcctctatctggcaatataatgcacattgctgttttagacagtgagaatgaggaggaccaagctcaagaaagagtggagaaaattctcaaagaggaagaagttagttcgagcctgtgttccgcaggtgtgggtgtggtgagctgtataatcgagcgagatgaaggacgaacacctattagacattcgttccattggtcgatggagaaacagtactatgcagaagagccgatgctgcgccatcttgaacctcctctctccatataccttgagttggataagctgagaggatatgaaaatatacaatatacccctacaagagatcgtcaatggcatctgtatactgtcacagataacaagccggtgccagtcaggaggatgttcctgagatctcttgttcgacaagggcaggataaccaacttagccaaacgcttgttagatctttgatggatgcgatggaggaacttgagctgaatgcccataaggaggatggtgcgaaaccagaccacgcacatatgttcctttgcctacttcgtgagcagcacattaatgatcttgtgccttaccccaggagagttgaagtgaatgcggaggttgaagaaactggaatagagatgatcttagaagaaacagtacgagagatacacaagtcagctggagtgagaatgcataggttgggtgtgtgcgagtgggaagtgcggctgcggttggcaagtggcgtttggagggctgtggttacaaacgtgacaggccgtacctgcactgtccatatataccgagaagttgaagctactgggagtaacagtttaatttatcaatcaataaccaagaagggacctttgcatggaaccccgatcaatgatcaatataagccactgggacatcttgtcaggcaacgattagccgcaaggaggagtaacactacttactgctatgatttcccgttggcatttgagacagccttggaagagttgtgggaatcacaacacccgggagttaagaaaccgtttaagaacactctgaccaatgttgaagagcttgtattctctactccagaaggttctcttattccggttaaaagaccaccgggtctcaacgactgcggaatggtggcatggaccctagagatgtcgactcctgagtttccaaagggacggaaaattatcatagtcgccaatgacgttaccttcaaagctgggtcttttggtcctagagaggacgcgtttttcctcgctgtgactgaactcgcttgcgcggagaagcttcccttgatttacttagcagcaaactctggcgcccggctaggggtggctgaagaagtcaaagcctgctttaaagttggatggtcggatgaagtttcccctgagaatggttttcagtatatatacctaagccctgaggatcacgaaaggattggatcatctgtcattgcgcacgaaataaagctgcccagcggggaaacgaggtgggtcattgatacaatcgttggtaaagaagatggtattggcgtagagaatctaacgggaagcggggcaatagcgggtgcttactcgagggggtacagggaaacttttactttaacctttgtcagtggaagaacggttggcattggcgcttaccttgcccgtctgggtatgcggtgcatacagaggttagaccagcctataattttgactggcttttcgacgctgaacaagttacttgggcgtgaggtctacacctctcacatgcaactcggcggccccaaaatcatgggtgcaaatggtgttgttcatctcacagtctcagatgatctggaaggcgtgtcggcgatcctaaactggctgagctacgttcctgctcacgcgggtggtcctcttcctcttcctcttctttcccctttagatccaccggagagaactgtggagtacgtcccagagaactcttgcgacccccgagctgctatagctggggtcaatgacaacgccggtaaatggcttggcggtatctttgataaaaacagctttatggagactctcgaaggctgggcgaggacggttgtgaccggtagagcgaaactagggggagtacctgttggagttgtagcagttgagacgcagaccgtgacgcagattattccagcggatcctggacaggtggactcgcacgaaagagtggttccgcaggcagggcaagtctggttccctggctcagcagccaagacggctcaagcgctcatggatttcaaccgggaagggcttccgttgtttatcctagcgaactggcgagggttttccggcgggcagagagatcttttcgaaggaatactccaggctggttcagctatcgtcgaaaatttgagaacgtatggccagccagtgtttgtgtacatccccaagatgggagagctgcgaggcggagcgtgggtggttgttgatagccagattaattcggattacgttgaaatgtatgctgacgaaacttcacgtgggaatgtgctcgagccggaagggatgatagagatcaaatttagaaagagagagatgttggagtgcatggggaggttggaccagaagctgatcagtctcaaagcaaaactgcgagacgccaaacaaagcgagatggaacttatcaagcaacagattaaagctcgtaagaagcagcttttaccgctttacatccaaatcgccaccaaatttgcggatcttcacgacacgtccatgaggatggcagcgaaaggagtgatcaaaagcgttgtggaatggagcggttcgcgatcattcttctataaaaagctcattaggagaattgcggagagctctctggtgaaaaatgtgatagaagcttcgggagacaacttatcgtataaatctgcaatgggtttgattaaggattggttctgcaagtctgatgttgcaaaggggaaagaagaggcatggacagacgaccaagtgttctttacatggaaggagaatgttggtaactacgaatccgagctcagcgagttgagagcacagaaactgctgaagcaacttgcggagattgggaattcatctgatctgcaggctctgccccagggacttgctaatattctacacaaggtggagcctttgaaaagagaacagctagtggatgctctaagaaaggtgttgagttga

SEQ ID NO: 9995 - protein, 2304 aa, Brassica napus
MEMRALVSCSAAGNGASDRFRLSNVSPWITSARGASGSDSPATVKLGSSSMIRAFKGVSIYKNKTRRNVLSQRNKQFRPMAYLGRKDLSSPDPTSFCDNDISEPQGTGSINGNDHSAVRVSQVDEFCKAHGGKRPIHRILVATNGMAAVKFIRSVRAWSYQTFGSEKSISLVAMATPEDMRINAEHIRIADQFMQVPGGTNNNNYANVHLIVEMAEATGVDAVWPGWGHASENPELPDALKAKGVIFLGPTAASMLALGDKIGSSLIAQAADVPTLPWSGSHVKIPPGSSLVTIPEEMYRQACVYTTEEAVASCQVVGYPAMIKASWGGGGKGIRKVHDDDEVRALFKQVQGEVPGSPIFIMKVASQSRHLEVQLLCDQYGNVSALHSRDCSVQRRHQKIIEEGPITVAPRDTVKKLEQAARRLAKSVNYVGAATVEFLYSMDTGDYFFLELNPRLQVEHPVTERIADINLPAAQVAVGMGIPLWQIPEIRRFYGIEQYDSWRTTSLLASPFNFDKAESVRPKGHCVAVRVTSEDPDDGFKPTSGQVQELSFKSNPNVWGYFSVKSGGGIHEFSDSQFGHVFAFGESRAMAIANMVLALKEIQIRGEVRTNVDYTIDLLHAFDYRENKIHTGWLDSRIAMRVRAERPPWYLSVVSGALYKASATGAAVVSDYIAYLDKGQIPPKHISLVHSQVSLNIEGSKYTIDVVRSGSGSYKLRMNNSEVAAEIHTLRDGGLLMQLDGKSHVIYAQEETSGTRLLIDGKTCLLQNEHDPSKLMAETPCKLLRYLVSDDSSIDADTPYAEVEVMKMCMPLLSPASGVIHFKMCEGQVMLPGELIANLDLADPSTVRKAEPFHGGFPRLGLPTEISAKVHQRCAATLDAARMILAGYEHQVDEVVQDFVSCLDSPELPFLQWQECFAVLATRLPKDLRIMLESKYMEYECISRNSLTADFPAKLLKGILEAHVASCDETERGALARLIEPLMSLAKCYEGGRESHACVIVRSLFEEYLSVEELFNNNMLADVIERMRHEYKKDRSKIVDIVLSHQGLKSKNKLVLGLMEHFVNANPAMYRDKLIRFLKLNHTNYSEVVLKASQLLKQRKLSELRSSILSELEMFAEDGENMDTPKRKCAMEDLVSAPLAVEDALVGLFDHSDRTLQRLVVETYIRRLYQPYVVKESVRMQWHQYGFIASWEFLDDHMERKNSEGSDDQETSEKVFVEKRRKKKKGFMVIIKSLEFLPNIITAAALTETNHIDYGESAGSPLSGNIMHIAVLDSENEEDQAQERVEKILKEEEVSSSLCSAGVGVVSCIIERDEGRTPIRHSFHWSMEKQYYAEEPMLRHLEPPLSIYLELDKLRGYENIQYTPTRDRQWHLYTVTDNKPVPVRRMFLRSLVRQGQDNQLSQTLVRSLMDAMEELELNAHKEDGAKPDHAHMFLCLLREQHINDLVPYPRRVEVNAEVEETGIEMILEETVREIHKSAGVRMHRLGVCEWEVRLRLASGVWRAVVTNVTGRTCTVHIYREVEATGSNSLIYQSITKKGPLHGTPINDQYKPLGHLVRQRLAARRSNTTYCYDFPLAFETALEELWESQHPGVKKPFKNTLTNVEELVFSTPEGSLIPVKRPPGLNDCGMVAWTLEMSTPEFPKGRKIIIVANDVTFKAGSFGPREDAFFLAVTELACAEKLPLIYLAANSGARLGVAEEVKACFKVGWSDEVSPENGFQYIYLSPEDHERIGSSVIAHEIKLPSGETRWVIDTIVGKEDGIGVENLTGSGAIAGAYSRGYRETFTLTFVSGRTVGIGAYLARLGMRCIQRLDQPIILTGFSTLNKLLGREVYTSHMQLGGPKIMGANGVVHLTVSDDLEGVSAILNWLSYVPAHAGGPLPLPLLSPLDPPERTVEYVPENSCDPRAAIAGVNDNAGKWLGGIFDKNSFMETLEGWARTVVTGRAKLGGVPVGVVAVETQTVTQIIPADPGQVDSHERVVPQAGQVWFPGSAAKTAQALMDFNREGLPLFILANWRGFSGGQRDLFEGILQAGSAIVENLRTYGQPVFVYIPKMGELRGGAWVVVDSQINSDYVEMYADETSRGNVLEPEGMIEIKFRKREMLECMGRLDQKLISLKAKLRDAKQSEMELIKQQIKARKKQLLPLYIQIATKFADLHDTSMRMAAKGVIKSVVEWSGSRSFFYKKLIRRIAESSLVKNVIEASGDNLSYKSAMGLIKDWFCKSDVAKGKEEAWTDDQVFFTWKENVGNYESELSELRAQKLLKQLAEIGNSSDLQALPQGLANILHKVEPLKREQLVDALRKVLS

SEQ ID NO: 9996 - DNA, 6786 bp, Glycine max
  CDS (1)..(6786)
atggctgacattgggcgtaggaatggatattcaaacagtgtactaccaaataggccacctgctgcaatatctgaagtagatgaattctgcaatgcccttggtggaaacaggccaattcatagtatattaattgcaaataatggaatggcagcagtcaagtttatacgtagtgttaggagctgggcctatgagacatttggctcagagaaagccatcttgttggttgccatggctactccagaggacatgagaatcaatgcagaacatatcagaatagctgatcaatttgtggaagtacctggtgggaccaataacaataactatgccaacgtgcagcttattcttgagatggctgagataactcatgttgatgcggtgtggcctggttggggtcatgcatcagaaaatcctgagcttccagatgcattaaaagcaaaaggaattgtatttcttggacctcctgctatatctatggctgcattgggggataaaattggttcatcattgattgctcaagcagcggaagtgcctacccttccatggagtggttctcatgtgaaaattccgcctgaaagttccttgattactattcctgatgaaatttatcgggaagcatgtgtttatacaacagaggaagcagtggcaagttgtcaagttgtaggataccctgcaatgatcaaggcatcttggggtggtggtggtaaaggaataagaaaggttcataatgatgatgaggtaagggcattgttcaagcaagttcaaggtgaagttccgggttcacccatatttataatgaaggttgcatcccagagccgacatctagaagtccagttactttgtgatcagtacggaaatgtcgcagctttgcatagccgtgattgcagtgttcaaaggaggcaccaaaagattattgaggaggggcccattactgtagcaaccatagaaacagtgaaaaaactggaacaggccgctagaaggttggctatatctgtaaattatgttggggcggctactgttgagtatctttatagtatggaaactggcgagtactactttttagagttgaaccctcggctacaggttgaacatcctgttactgagtggatagcagagataaatctgccagcagcacaagttgccattgggatgggtgttcctctctggcaaattcctgagataaggcgtttctatggggtggaacatggtggagggtatgatgcttggagaaaaacatccgttttagctaccccttttgattttgacaaagcacaatctacaaggccaaaaggtcattgtgtggctgtgcgagtaactagtgaggaccctgatgatggttttaagcctacaagtggcaaagtgcaggagcttaactttaaaagcaagccaaatgtgtgggcgtacttctctgtcaagtctggaggaggaattcatgaattctcagattcacagtttggtcatgtttttgcttttggagaatctagggctttagcaattgcaaatatggttctggggctgaaggagattcagattcggggagaaatccgtaccaatgttgataacaccattgatcttctgaatgcttcagactacagagaaaacaaaattcacacaggttggctggacagtagaattgcaatgcgggttagagcagaaaggcctgcctggtatctttcggtcgttggaggggcactctataaagcttctgatagcagtgcagctttggttacagattatgttggttatcttgaaaagggacaaatccctcccaagcacatatctcttgtccattctcaagtgtccttgaacattgaaggaagcaaatatacgattgacatgatacgaggtgggtctggaagttatagattgagaatgaatcaatcagagatagaagcagaaatacatactttacgtgatggaggtttgctaatgcagttggatggaaacagtcatgtaatatatgcagagggagaagcagctggaactcgccttctaatagatggaaggacttgcttgcttcagaatgatcatgatccatcaaagttggttgcggagacaccatgcaagcttctgagatatttggttgcagatgacagtcatgttgatgctgacacaccatatgctgaagttgaggtcatgaaaatgtgcatgcctcttctttcgcctgcttctgggattattcatttcacaatgtctgaaggtcaagcaatgcaggctggtgaacttatagcaaggcttgatctggatgatccttcagctgtaagaaaggcagaacccttcactgggagcttcccagttctgggacctcctactgcaatttctgtaaaagttcatcagaaatgcgctgccagcttaaatgccgcgcggatgattctctctgggtatgagcacaatattgatgaagtggttgtgcaaagtttgcttaattgccttgatagtcctgaattgcctttccttcaatggcaagagtgcttggcagttcttgcaacccgccttcccaaagagctaaaaaatgagttggaatcaaaatatcaggagtttgaggggatttcaagctcccaaattgttgatttccctgccaaattattgaagggaattattgaagctcatctttcctcctgtcccgacaaagaaaaaggagctcaagaaagactagttgaacctctattgagtcttgttaagtcttatgagggtggaagagagagccatgcccatataattgtccaatccctatttgatgagtatctttctgttgaagaattatttagcgataatattcaggctgatgtgattgaacgtctgcgtctacaatacaagaaagatctattgaagattgttgatatagtgctctctcatcagggaatcaagagtaaaaataagctgatcttgcaactgatggataaattggtttaccctaaccctgttgcctatagggatcagttaatccgtttctctttactccaccatacaaattattctgagttggctctaaaggcaagtcaactgctggaacaaactaaattaagtgaacttcgatccaacattgctagaagtctttccgaattagagatgttcacagaggatggtgaaaatattgatacacccaagaggaagagtgccattaatgaccgaatggaggaccttgtgagtgctccttttgcagttgaagatgctctcgtgggtttatttgatcacagtgatcacacccttcagaggagggttgtggaaagttatatacgtaggctctatcagccatatcttgtcaaagggagtgccaggatgcaatggcacagatctggtcttattgctacatgggagttctatgatgagtacattgaaaggaagaatggggttgaagaccaaagtttgagtaaaacagtggaggagaaacatagtgagaaaaagtggggagtgatggttataattaaatctcttcaatttttgcctgcaattatcactgctgcattgagggaggcaaccaacaaccctcacgaagcacttacaagtggttctgtggaaccagttaactatggtaatatgatgcatattggattagtgggcatcaacaaccagatgagtttactgcaagacagtggtgatgaggatcaagctcaagaaagaatcaataagttagctaaaatactcaaagagcaggaagtaggctccaccatacgagctgcaggtgtcggtgtaatcagctgtatcatacaaagggatgaagggcgtgccccaatgaggcactcctttcactggtcagaagaaaagctttactatgcggaggaacctctgttgcgtcatctggaacctccgctatccatttatcttgaattggacaaacttaaagcctatgagaatatacggtatactccatctcgagatcgtcaatggcacctctacacagttgtggatcacaagccacaaccaattcaaagaatgtttcttcgaacacttgtaagacagccgacaacaaatgaaggattttcttcatatcaaaggctggatgcagaaacatctcgtacccaattggccatgtcctttacttcaaggagcatttttaggtctttgatggctgcaatggaggagttggaacttaatgcacacaatgtcaatatcaaatctggacatgctcatatgtacctatatatcatacgcgaacaacaaatagatgatcttgtgccctatcccaagagaattaacatagaagctgggaaagaagaaataacagttgaggcagtcttggaagaactggcacgggaaatccattcatctgttggtgtaagaatgcatagattaggggttgttgtgtgggaaatcaagctctggatggcagcctgtggacaggcaaatggtgcttggagggtcattgtaaacaatgtggctggtcatacatgcactgtacatctataccgagaaaaggaggataccatcactcataaagtggtatacagttcagtatcggttaagggtccactgcatggtgtggcagtgaatgaaaattatcaacctttaggagttattgaccgaaagcgtctttcagcaagaaagaacagcaccacatactgctatgattttcctcttgcatttgaaactgccttggaacagtcatgggcaatccaacagccaggatttcaaagagccaaagataaaaatcttttaaaggtaacagagcttaaatttgcagataaagaaggtagctggggtactcctcttgttcctgtggagaattaccctgggctcaatgatgttggcatggtagcctggtttatggaaatgtgtacccctgagttcccatctggaaggacaatattggttgttgcaaatgatgtgaccttcaaggctggttcttttggcccaagagaggatgcattcttccgtgcagtaactgatcttgcatgtacaaaaaaactacctttgatttatttagctgcaaattctggtgcccgtttaggtgtagctgaagaagtcaaatcctgtttcagagttggttggtctgaggaatctaatcctgagaatggctttcagtatgtatatttaacacctgaggataatgctcggattggatcatcggtgatagcacatgagttaaagcttgagagtggagaaaccagatgggttatagataccattgttggcaaggaggatggccttggcgttgaaaacttgagtggaagtggggctattgctggtgcttattcaagggcatacaaggaaacttttacactgacatatgtgactggtagaactgttggaattggagcttatcttgctaggcttgggatgagatgcatacaaaggcttgatcagcccataattcttactggtttttcagcattaaacaaacttcttggtcgggaggtttacagctctcacatgcaacttggtggacctaaaatcatggcaactaatggagtcgttcatcttacagtttccgatgatcttgaaggtgtttcttctattttgaagtggcttagctacattccttctcatgttggcggtgcacttcccattgtaaagccacttgatcctccagaaagaccagtggagtatttcccagaaaactcgtgtgatcctcgtgctgccatttctggaaccttggatggtaatggaagatggctgggaggaatttttgacaaagacagctttgtggagacactagagggatgggcaagaacagttgttacaggaagggcaaagcttggaggaatccctgtgggagtagttgctgtagaaacacagacggtaatgcaaataatacctgctgatcctggccagcttgattctcacgagagggttgttcctcaagccgggcaagtgtggttccctgattccgcaaccaagacagcccaagcaatattggatttcaacagagaagagctcccgcttttcattcttgcaaactggagaggcttttcaggagggcaaagggaccttttcgaaggaattcttcaggctggttccactattgtggagaaccttagaacatacaagcagcccatatttgtatatatcccaatgatgggcgaactccgtggtggggcatgggtggttgttgtcagtagaatcaattcagaccacatcgaaatgtatgccgatcgaacagacaaaggtaatgtcctagagccagaaggaatgattgagatcaaatttagaacaagagaattgttggagagtatgggtagacttgatcagcaattgataactctgaaggccccacttcaggaagccaagagtagcaggaacattgtggcctttgtatccctacagcagcagattaaatcacgcgagagacaacttttgcctgtgtatacccagatagctaccaagtttgctgaactgcatgatacttccttaagaatggctgccaagggtgtcattagagaagttctggactggcgtaactcccgctctgtcttttaccagagactgcacaggagaattggtgagcaatcactgatcaacagtgtgagagatgctgctggtgaccaattgtcacatgcatctgcaatgaacttgctcaaagaatggtatttgaattccgatattgccaaaggtagagaagatgcttggttggatgatgaagccttcttcaggtggaaggatattccttcaaattacgagaataaactaaaggaattgcgtgtgcagaaagtgttacttcaattgacaaatattggtgactcagctctagatttgcaagctctacctcaaggtcttgctgcccttttaagcaagttggagccattaggtcgcgtgaagttgacggatgaacttcgcaaggtacttggttag

SEQ ID NO: 9997 - protein, 2261 aa, Glycine max
MADIGRRNGYSNSVLPNRPPAAISEVDEFCNALGGNRPIHSILIANNGMAAVKFIRSVRSWAYETFGSEKAILLVAMATPEDMRINAEHIRIADQFVEVPGGTNNNNYANVQLILEMAEITHVDAVWPGWGHASENPELPDALKAKGIVFLGPPAISMAALGDKIGSSLIAQAAEVPTLPWSGSHVKIPPESSLITIPDEIYREACVYTTEEAVASCQVVGYPAMIKASWGGGGKGIRKVHNDDEVRALFKQVQGEVPGSPIFIMKVASQSRHLEVQLLCDQYGNVAALHSRDCSVQRRHQKIIEEGPITVATIETVKKLEQAARRLAISVNYVGAATVEYLYSMETGEYYFLELNPRLQVEHPVTEWIAEINLPAAQVAIGMGVPLWQIPEIRRFYGVEHGGGYDAWRKTSVLATPFDFDKAQSTRPKGHCVAVRVTSEDPDDGFKPTSGKVQELNFKSKPNVWAYFSVKSGGGIHEFSDSQFGHVFAFGESRALAIANMVLGLKEIQIRGEIRTNVDNTIDLLNASDYRENKIHTGWLDSRIAMRVRAERPAWYLSVVGGALYKASDSSAALVTDYVGYLEKGQIPPKHISLVHSQVSLNIEGSKYTIDMIRGGSGSYRLRMNQSEIEAEIHTLRDGGLLMQLDGNSHVIYAEGEAAGTRLLIDGRTCLLQNDHDPSKLVAETPCKLLRYLVADDSHVDADTPYAEVEVMKMCMPLLSPASGIIHFTMSEGQAMQAGELIARLDLDDPSAVRKAEPFTGSFPVLGPPTAISVKVHQKCAASLNAARMILSGYEHNIDEVVVQSLLNCLDSPELPFLQWQECLAVLATRLPKELKNELESKYQEFEGISSSQIVDFPAKLLKGIIEAHLSSCPDKEKGAQERLVEPLLSLVKSYEGGRESHAHIIVQSLFDEYLSVEELFSDNIQADVIERLRLQYKKDLLKIVDIVLSHQGIKSKNKLILQLMDKLVYPNPVAYRDQLIRFSLLHHTNYSELALKASQLLEQTKLSELRSNIARSLSELEMFTEDGENIDTPKRKSAINDRMEDLVSAPFAVEDALVGLFDHSDHTLQRRVVESYIRRLYQPYLVKGSARMQWHRSGLIATWEFYDEYIERKNGVEDQSLSKTVEEKHSEKKWGVMVIIKSLQFLPAIITAALREATNNPHEALTSGSVEPVNYGNMMHIGLVGINNQMSLLQDSGDEDQAQERINKLAKILKEQEVGSTIRAAGVGVISCIIQRDEGRAPMRHSFHWSEEKLYYAEEPLLRHLEPPLSIYLELDKLKAYENIRYTPSRDRQWHLYTVVDHKPQPIQRMFLRTLVRQPTTNEGFSSYQRLDAETSRTQLAMSFTSRSIFRSLMAAMEELELNAHNVNIKSGHAHMYLYIIREQQIDDLVPYPKRINIEAGKEEITVEAVLEELAREIHSSVGVRMHRLGVVVWEIKLWMAACGQANGAWRVIVNNVAGHTCTVHLYREKEDTITHKVVYSSVSVKGPLHGVAVNENYQPLGVIDRKRLSARKNSTTYCYDFPLAFETALEQSWAIQQPGFQRAKDKNLLKVTELKFADKEGSWGTPLVPVENYPGLNDVGMVAWFMEMCTPEFPSGRTILVVANDVTFKAGSFGPREDAFFRAVTDLACTKKLPLIYLAANSGARLGVAEEVKSCFRVGWSEESNPENGFQYVYLTPEDNARIGSSVIAHELKLESGETRWVIDTIVGKEDGLGVENLSGSGAIAGAYSRAYKETFTLTYVTGRTVGIGAYLARLGMRCIQRLDQPIILTGFSALNKLLGREVYSSHMQLGGPKIMATNGVVHLTVSDDLEGVSSILKWLSYIPSHVGGALPIVKPLDPPERPVEYFPENSCDPRAAISGTLDGNGRWLGGIFDKDSFVETLEGWARTVVTGRAKLGGIPVGVVAVETQTVMQIIPADPGQLDSHERVVPQAGQVWFPDSATKTAQAILDFNREELPLFILANWRGFSGGQRDLFEGILQAGSTIVENLRTYKQPIFVYIPMMGELRGGAWVVVVSRINSDHIEMYADRTDKGNVLEPEGMIEIKFRTRELLESMGRLDQQLITLKAPLQEAKSSRNIVAFVSLQQQIKSRERQLLPVYTQIATKFAELHDTSLRMAAKGVIREVLDWRNSRSVFYQRLHRRIGEQSLINSVRDAAGDQLSHASAMNLLKEWYLNSDIAKGREDAWLDDEAFFRWKDIPSNYENKLKELRVQKVLLQLTNIGDSALDLQALPQGLAALLSKLEPLGRVKLTDELRKVLG

SEQ ID NO: 9998 - DNA, 1776 bp, Saccharopolyspora erythraea
  CDS (1)..(1776): transl_table=11
gtggacaacaccgtcatctccggtgccatcaagaaggtgttggtggcgaatcggggtgagatcgcggtgcgggtgatccgggcttgccgggatgtgggggtgggcagtgtggcggtgtatgcggagccggatgtggatgcggtgttcgtgcggttggccgatgaggcgttcgggttgggtgggtcgacggcggcggagtcgtatctggacatcggcaaggtgatcgatgcggcgcagcgctcaggggcggatgcggtgcatccgggttatgggttcttgtcggagaacgcggatttcgcgcaggcggtgctggatgcgggtctggtgtgggtgggtccgtcgccggaggcgatccgggtgttgggggacaaggtgaccgcgcggcggatcgcgttggaggtgggggcgccgttggtgccggggaccgaggagccggcgtcgggtgctgatgaggtggtggcgttcgctgaggagcacgggttgccggtggcgatcaaggcggcgttcggtggtgggggccgggggttgaaggtggcgcgcagcctggaggagattccggggttgttcgagtcggcggtgcgggaggccgaggcggcgttcggtcggggtgagtgtttcgtggagcggtatctggaccggccgcggcatgtggaggctcaggtgctggcggatcgccatggtggtgtggtggtggtggggacgcgggattgttcgttgcagcggcggcatcagaagttggtggaggaggctccggcgccgtttttgagcgaggagcagcgggagcggatccataccgcggcgcgggagatctgtgcgcgggcgggttatgccggtgccgggacggtggagttcttggtgggtgcggacgggacgatctcgtttttggaggtcaacacgcggttgcaggtggagcatccggtgtcggaggagaccacggggctggatctggtggtcgagcagttgcggatcgcggcgggtgagcggttgtggttgcgggaggatccggtgccggtggggcatgcgatcgagttccggatcaacggggaggatccggggcgggatttcctgccggcgccgggcacggtgcggcggttcgtggtgccgtcgggtccgggggtgcgggtggatgcgggggtggagtccgggagtgtgatcggggggcagttcgactcgttgttggccaaggtgatcgtgtgggggcgggatcgggcgcaggcgttggcgcggtcgcggcgggtgctggccgagatgcgggtggaggggctggccacggtgttgccgttccaccgggcggtggtggccgatccggcgttcaccgccgaggacgggttcggggtgcacacgcggtggatcgagaccgagttcgacaacacgctgccgccgttcgacggtgcgagcgaggccgaggcgggggtggggcggcggacggtggtggtcgaggtcggtggtcgtcggttggaggtgtcgctgccggctgatctcacgcccgcggcggcgccggccgggggtgcggggcggccgcggcggcggtcggccggcggtggtggtgcgggctcgtcgggggatgcggtgaccgcgccgatgcagggcacgctggtcaagctggtggtggccgagggcgaccgggtcagcgcgggggacgagatcgcggtgctggaggcgatgaagatggagaacccggtgctggcgcacaaggacggcaccgtcaccggactgaccgcccagcccggcgccaccctcacccaggggagcaccctctgcgaactcaaggactga

SEQ ID NO: 9999 - protein, 591 aa, Saccharopolyspora erythraea
MDNTVISGAIKKVLVANRGEIAVRVIRACRDVGVGSVAVYAEPDVDAVFVRLADEAFGLGGSTAAESYLDIGKVIDAAQRSGADAVHPGYGFLSENADFAQAVLDAGLVWVGPSPEAIRVLGDKVTARRIALEVGAPLVPGTEEPASGADEVVAFAEEHGLPVAIKAAFGGGGRGLKVARSLEEIPGLFESAVREAEAAFGRGECFVERYLDRPRHVEAQVLADRHGGVVVVGTRDCSLQRRHQKLVEEAPAPFLSEEQRERIHTAAREICARAGYAGAGTVEFLVGADGTISFLEVNTRLQVEHPVSEETTGLDLVVEQLRIAAGERLWLREDPVPVGHAIEFRINGEDPGRDFLPAPGTVRRFVVPSGPGVRVDAGVESGSVIGGQFDSLLAKVIVWGRDRAQALARSRRVLAEMRVEGLATVLPFHRAVVADPAFTAEDGFGVHTRWIETEFDNTLPPFDGASEAEAGVGRRTVVVEVGGRRLEVSLPADLTPAAAPAGGAGRPRRRSAGGGGAGSSGDAVTAPMQGTLVKLVVAEGDRVSAGDEIAVLEAMKMENPVLAHKDGTVTGLTAQPGATLTQGSTLCELKD

SEQ ID NO: 10000 - DNA, 2172 bp, Emericella nidulans
  CDS (1)..(2172)
atgccgctctcatctcttctccgcacttccgcccgcctggggcagacggttgttgctcgacgctcacgacgaactgcttccacagtaacctccaattcctcgagtaactttcgcgcattagactcgattttaattgccaacaggggagaaatcgctctacgagttggtaggactgcggcccagcatggaattcgagtcactacgctctatacggatccagattcccaagcgcagcatgctttgagtacaccatatgcattcaatctcggctccgtgtccgcgtacctcgatggagaccgtatcattgaaatcgcaaaggcccaaggatgccagggaatacaccccggctacggcttccttagtgagaactcagagttcgcacgaaaatgtacagaagcagggctggtctttattggaccgccgtggaaagctatcgaggatatgggagataagaggtgctctaagcatatcatgactgccgctggagtgccctgtgtccccagctaccacggtgaaaaccaagaccctaatttcctcgaagcggaggccgataaaatcaaatacccagtgctcatcaaagcaatcaagggcggtgggggcaaaggaatgagaatcgctcgttcaaaggaagagtttcaagcgcagcttcagtcggcgaagtcggaggctatgaactcttttggggatgaccatgtcctagtcgagaaatatatcacaacaccgcgacacattgaggtccaagtctttgctgacaaacacggaaattgtgtagcgctgggagagcgagattgcagcatccaacggcgacaccaaaaaatcctggaagagtcaccggctcctcacctgcctgatgccacaagaaaagacatatgggcaaaggctcggtcggccgcgttagccgttcgctacgagggcgccggtacagttgagtttatcttcgacaacgacacgggagagttcttcttcatggaaatgaatactagacttcaggtggagcatcccgtaaccgagatggtcactgggcaagatttggtgcattggcagctgaaggtcgcggagggcgccgagcttccattaacgcaggaagaagtggaagccaatatagctacccatggtcatgcgatcgaagcgagaatctacgctgagaaccctgcgcagggcttcattccagattccggtgctcttctccatgtccgcactcccgccaccaccgaggacgttcgaatcgacgccggatttgtgcaaggtgacgaggtttcggcgcactatgatcccatgattgcgaaactaatcgttcggggcgccgaccgacaagaagctattcgcaagcttgcttgcagcattggaagagtcgaggtggccggcccagcgacgaatatcgagttcttgaaatcagtttgcaaaagtgccgacttcatctctggcaaagtcgaaacgggttacattgagaagcatcacgacgagctattcgcccaatcgccaattgagccggaagtgctggcacaagtagcactggcttgcttgcatgacgacgctcgtctcgccgcgcaaaaagcaaccaattttcaaggctccgcagtgggatttgggccaggcttccaacaacaccacatgaccttcacgaactcagcatcagcaaacaacgaggcctttgacgtcaaagttcaacaaaccggagagaacgtgttcaatgtaaagattggcgagcacactttcgagcaggtgaccagccaccctaatgcggacttccgcatcatcacctcgttcttcccgcacacccgtttggacaccactgtcatccgcgacggcgattcaatcgtcgtatttcagcgcggcaggcaataccgccttactacaccacgggcgaaatggatggaaaaagcactcggcatgaaagacgtcacaaatagtgtactcgccccaatgccctgcaaagtcctccgtgtcgaggtccaagccggcgatactgtagaaaaggaccagccacttgtggtgattgagagcatgaaaatggaaacagtcatccgcagcccacaaagagggaaattgccaaagtcgtccatcaaaaaggagaccaatgcaaaagcgggacaccgcttgtggagtttgctggtgaagacgaagaggcgtcgaaatagatatggaaggattgaagctatgctgcaccaatag

SEQ ID NO: 10001 - protein, 723 aa, Emericella nidulans
MPLSSLLRTSARLGQTVVARRSRRTASTVTSNSSSNFRALDSILIANRGEIALRVGRTAAQHGIRVTTLYTDPDSQAQHALSTPYAFNLGSVSAYLDGDRIIEIAKAQGCQGIHPGYGFLSENSEFARKCTEAGLVFIGPPWKAIEDMGDKRCSKHIMTAAGVPCVPSYHGENQDPNFLEAEADKIKYPVLIKAIKGGGGKGMRIARSKEEFQAQLQSAKSEAMNSFGDDHVLVEKYITTPRHIEVQVFADKHGNCVALGERDCSIQRRHQKILEESPAPHLPDATRKDIWAKARSAALAVRYEGAGTVEFIFDNDTGEFFFMEMNTRLQVEHPVTEMVTGQDLVHWQLKVAEGAELPLTQEEVEANIATHGHAIEARIYAENPAQGFIPDSGALLHVRTPATTEDVRIDAGFVQGDEVSAHYDPMIAKLIVRGADRQEAIRKLACSIGRVEVAGPATNIEFLKSVCKSADFISGKVETGYIEKHHDELFAQSPIEPEVLAQVALACLHDDARLAAQKATNFQGSAVGFGPGFQQHHMTFTNSASANNEAFDVKVQQTGENVFNVKIGEHTFEQVTSHPNADFRIITSFFPHTRLDTTVIRDGDSIVVFQRGRQYRLTTPRAKWMEKALGMKDVTNSVLAPMPCKVLRVEVQAGDTVEKDQPLVVIESMKMETVIRSPQRGKLPKSSIKKETNAKAGHRLWSLLVKTKRRRNRYGRIEAMLHQ

SEQ ID NO: 10002 - DNA, 1719 bp, Streptomyces antibioticus
  CDS (1)..(1719): transl_table=11
atgagtctgcgcaaggtgctcatcgccaaccgtggcgaaatcgctgtccgcgtggcccgggcctgccgggacgccgggatcgcgagcgtggccgtctacgccgacccggaccgcgacgctgtgcacgtacgggccgccgacgaggcgttcgcgctggggggtgacaccccggccaccagctacctggacatcgagaaggtgctgctggccgccaagcagtccggtgcggacgcgatccaccccggctacggcttcctgtccgagaacgccgagttcgcccaggccgttctcgacgcgggcctgatctggatcggcccgccgccgcaggcgatccgggacctgggtgacaaggtcgccgcccgtcacatcgcccagcgcgccggcgccccgctggtggcgggtacgccggacccggtgagtggtgcggaggaggtcgtggctttcgccgaggagcacggtctgccgatcgcgatcaaggccgcgttcggcggcggcgggcgcggtctgaaggtcgcccgcaccctcgaagaggtccccgagctgtacgagtccgccgtgcgtgaggccgtcgccgcgttcggccgtggcgagtgcttcgtcgagcgctacctcgaccggccgcggcatgtggagacgcagtgcctggccgacaagcacggcaacgtcgtcgtggtctccacccgcgactgctccctgcagcgccgtcaccagaaactggtcgaggaggctcccgcaccgttcctgtccgaggagcagatggcggagctgtaccgggcgtcgaaggccatcctgaaggaggccgggtacgagggcgcgggcacgtgtgagttcctggtcgggcaggacggcacgatctccttcctggaggtcaacacccgcctgcaggtcgagcacccggtcaccgaggaagtcgccggcatcgacctggtccgggagatgttccgcatcgccgacggcgaacccctcggctacgacgacccggtgctgcgcggtcactccttcgagttccgtatcaacggtgaggacccgggcgtgcgtctggacgcgggcgtggaggccggcagtgtgatcggcccggcgtgggactccctgctggccaagctgatcgtcaccggccgcacccgcaaggaagccctccagcgggccgcccgcgcgctggaggagttccgtgtcgagggcatggccaccgccatccccttccaccgcaaggtcgtcaccgaccccgccttcgcccccgaactcaccggctccagcgagccgttcacggtccacacccggtggatcgagaccgagttcgtcaacgacatcaagcccttcaccgcccccgccgacgccgaggccgacgaggatgcggcgcgtgagacggtcgtggtcgaggtcggcggcaagcgcctggaggtctccctgccctccagcctgggcatgagcctggcccgcaccgggctcgcggccggggccaagcccaagcggcgcgcggcgaagaagtccgggcccgtcgcctccggcgacaccctgacctcccccatgcagggcaccatcgtcaagatcgccgtcgaggaaggccagcaggtcaaggagggcgacctggtcgtcgtcctggaggccatgaagatggaacagcccctcaacgcccacaaggcgggcaccatcaagggcctgaccgccgaggtcggcgcctccctcacctccggcgccgccatctgcgagatcacggactga

SEQ ID NO: 10003 - protein, 572 aa, Streptomyces antibioticus
MSLRKVLIANRGEIAVRVARACRDAGIASVAVYADPDRDAVHVRAADEAFALGGDTPATSYLDIEKVLLAAKQSGADAIHPGYGFLSENAEFAQAVLDAGLIWIGPPPQAIRDLGDKVAARHIAQRAGAPLVAGTPDPVSGAEEVVAFAEEHGLPIAIKAAFGGGGRGLKVARTLEEVPELYESAVREAVAAFGRGECFVERYLDRPRHVETQCLADKHGNVVVVSTRDCSLQRRHQKLVEEAPAPFLSEEQMAELYRASKAILKEAGYEGAGTCEFLVGQDGTISFLEVNTRLQVEHPVTEEVAGIDLVREMFRIADGEPLGYDDPVLRGHSFEFRINGEDPGVRLDAGVEAGSVIGPAWDSLLAKLIVTGRTRKEALQRAARALEEFRVEGMATAIPFHRKVVTDPAFAPELTGSSEPFTVHTRWIETEFVNDIKPFTAPADAEADEDAARETVVVEVGGKRLEVSLPSSLGMSLARTGLAAGAKPKRRAAKKSGPVASGDTLTSPMQGTIVKIAVEEGQQVKEGDLVVVLEAMKMEQPLNAHKAGTIKGLTAEVGASLTSGAAICEITD

SEQ ID NO: 10004 - DNA, 1350 bp, Bacillus amyloliquefaciens
  CDS (1)..(1350): transl_table=11
ttgtttaaaaaagtcctgattgccaacagaggagaaatcgccttacgaattatccgcacctgcaaacgtctcggcatcccctcggcagctgtgtattcagaagccgaccgggacgcgctgcatgtaaaagcggctgatgaggcctatccgatcggtaaatcgagagtaaatgaaagctatttacatatcgacagaatcatagaagccgccaaatccgccggagcggacgccattcatccgggctacgggcttctgtcagaaaacagcctgttcgccgaacgctgccgaaaagaacaaatcacatttatcggtccgcccggtgatatcatcgccaagatgggcagcaagatagaagcccgaaaaacgatgcaaaaagcaaaggtcccgatcgttcccggtgtttcagagccattgcccgatgttcactccgccttagccgaagcccgtgccatcggttttccggtcatgctgaaagcgtccgcaggaggaggcggaatcggcatgcagatcgtacattcagaagaagagctggccaaagcgtttgaaggcaatcaaaagcgggccgcctccttttttggagacggcgcaatgtatatggaaaaggtcattgaaaatgcccgtcatattgaaattcagatactcgcagattctttcggcaacaccgttcatctgtttgaacgtgactgttcagtacaaaggcgccaccaaaaagtgatagaagaagcgccgtcgccgtttgttgacgatgaattaagacaaagactcggtgaaaccgccattaaagccgcaaaatcgatcggctaccaaaatgcaggcacaatagaatttctcgtcgacgaaaagaaacaaatctattttttagagatgaacaccagactgcaggtggagcatccggtgacagaagaaattacaggactggatcttgtggaagaacagctgaaaattgccgctgggcaggcgctgcctttctcgcagaaagatatcaaccaccgcggtcatgcgatagaagtgcggatctatgcggaagatccggtcaccttttacccgtctcccggtaccatctcgtctttttccgttttaagacacccgtcagtgcgacacgaatgcgccgtcgaaaagggaagcgtcatttctccgttttacgatccgatgattgccaaaatggtcgtcacggcgaatacgagaaaacaagccattgaacaactgaaaaccgcccttggcgaatatcatgtagaagggattaaaaccaacattccgctgctgacaaaaattgcccattcagaagtgtttgaaaagggcgaggcaacaaccggttttttacaaacaatgaacgagggggcgtcaaaatga

SEQ ID NO: 10005 - protein, 449 aa, Bacillus amyloliquefaciens
MFKKVLIANRGEIALRIIRTCKRLGIPSAAVYSEADRDALHVKAADEAYPIGKSRVNESYLHIDRIIEAAKSAGADAIHPGYGLLSENSLFAERCRKEQITFIGPPGDIIAKMGSKIEARKTMQKAKVPIVPGVSEPLPDVHSALAEARAIGFPVMLKASAGGGGIGMQIVHSEEELAKAFEGNQKRAASFFGDGAMYMEKVIENARHIEIQILADSFGNTVHLFERDCSVQRRHQKVIEEAPSPFVDDELRQRLGETAIKAAKSIGYQNAGTIEFLVDEKKQIYFLEMNTRLQVEHPVTEEITGLDLVEEQLKIAAGQALPFSQKDINHRGHAIEVRIYAEDPVTFYPSPGTISSFSVLRHPSVRHECAVEKGSVISPFYDPMIAKMVVTANTRKQAIEQLKTALGEYHVEGIKTNIPLLTKIAHSEVFEKGEATTGFLQTMNEGASK

SEQ ID NO: 10006 - DNA, 3468 bp, Agrobacterium vitis
  CDS (1)..(3468): transl_table=11
ttgtctatttccaagatcctagttgccaatcgctccgaaatcgccattcgcgtgtttcgggctgccaatgaactcggcataaaaacggtcgccatctgggctgaggaggacaagctctccctgcatcgcttcaaggcggacgaaagctatcaggtcggtcgcggcccgcatctgaagcgggatctcggcccgatcgaaagctatctttccattgaggaaatcatccgtgtcgccaaactgtcaggcgcggacgccatccatccgggctatggccttctgtccgaaagtcccgaatttgtcgatgcctgtaacgatgcaggtctgattttcatcggcccgacctccgatacgatgcggcaattgggcaacaaggtcgctgcccgcaatctggcggtagacgtcggcgttcccgtggtgccagccacagaaccgctgcctgatgacatggacaccgtggccaaaatggcaggcgagatcggctatccgctgatgcttaaggcatcctggggcggtggcgggcgcggcatgcgggtgatccgctccgaaagcgatctggcccgcgaagtcacggaggccaagcgcgaggcaaaggcggccttcggcaaggatgaagtctatctggaaaagctggtggaaaatgcccgccatgtcgaaagccagatcctgggtgatacccatggcaatgccgtgcatctgttcgaacgcgattgctcggtgcagcgccgcaaccagaaagtcgtggaacgggcacccgccccctatctttccgaggagcagcgccaggaacttgccgcctattcgctgaaaattgccagagccaccggctatatcggtgccggcaccgtagaatatctgatggatgccgatactggaaaattctacttcatagaggtcaacccgcgcattcaggtggagcataccgtcaccgaagtggtgaccggtatcgacatcgtcaaggcacagatccatatcctcgaagggtttgcgatcggcacgccggaatcgggcgttcccccgcctgaggatatccgcctgcatggccatgccctgcaatgccgtgttacgaccgaggaccccgagcataatttcattcccgattacggccgtatcaccgcctatcgctcggcggcaggtttcggcatccggcttgatggcggaactgcatataccggcgcgatcatcacccgtttctatgatccgctgctggtcaaagtgaccgccgcaggcagctcgccacaggaagcgattagccggatggatcgggcgctgcgcgaattccgtatccgcggtgtcgccaccaatctgaccttcctggaagcgatcatcggacacccgaaatttcgcgacaacacctatacgacgcgcttcatcgataccacaccggaactgttcgcccaggtcaagcgccaggaccgcgccaccaagctgctgacctatctggccgacgtgaccgtcaacggccacccggaaaccaaaggccgtcccaagccctcggacaaggcggcaaagccggtcattccctatatcgatgccagtatcaccgatggcaccaagcagaagcttgatgcactggggccaaagggctttgccgagtggatgcgcaacgaaccgcgtgtgcttttgaccgatacgaccatgcgcgacggccatcaatcgctgctggccacccggatgcgcactcatgacattgcccggatcgccagcgtctacgcccgcgccctgcccaatctactctcgctggaatgctggggcggcgcgacctttgacgtgtcgatgcggttcctgacagaagatccgtgggagcggctggcactgatccgcgaaggcgcacccaacctgctgctgcaaatgctgctccgcggcgcaaacggtgtcggctataccaattaccccgacaatgtcgtcaaatattttgtccgccaggcggcaaagggtggcatcgacctgttccgggtgtttgattgcctgaactgggtcgataatatgcgcgtctccatggatgccgtgcaggaagaaaacaagctgtgcgaggcggcaatctgctataccggcgatctcctgaacagcgccagaccgaaatatgatctgaaatattatacggctctcgccgccgaactggaaaaagcaggcgcccatatcattgccgtcaaggatatggccgggttgctcaaacccgcagccgcgaaagtgctattcaaggcgttgcgtgaggcgaccatcctgccgatccatttccacacccatgacacatcgggcatttccgccgccaccgtgctggcagccattgatgccggtgttgatgccgtggatgccgccatggacgcgctgtcgggcaacacgtcccagccctgcctcggctcgatcgttgaggctctggccggaaccgagcgcgatccggggctcgatccggaatggattcgtcggatttccttctattgggaatcagtccgcggccaatatgcggccttcgaaagcgatctcaagggtccggcctccgaagtctatctgcatgaaatgcccggcggccagttcaccaacctgaaggaacaggcccgttcgctggggctggaaacccgctggcacgaggtggcgcaggcctatgccgacgtcaaccagatgttcggtgatatcgtcaaagtcacgccttcttccaaggtggtgggcgatatggcgctgatgatggtggcacaggacctgacggtggacgatgtcgagaatccggataaggatattgccttccctgattcggtcgtctcgatgctgaagggtgacctcggccaaccacccggcggctggccgcagagcctacaaaagaaagcgttgaagggcgaaaaaccatatacggctgtgccgggctcgcttttaccgcccgccgatctcgatgccgaacgcaagaccatcgaggacaagctggagcgcagtgtcagtgatttcgaattcgaattcgcgtcctacctgatgtatccgaaagtgttcaccgatttcgccctggcctccgatacctatggcccggtctcggtcctgccgacccattcctatttctacggcatgggcgatggcgaggaattgtttgccgaaatcgaaaaaggcaagacgcttgttatcgtcaaccaagcggccagtgctcccgatgcccagggcctggtgacgatgtttttcgagctgaacggtcagccacgccgcatcaaggtgccggaccgcagccatggagcgtccggggccgccgcccgccgcaaggcggaagccgccaatgccgcccatatcggcgcaccgatgcctggtgtcatctcgcgggtcttcgtttccgcaggacaggcggtcaaagccggggacgttctactgtccatcgaagcaatgaagatggaaaccgcgctgcatgccgaacacgatggcaagattgccgaagtgctggtgaaagccggtgaccagatcgacgccaaggacctgctgatcggccttgaggcataa

SEQ ID NO: 10007 - protein, 1155 aa, Agrobacterium vitis
MSISKILVANRSEIAIRVFRAANELGIKTVAIWAEEDKLSLHRFKADESYQVGRGPHLKRDLGPIESYLSIEEIIRVAKLSGADAIHPGYGLLSESPEFVDACNDAGLIFIGPTSDTMRQLGNKVAARNLAVDVGVPVVPATEPLPDDMDTVAKMAGEIGYPLMLKASWGGGGRGMRVIRSESDLAREVTEAKREAKAAFGKDEVYLEKLVENARHVESQILGDTHGNAVHLFERDCSVQRRNQKVVERAPAPYLSEEQRQELAAYSLKIARATGYIGAGTVEYLMDADTGKFYFIEVNPRIQVEHTVTEVVTGIDIVKAQIHILEGFAIGTPESGVPPPEDIRLHGHALQCRVTTEDPEHNFIPDYGRITAYRSAAGFGIRLDGGTAYTGAIITRFYDPLLVKVTAAGSSPQEAISRMDRALREFRIRGVATNLTFLEAIIGHPKFRDNTYTTRFIDTTPELFAQVKRQDRATKLLTYLADVTVNGHPETKGRPKPSDKAAKPVIPYIDASITDGTKQKLDALGPKGFAEWMRNEPRVLLTDTTMRDGHQSLLATRMRTHDIARIASVYARALPNLLSLECWGGATFDVSMRFLTEDPWERLALIREGAPNLLLQMLLRGANGVGYTNYPDNVVKYFVRQAAKGGIDLFRVFDCLNWVDNMRVSMDAVQEENKLCEAAICYTGDLLNSARPKYDLKYYTALAAELEKAGAHIIAVKDMAGLLKPAAAKVLFKALREATILPIHFHTHDTSGISAATVLAAIDAGVDAVDAAMDALSGNTSQPCLGSIVEALAGTERDPGLDPEWIRRISFYWESVRGQYAAFESDLKGPASEVYLHEMPGGQFTNLKEQARSLGLETRWHEVAQAYADVNQMFGDIVKVTPSSKVVGDMALMMVAQDLTVDDVENPDKDIAFPDSVVSMLKGDLGQPPGGWPQSLQKKALKGEKPYTAVPGSLLPPADLDAERKTIEDKLERSVSDFEFEFASYLMYPKVFTDFALASDTYGPVSVLPTHSYFYGMGDGEELFAEIEKGKTLVIVNQAASAPDAQGLVTMFFELNGQPRRIKVPDRSHGASGAAARRKAEAANAAHIGAPMPGVISRVFVSAGQAVKAGDVLLSIEAMKMETALHAEHDGKIAEVLVKAGDQIDAKDLLIGLEA

SEQ ID NO: 10008 - DNA, 6690 bp, Oryza sativa subsp
  CDS (1)..(6690)
atggagggatcttaccaaatgaatggcatactgaacgggatgtctaattcgaggcatccgtcgtcaccctctgaggtcgatgagttctgcaaagcgctcggtggtgattcaccgatacacagtgtgctggttgccaacaatggcatggccgctgtcaagttcatgcgcagcatccgtacatgggcgctggagacctttgggacggagaaggcgattcttttggtcgccatggcaactcccgaggacttgaagataaacgcggagcacataaggatcgccgaccaattcgtagaagttcctggtggtacaaataataacaattatgcgaatgtacagctcatagtggagatagcagagagaacacatgtttctgcagtttggcctggctggggtcatgcatctgagaatcctgaacttccggacgcactgaaggagaaaggaataatttttcttgggccaccatcagccgcgatggcagcgctaggtgataagattggttcatctcttattgcacaagcagcaggagttccaactcttccatggagtggatcacatgtgaaaattccaccagaaagctgcaattcgatacctgaggagatgtacaggagtgcctgtgtctccactacagaggaagcagtagctagttgtcaggtggtgggatatcctgctatgatcaaggcatcatggggtggtggtggtaaaggaataaggaaggtacataatgatgatgaggtgagagcactgtttaagcaagttcagggagaagtccctggctcacctatatttattatgaaggtggcatctcagagccgacatctagaggttcagttgctctgtgacaaacatggcaatgtggcagctctgcacagtcgagactgtagtgttcaaagaaggcaccaaaagattattgaggaggggccaattacagttgctccttcagagacagttaaagagcttgagcaagcagcaaggcggcttgctaaatgtgtgcattatgtgggtgctgctacagtagaatatttgtacagcatggaaacaggagaatactattttctggagcttaatccacggttgcaagtagaacaccctgttaccgaatggatagctgaaataaacttgcctgcagctcaagttgttgtaggaatgggtgtgccgctctacaatattcctgagatcagacgcttttatggaatggagcatggtggtggttacgatgcgtggaggaaaatatcagctgttgcaactaagtttgatttggataatgcacagtctgtaaagccaaagggtcactgtgtagcagtcagagttaccagtgaggatccagatgatggatttaagcctactagtggaagagttgaggagctaaactttaaaagcaaaccaaatgtttgggcctatttctccgttaaggcaagacatgtgtttgcattcggggaatctagatcgttggcaatagcaaatatggtgcttgggttaaaagagatccaaatccgtggagagatacgcactaatgttgattacacagtggatctcttgaatgctgcagaatatcgggaaaataagatccacactggttggctagacagcagaattgctatgcgtgttagagctgagaggcccccatggtacctttcagttgttggaggagctctatatgaagcatcaagcaggagctcaagcgttgttacagattatgttggttatctcagcaaaggtcaaataccaccaaagcacatctctcttgttaatttgactgttaccctaaatattgagggaagcaaatacacgattgagacagtaagacgtgggccccgtagctacacattaagaatgaatgggtcagagattgaagcagagatacactcgttgcgagatggaggactcttgatgcaattggatggaaacagtcatgtaatttatgcggagacagaagctgctggtacacgccttctcatcaatgggagaacatgcttattacagaaagagcatgatccttccaaattgttggctgatacaccttgcaaacttcttcggttcttggttgcggatggctctcatgtagatgctgatacaccatatgctgaggttgaggtcatgaagatgtgtatgccgctgttactaccagcttctggtgttattcattttgtcatgcctgagggtcaagccatgcaggcggctgacctgatagcaaggttggaccttgatgacccctcttctgtgaggagagctgaaccattccatggcacctttccaaaactgggacctccaactgctgtttctggaaaagttcaccaaaagtttgctgcaagtgtcaattccgcacacatgatccttgcaggatatgaacataatatcaatgaagttgtacaagatttgttaaactgcttagatagccctgagcttccttttctacagtggcaagaacttatgtctgttttggcaactcggcttccgaaagatctcaggaatgagttggatggcaagtacaaggagtatgagttgaactctgattttcggaagaacaaggattttcctgccaagttactaaggggaattatagaggcaaatcttgcatactgttctgaaaaagatagagttactaatgagaggcttgttgagccacttatgagcctggtcaaatcatacgagggtgggagagaaagccacgctcgtgttgttgtcaagtctctatttgaggagtacctgtctgttgaggaactcttcagtgacaatattcagtctgatgtgatagaacgtctacgacttcaacatgccaaagacctcgagaaggtcgtatacattgttttctcccaccagtacacatgttatagtccagagaatgatacattttttacgttgcagttggcacttaaagcaagccagcttcttgagcatactaaattgagtgaactccgcacaagcatagcaagaagcctctcagagctggagatgtttactgaagaaggagagcgggtgtcaacacccaggagaaagatggccattaatgagaggatggaagatttagtgggtgccccacttgcagttgaagatgcccttgtggctttgtttgatcacagtgatcctacacttcagcggagagtggtcgagacatacatacgtagattgtatcagccttatctggtcaagggcagtgttcggatgcagtggcatagatctggtctaattgctttatgggaattctcggaagagcatattaagcaaagaaatggacaagatgcgatgtctctaaagcagcaagttgaggaccccgaagagaaaagatggggtgtcatggttgtaatcaagtctctccagtatttatctagtgctattgatgctgcattgaaggagacttcacactacaaagcaggtgctggaaatgtctcgaatggcaattctgcaagttccagccatggcaatatgctgcatattgctttggttggtatcaacaatcagatgagcactcttcaagacagtggtgatgaggaccaggctcaagaaaggatcaacaaaatttcaaaaattttgaaggatagtactgtaacatcacatctcaatggtgctggcgttagggtagtcagctgcattatccaaagggatgaagggcgcccaccgatgcgtcactccttccaatggtcagttgataagatatattatgaagaggatccgatgctccgccatgttgaacctcctctatctacattccttgagttgaacaaggtgaatttggatggttacaatgaagtaaagtacactccatcacgcgatcgccagtggcatatttacacactcatcaagaacaagaaagatcagagatcaaatgaccagaggttgttccttcgtaccatagtaaggcaaccaggtgtgaccaatgggtttttgtcaggaaatgttgacaatgaagtaggccgtgctcaggcttcatcatcatacacatcaagtagtatactcagatcactgatggcagcactagaagaaatagagctacatgcacataatgagacagtgaggtcaagctattcacacatgtatctgtgcatattgagagtacaacagttgtttgatcttataccattttcaagaacgattgataatgttggtcaagatgaagcaactgcatgtacgcttttgaagaatatggctttgaatatatatgaacatgttggggtgaggatgcatcgcctttctgtgtgtcagtgggaagtgaagttatggttggattgtgatggacaagcaagcggtgcttggagagtagttgttaccaatgtaactggccacacctgcactgtcgatatttaccgagaagtggaggattctaatacacataaacttttctaccactctgttacaccatcactgggtcctttgcatggcattgtgttggatgaaccatacaagccattggatgctattgacctcaaacgttactctgctaggaagaacgaaactacgtactgctatgacttcccgctggcttttgaaacagcactgaagaggtcatggaaatcaaccctctctgttgttgctgaagctaatgagcataataagagctatgctaaagtgacagagcttatgtttgctgattcaactggatcatggggtactcctttggttccagttgagcgttctccaggtatcaatgatattggcattgtcgcttggatcatgaagctctccacaccagaatttccaagtggccgggagattattgttgtttcaaatgatgtgacatttaaagctggatcatttggtcctagggaagatgctttctttgatgcggtcaccaatcttgcttgtgagaggaaacttcctcttatctacttgtcagcaactgctggtgctaggctcggtgtagctgaggaaataaaagcatgcttcaatgttggttggtctgatgacgagagccctgaacgtggttttcattacatttacctcactgaacaagattattcgcgcctgagttcttcggttatagcccatgaactgaaactagaaagtggagaaactagatgggttgttgataccattgttggaaaagaggatggactcggttgtgagaacttgcatggaagtggtgccattgccagtgcctattctaaagcatacaaggagacctttactctgacattcgtaactggacgagctgttggaattggtgcttatcttgctcggttaggcatgaggtgtatacagcgtcttgatcagccaattattttgacaggattttctgcgctgaataagcttctggggcgggaggtatacagctctcacatgcaactaggtggccccaaaatcatggctacaaatggtgtcgtccatctgactgtgtcagatgaccttgaaggtgtttctgcaatcttgaaatggctcagctatgttcctccttatgttggtggtcctcttcctatcatgaagcctcttgacccaccggatagacctgtaacatacttccctgagaattcatgtgatgctcgtgcagctatctgcggtgtgcaggacagtcaaggcaagtggatgggtggtatgtttgacagagaaagcttcgtggagacattagaaggctgggcaaaaactgttgtcaccggaagagcaaagcttggtggaattccagttggtgtcatagctgtggaaacccagactatgatgcaagtcatccctgctgatccaggtcagcttgattctgccgagcgtgtggttcctcaagcagggcaggtgtggtttcctgattctgccaccaaaacagcccaggcattgctggatttcaaccgtgaagagcttccgctgttcatcctcgctaactggagaggcttttctggtgggcaaagggatctgtttgaaggaatccttcaggctggttctaatattgttgagaatctgaggacatataaccagcctgcttttgtgtatattccaatgggcggagagcttaggggaggtgcatgggttgtggtagatagcaaaatcaatccagaacacattgagatgtatgctgagagaactgcaaaaggtaatgtccttgaaccagaaggattggttgagatcaaattcaggccaaaggaactggaagaatgcatgctaaggcttgacccggagttgatcaagctgagtacaaggctgagagaaatgaagaaggaaaatgctggcctctcggaaatggacaccactaggaggagtattattgctcggatgaagcaactgatgcctatatatacccaggttgctacacggtttgctgaattgcatgacacctctgctagaatggctgccaaaggtgtgatcggaaaggttgtcgattgggaagaatctcggtcctttttctataggaggttgcgaaggagagttactgaagatgcacttgccaaggaaatcagagaagctgctggcgagcagctgtcccagaaatctgcattggactatatcaagaaatggtacctttcttccaatggatctgatggaaacagtgaaaagtggaataacgatgaagctttctttgcttggaaagatgatccaacaaactatgagaatcaactcgaggagttgaaggctgaaagagtatccaagtggctctcgcgtctcgctgaaagccctgatgtgaaagctttgccaaatggtctttcaattgttcttaacaagatgaatccttcaaagagggagcaggttattgatggtctcaggcagcttctgggttga

SEQ ID NO: 10009 - protein, 2229 aa, Oryza sativa subsp
MEGSYQMNGILNGMSNSRHPSSPSEVDEFCKALGGDSPIHSVLVANNGMAAVKFMRSIRTWALETFGTEKAILLVAMATPEDLKINAEHIRIADQFVEVPGGTNNNNYANVQLIVEIAERTHVSAVWPGWGHASENPELPDALKEKGIIFLGPPSAAMAALGDKIGSSLIAQAAGVPTLPWSGSHVKIPPESCNSIPEEMYRSACVSTTEEAVASCQVVGYPAMIKASWGGGGKGIRKVHNDDEVRALFKQVQGEVPGSPIFIMKVASQSRHLEVQLLCDKHGNVAALHSRDCSVQRRHQKIIEEGPITVAPSETVKELEQAARRLAKCVHYVGAATVEYLYSMETGEYYFLELNPRLQVEHPVTEWIAEINLPAAQVVVGMGVPLYNIPEIRRFYGMEHGGGYDAWRKISAVATKFDLDNAQSVKPKGHCVAVRVTSEDPDDGFKPTSGRVEELNFKSKPNVWAYFSVKARHVFAFGESRSLAIANMVLGLKEIQIRGEIRTNVDYTVDLLNAAEYRENKIHTGWLDSRIAMRVRAERPPWYLSVVGGALYEASSRSSSVVTDYVGYLSKGQIPPKHISLVNLTVTLNIEGSKYTIETVRRGPRSYTLRMNGSEIEAEIHSLRDGGLLMQLDGNSHVIYAETEAAGTRLLINGRTCLLQKEHDPSKLLADTPCKLLRFLVADGSHVDADTPYAEVEVMKMCMPLLLPASGVIHFVMPEGQAMQAADLIARLDLDDPSSVRRAEPFHGTFPKLGPPTAVSGKVHQKFAASVNSAHMILAGYEHNINEVVQDLLNCLDSPELPFLQWQELMSVLATRLPKDLRNELDGKYKEYELNSDFRKNKDFPAKLLRGIIEANLAYCSEKDRVTNERLVEPLMSLVKSYEGGRESHARVVVKSLFEEYLSVEELFSDNIQSDVIERLRLQHAKDLEKVVYIVFSHQYTCYSPENDTFFTLQLALKASQLLEHTKLSELRTSIARSLSELEMFTEEGERVSTPRRKMAINERMEDLVGAPLAVEDALVALFDHSDPTLQRRVVETYIRRLYQPYLVKGSVRMQWHRSGLIALWEFSEEHIKQRNGQDAMSLKQQVEDPEEKRWGVMVVIKSLQYLSSAIDAALKETSHYKAGAGNVSNGNSASSSHGNMLHIALVGINNQMSTLQDSGDEDQAQERINKISKILKDSTVTSHLNGAGVRVVSCIIQRDEGRPPMRHSFQWSVDKIYYEEDPMLRHVEPPLSTFLELNKVNLDGYNEVKYTPSRDRQWHIYTLIKNKKDQRSNDQRLFLRTIVRQPGVTNGFLSGNVDNEVGRAQASSSYTSSSILRSLMAALEEIELHAHNETVRSSYSHMYLCILRVQQLFDLIPFSRTIDNVGQDEATACTLLKNMALNIYEHVGVRMHRLSVCQWEVKLWLDCDGQASGAWRVVVTNVTGHTCTVDIYREVEDSNTHKLFYHSVTPSLGPLHGIVLDEPYKPLDAIDLKRYSARKNETTYCYDFPLAFETALKRSWKSTLSVVAEANEHNKSYAKVTELMFADSTGSWGTPLVPVERSPGINDIGIVAWIMKLSTPEFPSGREIIVVSNDVTFKAGSFGPREDAFFDAVTNLACERKLPLIYLSATAGARLGVAEEIKACFNVGWSDDESPERGFHYIYLTEQDYSRLSSSVIAHELKLESGETRWVVDTIVGKEDGLGCENLHGSGAIASAYSKAYKETFTLTFVTGRAVGIGAYLARLGMRCIQRLDQPIILTGFSALNKLLGREVYSSHMQLGGPKIMATNGVVHLTVSDDLEGVSAILKWLSYVPPYVGGPLPIMKPLDPPDRPVTYFPENSCDARAAICGVQDSQGKWMGGMFDRESFVETLEGWAKTVVTGRAKLGGIPVGVIAVETQTMMQVIPADPGQLDSAERVVPQAGQVWFPDSATKTAQALLDFNREELPLFILANWRGFSGGQRDLFEGILQAGSNIVENLRTYNQPAFVYIPMGGELRGGAWVVVDSKINPEHIEMYAERTAKGNVLEPEGLVEIKFRPKELEECMLRLDPELIKLSTRLREMKKENAGLSEMDTTRRSIIARMKQLMPIYTQVATRFAELHDTSARMAAKGVIGKVVDWEESRSFFYRRLRRRVTEDALAKEIREAAGEQLSQKSALDYIKKWYLSSNGSDGNSEKWNNDEAFFAWKDDPTNYENQLEELKAERVSKWLSRLAESPDVKALPNGLSIVLNKMNPSKREQVIDGLRQLLG

SEQ ID NO: 10010 - DNA, 6978 bp, Zea mays
  CDS (1)..(6978)
atgtcacagcttggattagccgcagctgcctcaaaggccttgccactactccctaatcgccagagaagttcagctgggactacattctcatcatcttcattatcgaggcccttaaacagaaggaaaagccgtactcgttcactccgtgatggcggagatggggtatcagatgccaaaaagcacagccagtctgttcgtcaaggtcttgctggcattatcgacctcccaagtgaggcaccttccgaagtggatatttcacatggatctgaggatcctagggggccaacagattcttatcaaatgaatgggattatcaatgaaacacataatggaagacatgcctcagtgtccaaggttgttgaattttgtgcggcactaggtggcaaaacaccaattcacagtatattagtggccaacaatggaatggcagcagcaaaatttatgaggagtgtccggacatgggctaatgatacttttggatctgagaaggcaattcaactcatagctatggcaactccggaagacatgaggataaatgcagaacacattagaattgctgaccaattcgtagaggtgcctggtggaacaaacaataataactacgccaatgttcaactcatagtggagatggcacaaaaactaggtgtttctgctgtttggcctggttggggtcatgcttctgagaatcctgaactgccagatgcattgaccgcaaaagggatcgtttttcttggcccacctgcatcatcaatgaatgctttgggagataaggtcggctcagctctcattgctcaagcagccggggtcccaactcttgctcggagtggatcacatgttgaagttccattagagtgctgcttagacgcgatacctgaggagatgtatagaaaagcttgcgttactaccacagaggaagcagttgcaagttgtcaagtggttggttatcctgccatgattaaggcatcctggggaggtggtggtaaaggaataagaaaggttcataatgatgatgaggttagagcgctgtttaagcaagtacaaggtgaagtccctggctccccaatatttgtcatgaggcttgcatcccagagtcggcatcttgaagttcagttgctttgtgatcaatatggtaatgtagcagcacttcacagtcgtgattgcagtgtgcaacggcgacaccagaagattattgaagaaggtccagttactgttgctcctcgtgagacagttaaagcacttgagcaggcagcaaggaggcttgctaaggctgtgggttatgttggtgctgctactgttgagtatctttacagcatggaaactggagactactattttctggaacttaatccccgactacaggttgagcatccagtcaccgagtggatagctgaagtaaatctgcctgcagctcaagttgctgttggaatgggcatacctctttggcagattccagaaatcagacgtttctatggaatggactatggaggagggtatgacatttggaggaaaacagcagctcttgctacaccatttaattttgatgaagtagattctcaatggccaaagggccattgtgtagcagttagaattactagtgaggacccagatgatggtttcaaacctactggtgggaaagtgaaggagataagttttaaaagcaagcctaatgtttgggcctacttctcagtaaagtctggtggaggcattcatgaatttgctgattctcagttcggacatgtttttgcatatgggctctctagatcagcagcaataacaaacatgactcttgcattaaaagagattcaaattcgtggagaaattcattcaaatgttgattacacagttgacctcttaaatgcttcagactttagagaaaacaagattcatactggttggctcgacaccagaatagctatgcgtgttcaagctgagaggcccccatggtatatttcagtggttggaggtgctttatataaaacagtaaccaccaatgcagccactgtttctgaatatgttagttatctcaccaagggccagattccaccaaagcatatatcccttgtcaattctacagttaatttgaatatagaagggagcaaatacacaattgaaactgtaaggactggacatggtagctacaggttgagaatgaatgattcaacagttgaagcgaatgtacaatctttatgtgatggtggcctcttaatgcagttggatggaaacagccatgtaatttatgcagaagaagaagctggtggtacacggcttcagattgatggaaagacatgtttattgcagaatgaccatgatccatcaaagttattagctgagacaccctgcaaacttcttcgtttcttggttgctgatggtgctcatgttgatgcggatgtaccatacgcggaagttgaggttatgaagatgtgcatgcctctcttgtcacctgcttctggtgtcattcattgtatgatgtctgagggccaggcattgcaggctggtgatcttatagcaaggttggatcttgatgacccttctgctgtgaaaagagctgagccatttgatggaatatttccacaaatggagctccctgttgctgtctctagtcaagtacacaaaagatatgctgcaagtttgaatgctgctcgaatggtccttgcaggatatgagcacaatattaatgaagtcgttcaagatttggtatgctgcctggacaaccctgagcttcctttcctacagtgggatgaacttatgtctgttctagcaacgaggcttccaagaaatctcaagagtgagttagaggataaatacaaggaatacaagttgaatttttaccatggaaaaaacgaggactttccatccaagttgctaagagacatcattgaggaaaatctttcttatggttcagagaaggaaaaggctacaaatgagaggcttgttgagcctcttatgaacctactgaagtcatatgagggtgggagagagagccatgcacattttgttgtcaagtctcttttcgaggagtatcttacagtggaagaactttttagtgatggcattcagtctgacgtgattgaaacattgcggcatcagcacagtaaagacctgcagaaggttgtagacattgtgttgtctcaccagggtgtgaggaacaaagctaagcttgtaacggcacttatggaaaagctggtttatccaaatcctggtggttacagggatctgttagttcgcttttcttccctcaatcataaaagatattataagttggcccttaaagcaagtgaacttcttgaacaaaccaaactaagtgaactccgtgcaagcgttgcaagaagcctttcggatctggggatgcataagggagaaatgagtattaaggataacatggaagatttagtctctgccccattacctgttgaagatgctctgatttctttgtttgattacagtgatcgaactgttcagcagaaagtgattgagacatacatatcacgattgtaccagcctcatcttgtaaaggatagcatccaaatgaaattcaaggaatctggtgctattactttttgggaattttatgaagggcatgttgatactagaaatggacatggggctattattggtgggaagcgatggggtgccatggtcgttctcaaatcacttgaatctgcgtcaacagccattgtggctgcattaaaggattcggcacagttcaacagctctgagggcaacatgatgcacattgcattattgagtgctgaaaatgaaagtaatataagtggaataagcagtgatgatcaagctcaacataagatggaaaagcttagcaagatactgaaggatactagcgttgcaagtgatctccaagctgctggtttgaaggttataagttgcattgttcaaagagatgaagctcgcatgccaatgcgccacacattcctctggttggatgacaagagttgttatgaagaagagcagattctccggcatgtggagcctcccctctctacacttcttgaattggataagttgaaggtgaaaggatacaatgaaatgaagtatactccttcgcgtgaccgccaatggcatatctacacactaagaaatactgaaaaccccaaaatgttgcatagggtgtttttccgaactattgtcaggcaacccaatgcaggcaacaagtttacatcggctcagatcagcgacgctgaagtaggatgtcccgaagaatctctttcatttacatcaaatagcatcttaagatcattgatgactgctattgaagaattagagcttcatgcaattaggacaggtcattctcacatgtatttgtgcatactgaaagagcaaaagcttcttgacctcattccattttcagggagtacaattgttgatgttggccaagatgaagctaccgcttgttcacttttaaaatcaatggctttgaagatacatgagcttgttggtgcaaggatgcatcatctgtctgtatgccagtgggaggtgaaactcaagttggactgtgatggccctgcaagtggtacctggagagttgtaactacaaatgttactggtcacacctgcaccattgatatataccgagaagtggaggaaatagaatcgcagaagttagtgtaccattcagccacttcgtcagctggaccattgcatggtgttgcactgaataatccatatcaacctttgagtgtgattgatctaaagcgctgctctgctaggaacaacagaacaacatattgctatgattttccgctggcctttgaaactgcactgcagaagtcatggcagtccaatggctctactgtttctgaaggcaatgaaaatagtaaatcctacgtgaaggcaactgagctagtgtttgctgaaaaacatgggtcctggggcactcctataattccgatggaacgccctgctgggctcaacgacattggtatggtcgcttggatcatggagatgtcaacacctgaatttcccaatggcaggcagattattgttgtagcaaatgatatcactttcagagctggatcatttggcccaagggaagatgcattttttgaaactgtcactaacctggcttgcgaaaggaaacttcctcttatatacttggcagcaaactctggtgctaggattggcatagctgatgaagtaaaatcttgcttccgtgttggatggtctgacgaaggcagtcctgaacgagggtttcagtacatctatctgactgaagaagactatgctcgcattagctcttctgttatagcacataagctggagctagatagtggtgaaattaggtggattattgactctgttgtgggcaaggaggatgggcttggtgtcgagaacatacatggaagtgctgctattgccagtgcttattctagggcatatgaggagacatttacacttacatttgtgactgggcggactgtaggaataggagcttatcttgctcgacttggtatacggtgcatacagcgtcttgaccagcctattattttaacagggttttctgccctgaacaagctccttgggcgggaagtgtacagctcccacatgcagcttggtggtcctaagatcatggcgactaatggtgttgtccacctcactgttccagatgaccttgaaggtgtttccaatatattgaggtggctcagctatgttcctgcaaacattggtggacctcttcctattaccaaacctctggaccctccagacagacctgttgcttacatccctgagaacacatgcgatccacgtgcagctatctgtggtgtagatgacagccaagggaaatggttgggtggtatgtttgacaaagacagctttgtggagacatttgaaggatgggcaaaaacagtggttactggcagagcaaagcttggaggaattcctgtgggcgtcatagctgtggagacacagaccatgatgcagatcatccctgctgatccaggtcagcttgattcccatgagcgatctgtccctcgtgctggacaagtgtggttcccagattctgcaaccaagaccgctcaggcattattagacttcaaccgtgaaggattgcctctgttcatcctggctaattggagaggcttctctggtggacaaagagatctctttgaaggaattcttcaggctgggtcaacaattgtcgagaaccttaggacatctaatcagcctgcttttgtgtacattcctatggctggagagcttcgtggaggagcttgggttgtggtcgatagcaaaataaatccagaccgcattgagtgttatgctgaaaggactgccaaaggtaatgttctcgaacctcaagggttaattgaaatcaagttcaggtcagaggaactccaagactgtatgggtaggcttgacccagagttgataaatctgaaagcaaaactccaagatgtaaatcatggaaatggaagtctaccagacatagaagggattcggaagagtatagaagcacgtacgaaacagttgctgcctttatatacccagattgcaatacggtttgctgaattgcatgatacttccctaagaatggcagctaaaggtgtgattaagaaagttgtagactgggaagaatcacgctcgttcttctataaaaggctacggaggaggatcgcagaagatgttcttgcaaaagaaataaggcagatagtcggtgataaatttacgcaccaattagcaatggagctcatcaaggaatggtaccttgcttctcaggccacaacaggaagcactggatgggatgacgatgatgcttttgttgcctggaaggacagtcctgaaaactacaaggggcatatccaaaagcttagggctcaaaaagtgtctcattcgctctctgatcttgctgactccagttcagatctgcaagcattctcgcagggtctttctacgctattagataagatggatccctctcagagagcgaagtttgttcaggaagtcaagaaggtccttgattga

SEQ ID NO: 10011 - protein, 2325 aa, Zea mays
MSQLGLAAAASKALPLLPNRQRSSAGTTFSSSSLSRPLNRRKSRTRSLRDGGDGVSDAKKHSQSVRQGLAGIIDLPSEAPSEVDISHGSEDPRGPTDSYQMNGIINETHNGRHASVSKVVEFCAALGGKTPIHSILVANNGMAAAKFMRSVRTWANDTFGSEKAIQLIAMATPEDMRINAEHIRIADQFVEVPGGTNNNNYANVQLIVEMAQKLGVSAVWPGWGHASENPELPDALTAKGIVFLGPPASSMNALGDKVGSALIAQAAGVPTLARSGSHVEVPLECCLDAIPEEMYRKACVTTTEEAVASCQVVGYPAMIKASWGGGGKGIRKVHNDDEVRALFKQVQGEVPGSPIFVMRLASQSRHLEVQLLCDQYGNVAALHSRDCSVQRRHQKIIEEGPVTVAPRETVKALEQAARRLAKAVGYVGAATVEYLYSMETGDYYFLELNPRLQVEHPVTEWIAEVNLPAAQVAVGMGIPLWQIPEIRRFYGMDYGGGYDIWRKTAALATPFNFDEVDSQWPKGHCVAVRITSEDPDDGFKPTGGKVKEISFKSKPNVWAYFSVKSGGGIHEFADSQFGHVFAYGLSRSAAITNMTLALKEIQIRGEIHSNVDYTVDLLNASDFRENKIHTGWLDTRIAMRVQAERPPWYISVVGGALYKTVTTNAATVSEYVSYLTKGQIPPKHISLVNSTVNLNIEGSKYTIETVRTGHGSYRLRMNDSTVEANVQSLCDGGLLMQLDGNSHVIYAEEEAGGTRLQIDGKTCLLQNDHDPSKLLAETPCKLLRFLVADGAHVDADVPYAEVEVMKMCMPLLSPASGVIHCMMSEGQALQAGDLIARLDLDDPSAVKRAEPFDGIFPQMELPVAVSSQVHKRYAASLNAARMVLAGYEHNINEVVQDLVCCLDNPELPFLQWDELMSVLATRLPRNLKSELEDKYKEYKLNFYHGKNEDFPSKLLRDIIEENLSYGSEKEKATNERLVEPLMNLLKSYEGGRESHAHFVVKSLFEEYLTVEELFSDGIQSDVIETLRHQHSKDLQKVVDIVLSHQGVRNKAKLVTALMEKLVYPNPGGYRDLLVRFSSLNHKRYYKLALKASELLEQTKLSELRASVARSLSDLGMHKGEMSIKDNMEDLVSAPLPVEDALISLFDYSDRTVQQKVIETYISRLYQPHLVKDSIQMKFKESGAITFWEFYEGHVDTRNGHGAIIGGKRWGAMVVLKSLESASTAIVAALKDSAQFNSSEGNMMHIALLSAENESNISGISSDDQAQHKMEKLSKILKDTSVASDLQAAGLKVISCIVQRDEARMPMRHTFLWLDDKSCYEEEQILRHVEPPLSTLLELDKLKVKGYNEMKYTPSRDRQWHIYTLRNTENPKMLHRVFFRTIVRQPNAGNKFTSAQISDAEVGCPEESLSFTSNSILRSLMTAIEELELHAIRTGHSHMYLCILKEQKLLDLIPFSGSTIVDVGQDEATACSLLKSMALKIHELVGARMHHLSVCQWEVKLKLDCDGPASGTWRVVTTNVTGHTCTIDIYREVEEIESQKLVYHSATSSAGPLHGVALNNPYQPLSVIDLKRCSARNNRTTYCYDFPLAFETALQKSWQSNGSTVSEGNENSKSYVKATELVFAEKHGSWGTPIIPMERPAGLNDIGMVAWIMEMSTPEFPNGRQIIVVANDITFRAGSFGPREDAFFETVTNLACERKLPLIYLAANSGARIGIADEVKSCFRVGWSDEGSPERGFQYIYLTEEDYARISSSVIAHKLELDSGEIRWIIDSVVGKEDGLGVENIHGSAAIASAYSRAYEETFTLTFVTGRTVGIGAYLARLGIRCIQRLDQPIILTGFSALNKLLGREVYSSHMQLGGPKIMATNGVVHLTVPDDLEGVSNILRWLSYVPANIGGPLPITKPLDPPDRPVAYIPENTCDPRAAICGVDDSQGKWLGGMFDKDSFVETFEGWAKTVVTGRAKLGGIPVGVIAVETQTMMQIIPADPGQLDSHERSVPRAGQVWFPDSATKTAQALLDFNREGLPLFILANWRGFSGGQRDLFEGILQAGSTIVENLRTSNQPAFVYIPMAGELRGGAWVVVDSKINPDRIECYAERTAKGNVLEPQGLIEIKFRSEELQDCMGRLDPELINLKAKLQDVNHGNGSLPDIEGIRKSIEARTKQLLPLYTQIAIRFAELHDTSLRMAAKGVIKKVVDWEESRSFFYKRLRRRIAEDVLAKEIRQIVGDKFTHQLAMELIKEWYLASQATTGSTGWDDDDAFVAWKDSPENYKGHIQKLRAQKVSHSLSDLADSSSDLQAFSQGLSTLLDKMDPSQRAKFVQEVKKVLD

SEQ ID NO: 10012 - DNA, 6975 bp, Zea mays
  CDS (1)..(6975)
atgtcacagcttggattagccgcagctgcctcaaaggccttgccactactccctaatcgccagagaagttcagctgggactacattctcatcatcttcattatcgaggcccttaaacagaaggaaaagccgtactcgttcactccgtgatggcggagatggggtatcagatgccaaaaagcacagccagtctgttcgtcaaggtcttgctggcattatcgacctcccaagtgaggcaccttccgaagtggatatttcacatggatctgaggatcctagggggccaacagattcttatcaaatgaatgggattatcaatgaaacacataatggaagacatgcctcagtgtccaaggttgttgaattttgtgcggcactaggtggcaaaacaccaattcacagtatattagtggccaacaatggaatggcagcagcaaaatttatgaggagtgtccggacatgggctaatgatacttttggatctgagaaggcaattcaactcatagctatggcaactccggaagacatgaggataaatgcagaacacattagaattgctgaccaattcgtagaggtgcctggtggaacaaacaataataactacgccaatgttcaactcatagtggagatggcacaaaaactaggtgtttctgctgtttggcctggttggggtcatgcttctgagaatcctgaactgccagatgcattgaccgcaaaagggatcgtttttcttggcccacctgcatcatcaatgaatgctttgggagataaggtcggctcagctctcattgctcaagcagccggggtcccaactcttgcttggagtggatcacatgttgaagttccattagagtgctgcttagacgcgatacctgaggagatgtatagaaaagcttgcgttactaccacagaggaagcagttgcaagttgtcaagtggttggttatcctgccatgattaaggcatcctggggaggtggtggtaaaggaataagaaaggttcataatgatgatgaggttagagcgctgtttaagcaagtacaaggtgaagtccctggctccccaatatttgtcatgaggcttgcatcccagagtcggcatcttgaagttcagttgctttgtgatcaatatggtaatgtagcagcacttcacagtcgtgattgcagtgtgcaacggcgacaccagaagattattgaagaaggtccagttactgttgctcctcgtgagacagttaaagcacttgagcaggcagcaaggaggcttgctaaggctgtgggttatgttggtgctgctactgttgagtatctttacagcatggaaactggagactactattttctggaacttaatccccgactacaggttgagcatccagtcaccgagtggatagctgaagtaaatctgcctgcagctcaagttgctgttggaatgggcatacctctttggcagattccagaaatcagacgtttctatggaatggactatggaggagggtatgacatttggaggaaaacagcagctcttgctacaccatttaattttgatgaagtagattctcaatggccaaagggccattgtgtagcagttagaattactagtgaggacccagatgatggtttcaaacctactggtgggaaagtgaaggagataagttttaaaagcaagcctaatgtttgggcctacttctcagtaaagtctggtggaggcattcatgaatttgctgattctcagttcggacatgtttttgcatatgggctctctagatcagcagcaataacaaacatgactcttgcattaaaagagattcaaattcgtggagaaattcattcaaatgttgattacacagttgacctcttaaatgcttcagactttagagaaaacaagattcatactggttggctcgacaccagaatagctatgcgtgttcaagctgagaggcccccatggtatatttcagtggttgggggtgctttatataaaacagtaaccaccaatgcagccactgtttctgaatatgttagttatctcaccaagggccagattccaccaaagcatatatcccttgtcaattctacagttaatttgaatatagaagggagcaaatacacaattgaaactgtaaggactggacatggtagctacaggttgagaatgaatgattcaacagttgaagcgaatgtacaatctttatgtgatggtggcctcttaatgcagttggatggaaacagccatgtaatttatgcagaagaagaagctggtggtacacggcttcagattgatggaaagacatgtttattgcagaatgaccatgatccatcaaagttattagctgagacaccctgcaaacttcttcgtttcttggttgctgatggtgctcatgttgatgcggatgtaccatacgcggaagttgaggttatgaagatgtgcatgcctctcttgtcgcctgcttctggtgtcattcattgtatgatgtctgagggccaggcattgcaggctggtgatcttatagcaaggttggatcttgatgacccttctgctgtgaaaagagctgagccatttgatggaatatttccacaaatggagctccctgttgctgtctctagtcaagtacacaaaagatatgctgcaagtttgaatgctgctcgaatggtccttgcaggatatgagcacaatattaatgaagtcgttcaagatttggtatgctgcctggacaaccctgagcttcctttcctacagtgggatgaacttatgtctgttctagcaacgaggcttccaagaaatctcaagagtgagttagaggataaatacaaggaatacaagttgaatttttaccatggaaaaaacgaggactttccatccaagttgctaagagacatcattgaggaaaatctttcttatggttcagagaaggaaaaggctacaaatgagaggcttgttgagcctcttatgaacctactgaagtcatatgagggtgggagagagagccatgcacattttgttgtcaagtctcttttcgaggagtatcttacagtggaagaactttttagtgatggcattcagtctgacgtgattgaaacattgcggcatcagcacagtaaagacctgcagaaggttgtagacattgtgttgtctcaccagggtgtgaggaacaaagctaagcttgtaacggcacttatggaaaagctggtttatccaaatcctggtggttacagggatctgttagttcgcttttcttccctcaatcataaaagatattataagttggcccttaaagcaagtgaacttcttgaacaaaccaaactaagtgaactccgtgcaagcgttgcaagaagcctttcggatctggggatgcataagggagaaatgagtattaaggataacatggaagatttagtctctgccccattacctgttgaagatgctctgatttctttgtttgattacagtgatcgaactgttcagcagaaagtgattgagacatacatatcacgattgtaccagcctcatcttgtaaaggatagcatccaaatgaaattcaaggaatctggtgctattactttttgggaattttatgaagggcatgttgatactagaaatggacatggggctattattggtgggaagcgatggggtgccatggtcgttctcaaatcacttgaatctgcgtcaacagccattgtggctgcattaaaggattcggcacagttcaacagctctgagggcaacatgatgcacattgcattattgagtgctgaaaatgaaagtaatataagtggaataagtgatgatcaagctcaacataagatggaaaagcttagcaagatactgaaggatactagcgttgcaagtgatctccaagctgctggtttgaaggttataagttgcattgttcaaagagatgaagctcgcatgccaatgcgccacacattcctctggttggatgacaagagttgttatgaagaagagcagattctccggcatgtggagcctcccctctctacacttcttgaattggataagttgaaggtgaaaggatacaatgaaatgaagtatactccttcgcgtgaccgccaatggcatatctacacactaagaaatactgaaaaccccaaaatgttgcatagggtgtttttccgaactattgtcaggcaacccaatgcaggcaacaagtttacatcggctcagatcagcgacgctgaagtaggatgtcccgaagaatctctttcatttacatcaaatagcatcttaagatcattgatgactgctattgaagaattagagcttcatgcaattaggacaggtcattctcacatgtatttgtgcatactgaaagagcaaaagcttcttgacctcattccattttcagggagtacaattgttgatgttggccaagatgaagctaccgcttgttcacttttaaaatcaatggctttgaagatacatgagcttgttggtgcaaggatgcatcatctgtctgtatgccagtgggaggtgaaactcaagttggactgtgatggccctgcaagtggtacctggagagttgtaactacaaatgttactggtcacacctgcaccattgatatataccgagaagtggaggaaatagaatcgcagaagttagtgtaccattcagccacttcgtcagctggaccattgcatggtgttgcactgaataatccatatcaacctttgagtgtgattgatctaaagcgctgctctgctaggaacaacagaacaacatattgctatgattttccgctggcctttgaaactgcactgcagaagtcatggcagaccaatggctctactgtttctgaaggcaatgaaaatagtaaatcctacgtgaaggcaactgagctagtgtttgctgaaaaacatgggtcctggggcactcctataattccgatggaacgccctgctgggctcaacgacattggtatggtcgcttggatcatggagatgtcaacacctgaatttcccaatggcaggcagattattgttgtagcaaatgatatcactttcagagctggatcatttggcccaagggaagatgcattttttgaaactgtcactaacctggcttgcgaaaggaaacttcctcttatatacttggcagcaaactctggtgctaggattggcatagctgatgaagtaaaatcttgcttccgtgttggatggtctgacgaaggcagtcctgaacgagggtttcagtacatctatctgactgaagaagactatgctcgcattagctcttctgttatagcacataagctggagctagatagtggtgaaattaggtggattattgactctgttgtgggcaaggaggatgggcttggtgtcgagaacatacatggaagtgctgctattgccagtgcttattctagggcatatgaggagacatttacacttacatttgtgactgggcggactgtaggaataggagcttatcttgctcgacttggtatacggtgcatacagcgtcttgaccagcctattattttaacagggttttctgccctgaacaagctccttgggcgggaagtgtacagctcccacatgcagcttggtggtcctaagatcatggcgactaatggtgttgtccacctcactgttccagatgaccttgaaggtgtttccaatatattgaggtggctcagctatgttcctgcaaacattggtggacctcttcctattaccaaacctctggaccctccagacagacctgttgcttacatccctgagaacacatgcgatccacgtgcagctatctgtggtgtagatgacagccaagggaaatggttgggtggtatgtttgacaaagacagctttgtggagacatttgaaggatgggcaaaaacagtggttactggcagagcaaagcttggaggaattcctgtgggcgtcatagctgtggagacacagaccatgatgcagatcatccctgctgatccaggtcagcttgattcccatgagcgatctgtccctcgtgctggacaagtgtggttcccagattctgcaaccaagaccgctcaggcattattagacttcaaccgtgaaggattgcctctgttcatcctggctaattggagaggcttctctggtggacaaagagatctctttgaaggaattcttcaggctgggtcaacaattgtcgagaaccttaggacatataatcagcctgcttttgtgtacattcctatggctggagagcttcgtggaggagcttgggttgtggtcgatagcaaaataaatccagaccgcattgagtgttatgctgaaaggactgccaaaggtaatgttctcgaacctcaagggttaattgaaatcaagttcaggtcagaggaactccaagactgtatgggtaggcttgacccagagttgataaatctgaaagcaaaactccaagatgtaaatcatggaaatggaagtctaccagacatagaagggattcggaagagtatagaagcacgtacgaaacagttgctgcctttatatacccagattgcaatacggtttgctgaattgcatgatacttccctaagaatggcagctaaaggtgtgattaagaaagttgtagactgggaagaatcacgctcgttcttctataaaaggctacggaggaggatcgcagaagatgttcttgcaaaagaaataaggcagatagtcggtgataaatttacgcaccaattagcaatggagctcatcaaggaatggtaccttgcttctcaggccacaacaggaagcactggatgggatgacgatgatgcttttgttgcctggaaggacagtcctgaaaactacaaggggcatatccaaaagcttagggctcaaaaagtgtctcattcgctctctgatcttgctgactccagttcagatctgcaagcattctcgcagggtctttctacgctattagataagatggatccctctcagagagcgaagtttgttcaggaagtcaagaaggtccttgattga

SEQ ID NO: 10013 - protein, 2324 aa, Zea mays
MSQLGLAAAASKALPLLPNRQRSSAGTTFSSSSLSRPLNRRKSRTRSLRDGGDGVSDAKKHSQSVRQGLAGIIDLPSEAPSEVDISHGSEDPRGPTDSYQMNGIINETHNGRHASVSKVVEFCAALGGKTPIHSILVANNGMAAAKFMRSVRTWANDTFGSEKAIQLIAMATPEDMRINAEHIRIADQFVEVPGGTNNNNYANVQLIVEMAQKLGVSAVWPGWGHASENPELPDALTAKGIVFLGPPASSMNALGDKVGSALIAQAAGVPTLAWSGSHVEVPLECCLDAIPEEMYRKACVTTTEEAVASCQVVGYPAMIKASWGGGGKGIRKVHNDDEVRALFKQVQGEVPGSPIFVMRLASQSRHLEVQLLCDQYGNVAALHSRDCSVQRRHQKIIEEGPVTVAPRETVKALEQAARRLAKAVGYVGAATVEYLYSMETGDYYFLELNPRLQVEHPVTEWIAEVNLPAAQVAVGMGIPLWQIPEIRRFYGMDYGGGYDIWRKTAALATPFNFDEVDSQWPKGHCVAVRITSEDPDDGFKPTGGKVKEISFKSKPNVWAYFSVKSGGGIHEFADSQFGHVFAYGLSRSAAITNMTLALKEIQIRGEIHSNVDYTVDLLNASDFRENKIHTGWLDTRIAMRVQAERPPWYISVVGGALYKTVTTNAATVSEYVSYLTKGQIPPKHISLVNSTVNLNIEGSKYTIETVRTGHGSYRLRMNDSTVEANVQSLCDGGLLMQLDGNSHVIYAEEEAGGTRLQIDGKTCLLQNDHDPSKLLAETPCKLLRFLVADGAHVDADVPYAEVEVMKMCMPLLSPASGVIHCMMSEGQALQAGDLIARLDLDDPSAVKRAEPFDGIFPQMELPVAVSSQVHKRYAASLNAARMVLAGYEHNINEVVQDLVCCLDNPELPFLQWDELMSVLATRLPRNLKSELEDKYKEYKLNFYHGKNEDFPSKLLRDIIEENLSYGSEKEKATNERLVEPLMNLLKSYEGGRESHAHFVVKSLFEEYLTVEELFSDGIQSDVIETLRHQHSKDLQKVVDIVLSHQGVRNKAKLVTALMEKLVYPNPGGYRDLLVRFSSLNHKRYYKLALKASELLEQTKLSELRASVARSLSDLGMHKGEMSIKDNMEDLVSAPLPVEDALISLFDYSDRTVQQKVIETYISRLYQPHLVKDSIQMKFKESGAITFWEFYEGHVDTRNGHGAIIGGKRWGAMVVLKSLESASTAIVAALKDSAQFNSSEGNMMHIALLSAENESNISGISDDQAQHKMEKLSKILKDTSVASDLQAAGLKVISCIVQRDEARMPMRHTFLWLDDKSCYEEEQILRHVEPPLSTLLELDKLKVKGYNEMKYTPSRDRQWHIYTLRNTENPKMLHRVFFRTIVRQPNAGNKFTSAQISDAEVGCPEESLSFTSNSILRSLMTAIEELELHAIRTGHSHMYLCILKEQKLLDLIPFSGSTIVDVGQDEATACSLLKSMALKIHELVGARMHHLSVCQWEVKLKLDCDGPASGTWRVVTTNVTGHTCTIDIYREVEEIESQKLVYHSATSSAGPLHGVALNNPYQPLSVIDLKRCSARNNRTTYCYDFPLAFETALQKSWQTNGSTVSEGNENSKSYVKATELVFAEKHGSWGTPIIPMERPAGLNDIGMVAWIMEMSTPEFPNGRQIIVVANDITFRAGSFGPREDAFFETVTNLACERKLPLIYLAANSGARIGIADEVKSCFRVGWSDEGSPERGFQYIYLTEEDYARISSSVIAHKLELDSGEIRWIIDSVVGKEDGLGVENIHGSAAIASAYSRAYEETFTLTFVTGRTVGIGAYLARLGIRCIQRLDQPIILTGFSALNKLLGREVYSSHMQLGGPKIMATNGVVHLTVPDDLEGVSNILRWLSYVPANIGGPLPITKPLDPPDRPVAYIPENTCDPRAAICGVDDSQGKWLGGMFDKDSFVETFEGWAKTVVTGRAKLGGIPVGVIAVETQTMMQIIPADPGQLDSHERSVPRAGQVWFPDSATKTAQALLDFNREGLPLFILANWRGFSGGQRDLFEGILQAGSTIVENLRTYNQPAFVYIPMAGELRGGAWVVVDSKINPDRIECYAERTAKGNVLEPQGLIEIKFRSEELQDCMGRLDPELINLKAKLQDVNHGNGSLPDIEGIRKSIEARTKQLLPLYTQIAIRFAELHDTSLRMAAKGVIKKVVDWEESRSFFYKRLRRRIAEDVLAKEIRQIVGDKFTHQLAMELIKEWYLASQATTGSTGWDDDDAFVAWKDSPENYKGHIQKLRAQKVSHSLSDLADSSSDLQAFSQGLSTLLDKMDPSQRAKFVQEVKKVLD

SEQ ID NO: 10014 - DNA, 2004 bp, Methylobacterium extorquens
  CDS (1)..(2004): transl_table=11
atgttcgataagatcctgattgccaaccggggcgaaatcgcctgccgtatcatcaagacggcccagaaaatgggcatcaagacggtggcggtctattcggacgccgaccgtgatgcggtccacgtcgcgatggccgacgagccggtgcatatcggcccggcgcccgctgcgcagtcctaccttctgatcgaaaagatcatcgacgcctgcaagcagaccggcgcccaagcggtccatccgggctacggcttcctttccgagcgcgagtccttccccaaggcgctggcggaagcgggcatcgtctttatcggccccaatccgggtgccatcgccgccatgggcgacaagatcgaatcgaagaaggccgcggccgcggccgaggtctcgacggtgccgggcttcctcggcgtgatcgagagccccgagcacgccgtgacgatcgccgatgagatcggctatccggtgatgatcaaggcgtcggcgggcggcggcggcaagggtatgcgcatcgccgaatcggccgatgaggtcgccgagggcttcgcccgcgccaagtccgaggcctcgtcctccttcggcgacgaccgcgtcttcgtggaaaagttcatcaccgacccgcgccacatcgagatccaggtgatcggcgataagcacggcaacgtgatctatctcggtgagcgcgagtgctcgatccagcgccgcaaccagaaggtcatcgaggaggcgccgtcgccgctcctcgacgaagagacgcgccgcaagatgggcgagcaggcggtcgcgctcgccaaggccgtgaattacgactccgccggcaccgtcgagttcgtcgccggccaggacaagtcgttctacttcctcgaaatgaacacccgcctgcaggtggagcacccggtcaccgagatgatcaccgggctcgacctcgtcgagctgatgatccgggtggccgccggcgagaagctgccgctgtcgcaggatcaggtgaagctcgacggctgggcggtcgagagccgcgtctatgccgaggatccgacccgcaacttcctgccctcgatcggtcggctgactacctaccagccgccggaggagggcccgctcggcggggcgatcgtgcgcaacgataccggcgtggaggagggcggcgagatcgcgatccactacgatccgatgattgccaagctcgtaacctgggcgccgacccggttggaagccatcgaagcgcaggcgaccgcgctcgacgccttcgccatcgagggcatccgccacaacatccccttcctcgccaccctgatggcccatccccgctggcgcgacggccggctctcgacgggcttcatcaaggaagagttccccgaaggcttcatcgcacccgagcccgaggggccggtcgctcatcggctcgcggcggtggcggcggcgatcgatcacaagctcaacatccgcaagcgcggcatctccggccagatgcgcgacccgagcctgctgaccttccagcgcgagcgcgtggtggtgctctccggccagcgcttcaacgtcaccgtcgatcctgacggcgacgacctcctcgtcaccttcgacgacggtacgacagccccggtgcgcagcgcgtggcgccccggtgcgccggtctggagcggtacggtcggagatcagtcggtcgcgatccaggtgcgtccgctcctcaacggtgtgttcctgcagcatgcgggcgcggcggcggaagcgcgggtgttcacccgccgcgaggccgaactcgccgacctgatgccggtcaaggagaatgccggctccggcaagcagctcctttgcccgatgcccggcctggtcaagcagatcatggtcagcgagggccaggaggtgaagaacggcgagccgctggccatcgtcgaggcgatgaagatggagaacgtgctgcgcgccgaacgcgacggcaccatctccaagatcgccgccaaggaaggcgacagcctcgccgtcgatgccgtgatcctggaattcgcctga

SEQ ID NO: 10015 - protein, 667 aa, Methylobacterium extorquens
MFDKILIANRGEIACRIIKTAQKMGIKTVAVYSDADRDAVHVAMADEPVHIGPAPAAQSYLLIEKIIDACKQTGAQAVHPGYGFLSERESFPKALAEAGIVFIGPNPGAIAAMGDKIESKKAAAAAEVSTVPGFLGVIESPEHAVTIADEIGYPVMIKASAGGGGKGMRIAESADEVAEGFARAKSEASSSFGDDRVFVEKFITDPRHIEIQVIGDKHGNVIYLGERECSIQRRNQKVIEEAPSPLLDEETRRKMGEQAVALAKAVNYDSAGTVEFVAGQDKSFYFLEMNTRLQVEHPVTEMITGLDLVELMIRVAAGEKLPLSQDQVKLDGWAVESRVYAEDPTRNFLPSIGRLTTYQPPEEGPLGGAIVRNDTGVEEGGEIAIHYDPMIAKLVTWAPTRLEAIEAQATALDAFAIEGIRHNIPFLATLMAHPRWRDGRLSTGFIKEEFPEGFIAPEPEGPVAHRLAAVAAAIDHKLNIRKRGISGQMRDPSLLTFQRERVVVLSGQRFNVTVDPDGDDLLVTFDDGTTAPVRSAWRPGAPVWSGTVGDQSVAIQVRPLLNGVFLQHAGAAAEARVFTRREAELADLMPVKENAGSGKQLLCPMPGLVKQIMVSEGQEVKNGEPLAIVEAMKMENVLRAERDGTISKIAAKEGDSLAVDAVILEFA

SEQ ID NO: 10016 - DNA, 1530 bp, Acidianus brierleyi
  CDS (1)..(1530): transl_table=11
atgccgccttttagtagagttttagttgcgaacagaggagaaatagctaccagagtgcttaaggcgataaaagaaatgggaatgactgcaattgcagtatattctgaggcagataaatacgccgttcatacaaaatatgctgatgaagcttattatattggtaaggctcctgcgttagatagctatcttaatattgaacatataatagacgctgctgaaaaagctcatgttgacgcaattcatcctggatacggatttttatcagagaatgcagaattcgcagaagcagtagaaaaagctggcataacgtttatcggtccttcatccgaggtcatgagaaaaataaaggataaactagatggaaaaagattagcaaatatggcaggagttcctacagctcctggatcagacggccctgttacctctatagacgaagcgttaaagttagctgaaaaaataggatacccaataatggttaaggctgctagcggaggtggaggtgtaggtataacaagagtagataatcaggatcaattaatggacgtttgggaaagaaataaaagattagcttatcaagcctttggaaaagcagacttatttatagaaaaatacgctgtaaatcctaggcatatagaatttcaattaataggagataaatatggtaattatgtagtagcttgggaaagagaatgtactattcagaggagaaatcaaaaactaatagaggaagcgccatctcctgctcttaaaatggaagaaagagaatctatgtttgagccaatcataaaatttgggaaattgataaactattttacattaggtacatttgaaactgctttttcggacgtttctagagatttctactttttagaactcaataagagattacaagttgaacatcctaccacagagcttatatttaggatagatttggtaaaactgcagataaaacttgctgcaggagagcatctgccttttagccaagaggatctaaacaagagagttagaggaacagcaatagaatatagaataaatgcagaagacgctttaaataattttactggaagttccggatttgtaacatattatagggagcctacagggcctggcgttagagtagatagtggaatagaatctggtagctacgttcctccatattacgattccctagtatctaaattaatagtttatggggaaagtagagaatatgctatacaagccggaataagagcgttagctgactataaaataggaggaataaaaactactatagagctttataaatggataatgcaagatccagattttcaagaaggaaaattcagtacttcgtatatttcacaaaaaactgatcaatttgtaaaatatttgagagaacaagaggagataaaagcagccatagctgcagaaattcagagtagaggacttttgagaacaagcagcactgataacaaaggtaaagcccaaagtaagtctggttggaagacttacggtataataacgcaatcttctacgagggtgatgtggtaa

SEQ ID NO: 10017 - protein, 509 aa, Acidianus brierleyi
MPPFSRVLVANRGEIATRVLKAIKEMGMTAIAVYSEADKYAVHTKYADEAYYIGKAPALDSYLNIEHIIDAAEKAHVDAIHPGYGFLSENAEFAEAVEKAGITFIGPSSEVMRKIKDKLDGKRLANMAGVPTAPGSDGPVTSIDEALKLAEKIGYPIMVKAASGGGGVGITRVDNQDQLMDVWERNKRLAYQAFGKADLFIEKYAVNPRHIEFQLIGDKYGNYVVAWERECTIQRRNQKLIEEAPSPALKMEERESMFEPIIKFGKLINYFTLGTFETAFSDVSRDFYFLELNKRLQVEHPTTELIFRIDLVKLQIKLAAGEHLPFSQEDLNKRVRGTAIEYRINAEDALNNFTGSSGFVTYYREPTGPGVRVDSGIESGSYVPPYYDSLVSKLIVYGESREYAIQAGIRALADYKIGGIKTTIELYKWIMQDPDFQEGKFSTSYISQKTDQFVKYLREQEEIKAAIAAEIQSRGLLRTSSTDNKGKAQSKSGWKTYGIITQSSTRVMW

SEQ ID NO: 10018 - DNA, 1797 bp, Amycolatopsis mediterranei
  CDS (1)..(1797): transl_table=11
gtggccgagcaggtcggcgaaaccacgggtggtccggtgaccaagatcctggtcgccaaccgtggcgaaatcgcggtacgcgtcatcagagccgcgaaggacgctggcctggccagtgtcgcggtgtacgccgacccggatcgcgacgcgccacacgtccggctggccgacgaagccttcgcgctgggcggcacgacggcggccgaaagctacctgaacttcgacaagctcctggacgccgccaagcgctcgggcgccgactcggtgcacccgggttacggcttcctctccgagaatgcggacttcgcccaagccgtcctcgacgccgggctgacctggatcgggccgagcccgcaggccatccgcgacctcggcgacaaggtcaccgcccgccacatcgccatgcgcgcgggcgcgccgctggtgccgggcaccaaggagccggtcaaggacgcctccgaaatcgtcgcgttcgccgacgagcacgggctgccggtggccatcaagaccgcgttcggcggtggtggccgcggcctcaaggtcgcgcgcacccgcgaagagatccccgagctgttcgagtcggccacgcgcgaggcggtcgccgcgttcggccgcggcgagtgcttcgtcgagcgctacctggacaagccgcgccacgtcaaggcgcaggtgctggcggacatgcacggcaccgcgatcgtcgtcggcacccgcgactgctcgctgcagcgacggcaccagaagctcgtcgaagaggcgcccgcgccgttcctgaacgacgagcagcgcaagcgcatccacgagtccgcgaaggcgatctgcaaggaagccggctactacggcgccggcacggtcgagtacctcgtcgccaccgacggcacgatctccttcctcgaggtcaacacgcggctgcaggtcgagcacccggtgtcggaagagacgaccggtctcgacctcgtccgggagatgttccggatcgcccgtggcgagaagctgcggatcaccgaggatcccgagccgcgcggccactcgatcgagttccgcatcaacggcgaggacgccggccgcggcttcctgcccgcgccgggcacggtgacgaagttcgtcgcgccgagcggcccgggcgtgcgcgtcgactccggcgtcgaatccggcagcgtcatcggcgggcagttcgactcgatgctggccaagctgatcgtcaccggctcggaccggaacaacgccctcgaacgcagccgccgcgccctggccgagatggtcgtcgaaggcatggccacggtgctgccgttcgaccgcgtgatcgtcgacgacccggcgttcatcggcgacgagaacggcttcagcgtgcacacgcgctggatcgagacggagttcgacaacaagatcgagccgttcgtggcgcccgacatcgaggccaccgaggaagagccgcggcagaacgtcgtggtcgaggtcggcggccggcggctcgaggtgtcgctgccgggcgggttcgcgctcgaaggtggcggcggtcgcggtggcggggtcactgtcaagcgaagccccgcaagcgcgccgcggcaccaaggccgcggtgagcggcgagccgtcacggcgccgatgcagggcacgatcgtgaaggtggccgtcgaagagggccagacggtggaagccggtgagctgatcgtcgtcctcgaggcgatgaagatggaaaacccggtcaccgcacacaaagcgggcaccgtcaccgggctttcggtcgaggtcgcggccgccgtgacgcagggcacgcagcttctcgagatcaagtag

SEQ ID NO: 10019 - protein, 598 aa, Amycolatopsis mediterranei
MAEQVGETTGGPVTKILVANRGEIAVRVIRAAKDAGLASVAVYADPDRDAPHVRLADEAFALGGTTAAESYLNFDKLLDAAKRSGADSVHPGYGFLSENADFAQAVLDAGLTWIGPSPQAIRDLGDKVTARHIAMRAGAPLVPGTKEPVKDASEIVAFADEHGLPVAIKTAFGGGGRGLKVARTREEIPELFESATREAVAAFGRGECFVERYLDKPRHVKAQVLADMHGTAIVVGTRDCSLQRRHQKLVEEAPAPFLNDEQRKRIHESAKAICKEAGYYGAGTVEYLVATDGTISFLEVNTRLQVEHPVSEETTGLDLVREMFRIARGEKLRITEDPEPRGHSIEFRINGEDAGRGFLPAPGTVTKFVAPSGPGVRVDSGVESGSVIGGQFDSMLAKLIVTGSDRNNALERSRRALAEMVVEGMATVLPFDRVIVDDPAFIGDENGFSVHTRWIETEFDNKIEPFVAPDIEATEEEPRQNVVVEVGGRRLEVSLPGGFALEGGGGRGGGVTVKRSPASAPRHQGRGERRAVTAPMQGTIVKVAVEEGQTVEAGELIVVLEAMKMENPVTAHKAGTVTGLSVEVAAAVTQGTQLLEIK

SEQ ID NO: 10020 - DNA, 6804 bp, Oryza sativa subsp
  CDS (1)..(6804)
atggagggatcttaccaaatgaatggcatactgaacgggatgtctaattcgaggcatccgtcgtcaccctctgaggtcgatgagttctgcaaagcgctcggtggtgattcaccgatacacagtgtgctggttgccaacaatggcatggccgctgtcaagttcatgcgcagcatccgtacatgggcgctggagacctttgggacggagaaggcgattcttttggtcgccatggcaactcccgaggacttgaagataaacgcggagcacataaggatcgccgaccaattcgtagaagttcctggtggtacaaataataacaattatgcgaatgtacagctcatagtggagatagcagagagaacacatgtttctgcagtttggcctggctggggtcatgcatctgagaatcctgaacttccggacgcactgaaggagaaaggaataatttttcttgggccaccatcagccgcgatggcagcgctaggtgataagattggttcatctcttattgcacaagcagcaggagttccaactcttccatggagtggatcacatgtgaaaattccaccagaaagctgcaattcgatacctgaggagatgtacaggagtgcctgtgtctccactacagaggaagcagtagctagttgtcaggtggtgggatatcctgctatgatcaaggcatcatggggtggtggtggtaaaggaataaggaaggtacataatgatgatgaggtgagagcactgtttaagcaagttcagggagaagtccctggctcacctatatttattatgaaggtggcatctcagagccgacatctagaggttcagttgctctgtgacaaacatggcaatgtggcagctctgcacagtcgagactgtagtgttcaaagaaggcaccaaaagattattgaggaggggccaattacagttgctccttcagagacagttaaagagcttgagcaagcagcaaggcggcttgctaaatgtgtgcattatgtgggtgctgctacagtagaatatttgtacagcatggaaacaggagaatactattttctggagcttaatccacggttgcaagtagaacaccctgttaccgaatggatagctgaaataaacttgcctgcagctcaagttgttgtaggaatgggtgtgccgctctacaatattcctgagatcagacgcttttatggaatggagcatggtggtggttacgatgcgtggaggaaaatatcagctgttgcaactaagtttgatttggataatgcacagtctgtaaagccaaagggtcactgtgtagcagtcagagttaccagtgaggatccagatgatggatttaagcctactagtggaagagttgaggagctaaactttaaaagcaaaccaaatgtttgggcctatttctccgttaagtctgggggagcaattcatgaattttcagattctcaatttggacatgtgtttgcattcggggaatctagatcgttggcaatagcaaatatggtgcttgggttaaaagagatccaaatccgtggagagatacgcactaatgttgattacacagtggatctcttgaatgctgcagaatatcgggaaaataagatccacactggttggctagacagcagaattgctatgcgtgttagagctgagaggcccccatggtacctttcagttgttggaggagctctatatgaagcatcaagcaggagctcaagcgttgttacagattatgttggttatctcagcaaaggtcaaataccaccaaagcacatctctcttgttaatttgactgttaccctaaatattgagggaagcaaatacacgattgagacagtaagacgtgggccccgtagctacacattaagaatgaatgggtcagagattgaagcagagatacactcgttgcgagatggaggactcttgatgcaattggatggaaacagtcatgtaatttatgcggagacagaagctgctggtacacgccttctcatcaatgggagaacatgcttattacagaaagagcatgatccttccaaattgttggctgatacaccttgcaaacttcttcggttcttggttgcggatggctctcatgtagatgctgatacaccatatgctgaggttgaggtcatgaagatgtgtatgccgctgttactaccagcttctggtgttattcattttgtcatgcctgagggtcaagccatgcaggcggctgacctgatagcaaggttggaccttgatgacccctcttctgtgaggagagctgaaccattccatggcacctttccaaaactgggacctccaactgctgtttctggaaaagttcaccaaaagtttgctgcaagtgtcaattccgcacacatgatccttgcaggatatgaacataatatcaatgaagttgtacaagatttgttaaactgcttagatagccctgagcttccttttctacagtggcaagaacttatgtctgttttggcaactcggcttccgaaagatctcaggaatgagttggatggcaagtacaaggagtatgagttgaactctgattttcggaagaacaaggattttcctgccaagttactaaggggaattatagaggcaaatcttgcatactgttctgaaaaagatagagttactaatgagaggcttgttgagccacttatgagcctggtcaaatcatacgagggtgggagagaaagccacgctcgtgttgttgtcaagtctctatttgaggagtacctgtctgttgaggaactcttcagtgacaatattcagtctgatgtgatagaacgtctacgacttcaacatgccaaagacctcgagaaggtcgtatacattgttttctcccaccagggtgtgcggaccaaaaataaactcatactacggcttatggaagcattagtctatccaaatccatctgcttacagagaccagttgattcgtttctctgggctgaacaacacagtgtactctgagttggcacttaaagcaagccagcttcttgagcatactaaattgagtgaactccgcacaagcatagcaagaagcctctcagagctggagatgtttactgaagaaggagagcgggtgtcaacacccaggagaaagatggccattaatgagaggatggaagatttagtgggtgccccacttgcagttgaagatgcccttgtggctttgtttgatcacagtgatcctacacttcagcggagagtggtcgagacatacatacgtagattgtatcagccttatctggtcaagggcagtgttcggatgcagtggcatagatctggtctaattgctttatgggaattctcggaagagcatattaagcaaagaaatggacaagatgcgatgtctctaaagcagcaagttgaggaccccgaagagaaaagatggggtgtcatggttgtaatcaagtctctccagtatttatctagtgctattgatgctgcattgaaggagacttcacactacaaagcaggtgctggaaatgtctcgaatggcaattctgcaagttccagccatggcaatatgctgcatattgctttggttggtatcaacaatcagatgagcactcttcaagacagtggtgatgaggaccaggctcaagaaaggatcaacaaaatttcaaaaattttgaaggatagtactgtaacatcacatctcaatggtgctggcgttagggtagtcagctgcattatccaaagggatgaagggcgcccaccgatgcgtcactccttccaatggtcagttgataagatatattatgaagaggatccgatgctccgccatgttgaacctcctctatctacattccttgagttgaacaaggtgaatttggatggttacaatgaagtaaagtacactccatcacgcgatcgccagtggcatatttacacactcatcaagaacaagaaagatcagagatcaaatgaccagaggttgttccttcgtaccatagtaaggcaaccaggtgtgaccaatgggtttttgtcaggaaatgttgacaatgaagtaggccgtgctcaggcttcatcatcatacacatcaagtagtatactcagatcactgatggcagcactagaagaaatagagctacatgcacataatgagacagtgaggtcaagctattcacacatgtatctgtgcatattgagagtacaacagttgtttgatcttataccattttcaagaacgattgataatgttggtcaagatgaagcaactgcatgtacgcttttgaagaatatggctttgaatatatatgaacatgttggggtgaggatgcatcgcctttctgtgtgtcagtgggaagtgaagttatggttggattgtgatggacaagcaagcggtgcttggagagtagttgttaccaatgtaactggccacacctgcactgtcgatatttaccgagaagtggaggattctaatacacataaacttttctaccactctgttacaccatcactgggtcctttgcatggcattgtgttggatgaaccatacaagccattggatgctattgacctcaaacgttactctgctaggaagaacgaaactacgtactgctatgacttcccgctggcttttgaaacagcactgaagaggtcatggaaatcaaccctctctgttgttgctgaagctaatgagcataataagagctatgctaaagtgacagagcttatgtttgctgattcaactggatcatggggtactcctttggttccagttgagcgttctccaggtatcaatgatattggcattgtcgcttggatcatgaagctctccacaccagaatttccaagtggccgggagattattgttgtttcaaatgatgtgacatttaaagctggatcatttggtcctagggaagatgctttctttgatgcggtcaccaatcttgcttgtgagaggaaacttcctcttatctacttgtcagcaactgctggtgctaggctcggtgtagctgaggaaataaaagcatgcttcaatgttggttggtctgatgacgagagccctgaacgtggttttcattacatttacctcactgaacaagattattcgcgcctgagttcttcggttatagcccatgaactgaaactagaaagtggagaaactagatgggttgttgataccattgttggaaaagaggatggactcggttgtgagaacttgcatggaagtggtgccattgccagtgcctattctaaagcatacaaggagacctttactctgacattcgtaactggacgagctgttggaattggtgcttatcttgctcggttaggcatgaggtgtatacagcgtcttgatcagccaattattttgacaggattttctgcgctgaataagcttctggggcgggaggtatacagctctcacatgcaactaggtggccccaaaatcatggctacaaatggtgtcgtccatctgactgtgtcagatgaccttgaaggtgtttctgcaatcttgaaatggctcagctatgttcctccttatgttggtggtcctcttcctatcatgaagcctcttgacccaccggatagacctgtaacatacttccctgagaattcatgtgatgctcgtgcagctatctgcggtgtgcaggacagtcaaggcaagtggatgggtggtatgtttgacagagaaagcttcgtggagacattagaaggctgggcaaaaactgttgtcaccggaagagcaaagcttggtggaattccagttggtgtcatagctgtggaaacccagactatgatgcaagtcatccctgctgatccaggtcagcttgattctgccgagcgtgtggttcctcaagcagggcaggtgtggtttcctgattctgccaccaaaacagcccaggcattgctggatttcaaccgtgaagagcttccgctgttcatcctcgctaactggagaggcttttctggtgggcaaagggatctgtttgaaggaatccttcaggctggttctaatattgttgagaatctgaggacatataaccagcctgcttttgtgtatattccaatgggcggagagcttaggggaggtgcatgggttgtggtagatagcaaaatcaatccagaacacattgagatgtatgctgagagaactgcaaaaggtaatgtccttgaaccagaaggattggttgagatcaaattcaggccaaaggaactggaagaatgcatgctaaggcttgacccggagttgatcaagctgagtacaaggctgagagaaatgaagaaggaaaatgctggcctctcggaaatggacaccactaggaggagtattattgctcggatgaagcaactgatgcctatatatacccaggttgctacacggtttgctgaattgcatgacacctctgctagaatggctgccaaaggtgtgatcggaaaggttgtcgattgggaagaatctcggtcctttttctataggaggttgcgaaggagagttactgaagatgcacttgccaaggaaatcagagaagctgctggcgagcagctgtcccagaaatctgcattggactatatcaagaaatggtacctttcttccaatggatctgatggaaacagtgaaaagtggaataacgatgaagctttctttgcttggaaagatgatccaacaaactatgagaatcaactcgaggagttgaaggctgaaagagtatccaagtggctctcgcgtctcgctgaaagccctgatgtgaaagctttgccaaatggtctttcaattgttcttaacaagatgaatccttcaaagagggagcaggttattgatggtctcaggcagcttctgggttga

SEQ ID NO: 10021 - protein, 2267 aa, Oryza sativa subsp
MEGSYQMNGILNGMSNSRHPSSPSEVDEFCKALGGDSPIHSVLVANNGMAAVKFMRSIRTWALETFGTEKAILLVAMATPEDLKINAEHIRIADQFVEVPGGTNNNNYANVQLIVEIAERTHVSAVWPGWGHASENPELPDALKEKGIIFLGPPSAAMAALGDKIGSSLIAQAAGVPTLPWSGSHVKIPPESCNSIPEEMYRSACVSTTEEAVASCQVVGYPAMIKASWGGGGKGIRKVHNDDEVRALFKQVQGEVPGSPIFIMKVASQSRHLEVQLLCDKHGNVAALHSRDCSVQRRHQKIIEEGPITVAPSETVKELEQAARRLAKCVHYVGAATVEYLYSMETGEYYFLELNPRLQVEHPVTEWIAEINLPAAQVVVGMGVPLYNIPEIRRFYGMEHGGGYDAWRKISAVATKFDLDNAQSVKPKGHCVAVRVTSEDPDDGFKPTSGRVEELNFKSKPNVWAYFSVKSGGAIHEFSDSQFGHVFAFGESRSLAIANMVLGLKEIQIRGEIRTNVDYTVDLLNAAEYRENKIHTGWLDSRIAMRVRAERPPWYLSVVGGALYEASSRSSSVVTDYVGYLSKGQIPPKHISLVNLTVTLNIEGSKYTIETVRRGPRSYTLRMNGSEIEAEIHSLRDGGLLMQLDGNSHVIYAETEAAGTRLLINGRTCLLQKEHDPSKLLADTPCKLLRFLVADGSHVDADTPYAEVEVMKMCMPLLLPASGVIHFVMPEGQAMQAADLIARLDLDDPSSVRRAEPFHGTFPKLGPPTAVSGKVHQKFAASVNSAHMILAGYEHNINEVVQDLLNCLDSPELPFLQWQELMSVLATRLPKDLRNELDGKYKEYELNSDFRKNKDFPAKLLRGIIEANLAYCSEKDRVTNERLVEPLMSLVKSYEGGRESHARVVVKSLFEEYLSVEELFSDNIQSDVIERLRLQHAKDLEKVVYIVFSHQGVRTKNKLILRLMEALVYPNPSAYRDQLIRFSGLNNTVYSELALKASQLLEHTKLSELRTSIARSLSELEMFTEEGERVSTPRRKMAINERMEDLVGAPLAVEDALVALFDHSDPTLQRRVVETYIRRLYQPYLVKGSVRMQWHRSGLIALWEFSEEHIKQRNGQDAMSLKQQVEDPEEKRWGVMVVIKSLQYLSSAIDAALKETSHYKAGAGNVSNGNSASSSHGNMLHIALVGINNQMSTLQDSGDEDQAQERINKISKILKDSTVTSHLNGAGVRVVSCIIQRDEGRPPMRHSFQWSVDKIYYEEDPMLRHVEPPLSTFLELNKVNLDGYNEVKYTPSRDRQWHIYTLIKNKKDQRSNDQRLFLRTIVRQPGVTNGFLSGNVDNEVGRAQASSSYTSSSILRSLMAALEEIELHAHNETVRSSYSHMYLCILRVQQLFDLIPFSRTIDNVGQDEATACTLLKNMALNIYEHVGVRMHRLSVCQWEVKLWLDCDGQASGAWRVVVTNVTGHTCTVDIYREVEDSNTHKLFYHSVTPSLGPLHGIVLDEPYKPLDAIDLKRYSARKNETTYCYDFPLAFETALKRSWKSTLSVVAEANEHNKSYAKVTELMFADSTGSWGTPLVPVERSPGINDIGIVAWIMKLSTPEFPSGREIIVVSNDVTFKAGSFGPREDAFFDAVTNLACERKLPLIYLSATAGARLGVAEEIKACFNVGWSDDESPERGFHYIYLTEQDYSRLSSSVIAHELKLESGETRWVVDTIVGKEDGLGCENLHGSGAIASAYSKAYKETFTLTFVTGRAVGIGAYLARLGMRCIQRLDQPIILTGFSALNKLLGREVYSSHMQLGGPKIMATNGVVHLTVSDDLEGVSAILKWLSYVPPYVGGPLPIMKPLDPPDRPVTYFPENSCDARAAICGVQDSQGKWMGGMFDRESFVETLEGWAKTVVTGRAKLGGIPVGVIAVETQTMMQVIPADPGQLDSAERVVPQAGQVWFPDSATKTAQALLDFNREELPLFILANWRGFSGGQRDLFEGILQAGSNIVENLRTYNQPAFVYIPMGGELRGGAWVVVDSKINPEHIEMYAERTAKGNVLEPEGLVEIKFRPKELEECMLRLDPELIKLSTRLREMKKENAGLSEMDTTRRSIIARMKQLMPIYTQVATRFAELHDTSARMAAKGVIGKVVDWEESRSFFYRRLRRRVTEDALAKEIREAAGEQLSQKSALDYIKKWYLSSNGSDGNSEKWNNDEAFFAWKDDPTNYENQLEELKAERVSKWLSRLAESPDVKALPNGLSIVLNKMNPSKREQVIDGLRQLLG

SEQ ID NO: 10022 - DNA, 1677 bp, Brassica napus
  CDS (34)..(1641)
tgacaagaaggatctcagtctcttatccagcaaatggacgcctcaatgattactaattgcaaatccactgcctcccttccctctttgttcctggggagatcgggaggtagtcttagaagctcccagtgtaatgtcatgatggggaaaaccattaccttcccgagccaaaagactcagactttgaaggttagccggaagaacttgaataggaggtgtggtggtggtgcgcttggtgctacctgcagtggggataagattcttgtggctaacagaggtgaaattgctgtccgtgtgatccgaactgctcatgagatggggattccttgtgttgctgtttactcaaccatcgacaaggatgcattgcatgtcaaattggctgacgaggctgtttgtattggtgaagctcctagcaaccagtcgtatttggtgataccgaatgttctgtcagctgcaatcagccgaggatgcacaatgcttcatcctggatatggattccattcagagaacgctctttttgttgagatgtgcagagagcacaggatcaactttattggaccaaatcctgatagcatccgtgtcatgggtgacaaatcaactgccagggagacgatgaagaatgcaggtgtcccaactgtaccagggagtgatggactattaaagagcacagaagaaggagtcaagctcgccaatgagattgggttccctgtgatgatcaaggcaacagctggtggtggtggacgtggaatgcgtcttgctaatgaaccgtcagagtttgtgaaactgctgcaggcagcaaagagtgaggccgcggctgcttttggaaatgatggagtttatctggagaagtacgtccaaaatccccgccatattgagttccagattcttgcagataaatttggaaatgttgtgcacttcggcgagcgtgactgcagcatccagagacggaaccaaaagttgctggaagaagcaccttctcctgcactgacccctgagttgcgaaaagccatgggtgatgcagctgttgcagcagcagcgtcgattggctacgttggtgttggtaccgtggagttccttttggatgagagaggttccttctatttcatggagatgaacactagaatccaggtggagcatcctgtgacagagatgatttactctgttgatttgattgaagaacagattcgtgttgcaatgggagagaaactgcgttatacacaggatgagattgtgctaagaggacactctattgaatgccgtatcaatgcagaggacccattcaaaggattcagacctggacctggaagaataacagcatatctgccatctggaggtccttttgttagaatggatagtcatgtgtatcccgactatgttgttcctccaagctatgactctcttcttggaaagcttattgtatgggctccaacgagggaaagggcaattgagcggatgaaacgtgcacttaatgacactattattacaggggttcccaccaccattgagtaccacaaacttatccttgaagttgaggatttcaagaacggaaaagttgacactgctttcatccccaagcatgaggaggaattagcagagcctcatgaaattgtgctagtgaaagatttgacaaacgcagctgcttagaatccatcagctcttaagatgaaacagtaattttca

SEQ ID NO: 10023 - protein, 535 aa, Brassica napus
MDASMITNCKSTASLPSLFLGRSGGSLRSSQCNVMMGKTITFPSQKTQTLKVSRKNLNRRCGGGALGATCSGDKILVANRGEIAVRVIRTAHEMGIPCVAVYSTIDKDALHVKLADEAVCIGEAPSNQSYLVIPNVLSAAISRGCTMLHPGYGFHSENALFVEMCREHRINFIGPNPDSIRVMGDKSTARETMKNAGVPTVPGSDGLLKSTEEGVKLANEIGFPVMIKATAGGGGRGMRLANEPSEFVKLLQAAKSEAAAAFGNDGVYLEKYVQNPRHIEFQILADKFGNVVHFGERDCSIQRRNQKLLEEAPSPALTPELRKAMGDAAVAAAASIGYVGVGTVEFLLDERGSFYFMEMNTRIQVEHPVTEMIYSVDLIEEQIRVAMGEKLRYTQDEIVLRGHSIECRINAEDPFKGFRPGPGRITAYLPSGGPFVRMDSHVYPDYVVPPSYDSLLGKLIVWAPTRERAIERMKRALNDTIITGVPTTIEYHKLILEVEDFKNGKVDTAFIPKHEEELAEPHEIVLVKDLTNAAA

SEQ ID NO: 10024 - DNA, 1923 bp, Arabidopsis thaliana
  CDS (131)..(1744)
atctcagagtttcactctcaacatttcattctctctctctctctcaacaattagatctgtttcgataatcacgaggtttccctcacttcctttccattgctaaaccaggatttgcctcctgcatttggaaatggacgcttctatgattaccaattccaaatccattacttctccaccctctttagccttagggaagtcaggaggaggaggagttatcagaagttcactatgtaacttaatgatgccaagcaaagttaacttccctagacaaagaactcaaactctaaaggttagccagaagaaactcaagagagctactagtggtggtcttggtgttacatgcagtggtggtgataagattctcgtagcgaatcgaggtgaaattgcagttcgtgttatcagaactgctcatgaaatggggattccttgtgttgctgtgtattctactatagataaagatgctcttcatgttaaattagctgatgaagctgtttgtattggtgaagctcctagtaaccagtcgtatttggtgattccgaatgttctgtctgcggctattagccgtggatgtacaatgcttcatcctggatatggttttctttcggagaacgctctctttgttgaaatgtgtagagaccatgggatcaattttattggacctaatcctgatagcatccgtgttatgggagacaaagcgactgcaagagagacaatgaaaaatgcaggggttcccactgtaccagggagtgatgggctattgcagagtacagaagaagctgtcagggtcgccaatgagattggtttccctgtaatgatcaaggcaacagctggtggtggtggacgtggaatgcgtcttgctaaggaaccgggagagtttgtaaaactgttgcagcaagctaagagcgaggctgctgctgcttttgggaatgatggatgttatctggagaagttcgtacaaaaccctagacatattgagttccaggtgctggcagataaatttggaaatgttgttcactttggtgagcgtgactgcagcatccagaggcgtaaccaaaagcttctggaagaagcaccttctccagcattgaccgctgaattgcgaaaagccatgggtgatgcagcagtcgcagcagcagcatccattgggtacattggtgttggtactgtggagtttcttttagatgagagaggttccttctacttcatggaaatgaacactaggatccaggtggagcatcctgtgacagagatgatttactctgttgatttgatagaggagcagattcgtgttgcaatgggagagaaacttcgttacaaacaggaagatattgtgctcagagggcactcaattgaatgtcgtatcaatgcagaagatccatttaaaggattcagacctggacctggcagaataacatcatacctgccatctggaggtcctttcgttagaatggacagccatgtctattccaactatgttgtgcctccaagctatgattctcttcttgggaagcttattgtgtgggctccaacgagggaaaaagcaattgaacggatgaagcgggcgcttaatgacactatcattacaggggttccaacgactatcaattaccacaaacttatccttgatgttgaggatttcaaaaatggaaaagttgatacagctttcatcgtcaagcatgaagaggagctagctgagcctcaagaaattgtggcagtgaaagatctgacaaacgcaacggtttagaatgatacatcagctctgaaagaccacccaattattgcaatcttcgtctccttttgtgtgttcattggtacaaacttcggtaacgataagactgttttactagagtctgtggttttatcaatgttcttcttgtatcataaacaagaggaaacacttttgtttataaaaaaaaaaaaaaa

SEQ ID NO: 10025 - protein, 537 aa, Arabidopsis thaliana
MDASMITNSKSITSPPSLALGKSGGGGVIRSSLCNLMMPSKVNFPRQRTQTLKVSQKKLKRATSGGLGVTCSGGDKILVANRGEIAVRVIRTAHEMGIPCVAVYSTIDKDALHVKLADEAVCIGEAPSNQSYLVIPNVLSAAISRGCTMLHPGYGFLSENALFVEMCRDHGINFIGPNPDSIRVMGDKATARETMKNAGVPTVPGSDGLLQSTEEAVRVANEIGFPVMIKATAGGGGRGMRLAKEPGEFVKLLQQAKSEAAAAFGNDGCYLEKFVQNPRHIEFQVLADKFGNVVHFGERDCSIQRRNQKLLEEAPSPALTAELRKAMGDAAVAAAASIGYIGVGTVEFLLDERGSFYFMEMNTRIQVEHPVTEMIYSVDLIEEQIRVAMGEKLRYKQEDIVLRGHSIECRINAEDPFKGFRPGPGRITSYLPSGGPFVRMDSHVYSNYVVPPSYDSLLGKLIVWAPTREKAIERMKRALNDTIITGVPTTINYHKLILDVEDFKNGKVDTAFIVKHEEELAEPQEIVAVKDLTNATV

SEQ ID NO: 10026 - DNA, 7080 bp, Arabidopsis thaliana
  CDS (1)..(7080)
atggagatgagagctttgggttcttcgtgttctactggtaatggaggttctgctccgattaccctcacgaatatatctccatggatcacaacagtttttccgtcgacagtgaagctgagaagtagtttgagaaccttcaaaggagtttcgtcaagagtgagaacctttaaaggagtttcttcgacaagagttttgtctcggaccaaacaacagtttcctctgttttgtttcctaaaccctgatccgatctccttcttggaaaatgatgtatctgaagctgaaaggacagtagttttaccggatggatcggttaacggggctggatctgttaacgggtatcatagtgatgtagtacccggtagaaatgtggctgaggtcaatgagttctgtaaagctcttggagggaaaaggccaatccatagtattctggttgctactaatggaatggcagctgtgaagtttatacgtagtgtcagaacatgggcttacgaaacatttggctcggaaaaagcggtaaagttggtggcaatggcaactcctgaagacatgaggatcaatgcggaacatatcagaattgctgatcagtttgttgaggttccgggaggaactaataataacaattatgctaatgttcagcttattgtggagatggctgaggtcacgcgtgtggatgcagtttggcctggttggggtcatgcatctgagaaccctgaattacctgatgctttaaaggagaaaggaattatatttcttggtcctcctgcagattcaatgatagcattaggggataagattggttcgtcgttgattgctcaagctgctgatgtacctactcttccatggagtggttcccatgttaagatacctccggggagaagtttggtaactgtccccgaggagatatacaagaaagcttgtgtttacacaacagaagaagcaattgctagttgtcaagttgttggttatccagcaatgatcaaagcatcgtggggtggtggtggtaaaggcattaggaaggttcataatgatgatgaggttagggctctattcaagcaagttcaaggtgaggtcccgggctcgccgatatttataatgaaggttgcttcacagagtcgacatttagaggcccagttgctttgtgaccaatatggaaacgtagcagctttgcatagccgtgattgtagcgtccagagaagacaccaaaagatcatagaggaaggtccaatcaccgtagctccgcaagaaaccatcaagaaacttgaacaagcagctagaaggttagctaagagtgttaactatgttggagctgctactgttgagtatctctatagtatggacactggggagtactacttcttagagcttaaccctcgcttacaggttgagcatcctgtaaccgagtggatcgccgaggttaatcttcctgctgctcaagttgctgttgggatgggaattcctctctggcaaatccctgagataagacggttttacggtatggaacatggtggaggatatgattcttggaggaaaacatcggttgtagcctctccttttgattttgatgaagctgaatctttaaggccaaaaggtcattgtgtggctgtacgtgtgacaagcgaggatcctgatgacgggtttaaaccaaccagcggtgaaatacaggaattgagttttaagagcaagccaaatatgtggtcgtacttctctgtcaagtctggtggaggcatccacgagttctcagattcacagtttggtaagttaaatgaaaaatttgggatgctaggacaacatgtttttgcatttggggaatccagatccgtggcgatagcaaatatggttcttgcgctgaaagaaattcaaatccgtggagatattaggactaacgttgactacacgatcgaccttctacatgcttctgattaccgggaaaacaaaatacacactggttggttggacagtaggattgctatgcgggtcagagcagagagacctccatggtatctctctgtagtcggtggggctctttataaagcatctacgaccagttctgctgtagtttcggattacgttggctatctagaaaaggggcaaattcccccaaagcatatatctcttgtgcattctcaagtgtcactgaatattgaaggaagtaaatatacgattgatgtagtccggggtggatcaggaacctacaggctaagaatgagcaactcagaagttgtagcagaaatacacactctacgtgatggaggtctattgatgcagttggatggtaaaagccatgtgatatatgcaaaggaagaagcgacaggaacccgtcttctcattgacggaagaacttgcttactacagaatgatcatgatccttcgaagttgatggctgagacaccatgcaagttgctaaggtacctggtttcagacaacagcagtattgatactgatacgccgtatgcagaagttgaagtcatgaagatgtgcatgccacttatttcacctgcgtcaggagttatccatttcaagttgtctgaaggacaagccatgcaggctggtgaactcatagccaagcttgatcttgatgatccttctgctgtaagaaaggccaaacccttccgtggaagtttcccacgattagggcttccaacggcaatctccggtaaagttcatcagagatgtgctgcaactttaaatgctgcacgtatgattcttgctggctatgatcataaagtagatgaggttcttcaagacttgcttaattgccttgatagccctgaactcccatttcttcagtggcaagagtgctttgcagttctggcgacacgactacctaaagatctcaggaacatgctagaattgaaatacaaggaatttgagattatctccaaaacctccctgaccccagatttccctgccaaactcttaaaaggcatccttgaggctcatctatcttcttgtgatgagaaagagagaggttcccttgaaaggctcattgaaccgttgatgagccttgtgaagtcttatgaaggtggtagagaaagtcatgcccgtcttattgttcattccctctttgaagaatacctatcagttgaagaattattcaatgataacatgctggctgatgttatagaacgcatgcgtcagcaatacaagaaggatcgattaaagattgtcgatatcgtgctttcacaccagggcataatacacaaaaacaaactggttcttcgacttatggagcagcttgtttatcctaatcctgctgcatacagagaaaaacttattcgattctcagcacttaatcatactaattactctcagttggcgctcaaggcgagtcaattgctcgaacagaccaaacgaagcgaacttcgttcaaatattgctagaagcctttcagaattagaaatgtttacagaggctggagaaaatatggatactcccaagaggaagagtgccattagtgaaacgatggaaaatcttgtgagctcatctttagctgttgaagacgctctcgtgggattatttgaccatagcgatcacacacttcaaagacgggttgttgagacttatattcacagattataccagccctatgtcgttaaagaaagtgtgaggatgcagtggcaccagtctggtgtcattgcttcttgggagttcctagaacatttcgaaagaaaaaacactggcccagacgatcacgagatatctgaaaaaggaattgttgcgaagagtagtaagagaaaacgggggactatggttataatcaaatcgctgcagtttctgccgagtataataaatgcatcattgagagaaacaaaccatagccactgtgaatatgcccgagctcctttatctggtaatatgatgcacattgctgttgtgggcatcaacaatcagatgagtctgcttcaggacagtggggacgaggaccaaactcaggaaagagtaaacaagctggccaaaattcttaaagaggaagaagtgagtgtcggtgtgatcagttgtataattcagcgagatgaaggacgaacaccaatgagacattcttttcattggttgatggagaaacagtattatgtagaagagccgttgctgcgacatgttgaacctcctctatctgtataccttgagttggataagcttaaagggtactcaaatatacagtattcgccttcacgagaccgtcaatggcatatgtatagtgttacagacaggccagtgccaatcaaaagaatgttccttagatctcttgttcgacaaactacaatgaatgatgggtttctgttgcagcaagggcaggactaccaacttagccaaacagtgctctccatggcgtttacatcgaaatgcattctgaggtctttgatgaatgcaatggaggaactggaactgaatgcacataatgctgccatgaaaccagaccacgcacatatgttcctatgcatactacgtgagcagcagatagatgatcttgtgccttaccccaggagatttgaagtgaatgcggaggatgaagaaactacagttgagacgatcttagaagaagcaacacaggaaatacataggtctgttggagtgagaatgcatgcattgggtgtttgcgaatgggaagtgcgactgtggttggtgtcctcgggactggcaaatggcgcttggagggtcgtggttgcaaacgtgactggccgtacctgcactgtccatatataccgagaagtggaagctactgggagaaacagtttaatctaccactcaataactaagaagggacctttgcatggaactctgatcaatggtcaatataaaccacttaataatctggacaggaaacgtttagccgcaaggaggagtaacactacttattgctatgacttccccttggcatttgagacagcattggagctgaattgggcatcacaacactcgggagttaggaaaccatgcaagaatagactcatcaacgtcaaagagcttgtattctccaatacagaaggttctttgggtacatctcttattccggttgaacgaccagctggtctcaacgacattggaatggtggcctggatcttagagatgtcgactcctgagtttcctatgggacggaaacttctcattgtcgccaatgatgtcacattcaaagctggttcttttggtcctagagaggacgcatttttccttgctgtgactgaactcgcttgtaccaaaaagcttcccttgatttacttggcagcaaattctggtgcccgactcggtgtagctgaagaagtaaaagcatgcttcaaagttggatggtcggatgaagtttcccccggtaatgattttcagtatatatacctaagctctgaagactatgcaaggattggatcatctgtcattgcgcacgaagtgaagctccctagtggcgaaacaaggtgggtgattgatacaattgttggtaaagaagatggtcttggagttgagaatttaacaggaagtggggcaatagcgggtgcttactcaagggcgtacaatgaaacttttactttaacctttgttagtggaagatcggtcggaattggtgcttaccttgcccgactgggcatgaggtgcatacagagactagaccaaccgatcatcttgaccggcttttctacactcaacaagctgcttggacgtgaggtctatagctctcacatgcaacttggtggcccaaaaatcatggggacaaatggtgttgttcatcttacagtctcagatgatctcgaaggtgtatcagcaattctcaactggctgagctacattcctgcgtatgtgggtggtcctcttcctgttcttgctcctttagatccaccggagagaactgtggagtatatcccagagaactcttgtgacccacgagctgctatagctgggattaacgataatactggtaaatggcttggtggtatctttgataaaaatagctttgttgagactcttgaaggctgggcaaggacggtagtgactggtagagctaagcttgggggaatacccattggagttgttgctgtcgagacacagactgtaatgcatgtcatcccagcagatcctggacagcttgactctcatgaaagagtggttccgcaagcagggcaagtctggtttcctgattcagcagccaagacagctcaagcgctcatggatttcaaccgggaacagcttcctttgtttatcatagcaaactggagaggtttttcaggtgggcaaagagatctttttgaaggaatacttcaggcgggttcagctatagtagaaaatctgagaacatatcggcagccagtgtttgtgtacatcccaatgatgggagaactgcgaggtggagcatgggtggttgttgatagccagataaattcggattatattgaaatgtacgctgatgaaaccgctcgtggaaatgtgcttgagcctgaagggatgatagagataaaatttagaaggaaagagctgttagagtgcatgggaaggttggaccagacgctaatcaatctgaaagcaaatatccaagatgccaagcgaaacaaggcatatgcaaacatcgagcttctccagaaacagattaaaacccgagagaagcaacttttaccagtttatacccaaatcgctaccaaatttgctgaactccatgacacttccatgagaatggctgcaaaaggtgtgatcaaaagtgttgtggaatggagcggctcgcggtcattcttctataaaaagctctatcggagaatcgcagagagctctctagtgaggaacataagaaaagcttctggagacatcttatcatataaatctgctatgggtttgattcaggactggttccgcaaatccgagattgcaaaggggaaagaagaagcttggacggacgaccaactgttctttacatggaaagacaatgttagtaactacgagcagaagctgagcgagttgagaacacagaaactgctgaatcaacttgcagagattgggaattcgtcagatctgcaggctctgccacaaggacttgctaatcttctaaacaaggtggatctttcaagaagagaagagctggtggacgcgattcggaaggtgttgggttga

SEQ ID NO: 10027 - protein, 2359 aa, Arabidopsis thaliana
MEMRALGSSCSTGNGGSAPITLTNISPWITTVFPSTVKLRSSLRTFKGVSSRVRTFKGVSSTRVLSRTKQQFPLFCFLNPDPISFLENDVSEAERTVVLPDGSVNGAGSVNGYHSDVVPGRNVAEVNEFCKALGGKRPIHSILVATNGMAAVKFIRSVRTWAYETFGSEKAVKLVAMATPEDMRINAEHIRIADQFVEVPGGTNNNNYANVQLIVEMAEVTRVDAVWPGWGHASENPELPDALKEKGIIFLGPPADSMIALGDKIGSSLIAQAADVPTLPWSGSHVKIPPGRSLVTVPEEIYKKACVYTTEEAIASCQVVGYPAMIKASWGGGGKGIRKVHNDDEVRALFKQVQGEVPGSPIFIMKVASQSRHLEAQLLCDQYGNVAALHSRDCSVQRRHQKIIEEGPITVAPQETIKKLEQAARRLAKSVNYVGAATVEYLYSMDTGEYYFLELNPRLQVEHPVTEWIAEVNLPAAQVAVGMGIPLWQIPEIRRFYGMEHGGGYDSWRKTSVVASPFDFDEAESLRPKGHCVAVRVTSEDPDDGFKPTSGEIQELSFKSKPNMWSYFSVKSGGGIHEFSDSQFGKLNEKFGMLGQHVFAFGESRSVAIANMVLALKEIQIRGDIRTNVDYTIDLLHASDYRENKIHTGWLDSRIAMRVRAERPPWYLSVVGGALYKASTTSSAVVSDYVGYLEKGQIPPKHISLVHSQVSLNIEGSKYTIDVVRGGSGTYRLRMSNSEVVAEIHTLRDGGLLMQLDGKSHVIYAKEEATGTRLLIDGRTCLLQNDHDPSKLMAETPCKLLRYLVSDNSSIDTDTPYAEVEVMKMCMPLISPASGVIHFKLSEGQAMQAGELIAKLDLDDPSAVRKAKPFRGSFPRLGLPTAISGKVHQRCAATLNAARMILAGYDHKVDEVLQDLLNCLDSPELPFLQWQECFAVLATRLPKDLRNMLELKYKEFEIISKTSLTPDFPAKLLKGILEAHLSSCDEKERGSLERLIEPLMSLVKSYEGGRESHARLIVHSLFEEYLSVEELFNDNMLADVIERMRQQYKKDRLKIVDIVLSHQGIIHKNKLVLRLMEQLVYPNPAAYREKLIRFSALNHTNYSQLALKASQLLEQTKRSELRSNIARSLSELEMFTEAGENMDTPKRKSAISETMENLVSSSLAVEDALVGLFDHSDHTLQRRVVETYIHRLYQPYVVKESVRMQWHQSGVIASWEFLEHFERKNTGPDDHEISEKGIVAKSSKRKRGTMVIIKSLQFLPSIINASLRETNHSHCEYARAPLSGNMMHIAVVGINNQMSLLQDSGDEDQTQERVNKLAKILKEEEVSVGVISCIIQRDEGRTPMRHSFHWLMEKQYYVEEPLLRHVEPPLSVYLELDKLKGYSNIQYSPSRDRQWHMYSVTDRPVPIKRMFLRSLVRQTTMNDGFLLQQGQDYQLSQTVLSMAFTSKCILRSLMNAMEELELNAHNAAMKPDHAHMFLCILREQQIDDLVPYPRRFEVNAEDEETTVETILEEATQEIHRSVGVRMHALGVCEWEVRLWLVSSGLANGAWRVVVANVTGRTCTVHIYREVEATGRNSLIYHSITKKGPLHGTLINGQYKPLNNLDRKRLAARRSNTTYCYDFPLAFETALELNWASQHSGVRKPCKNRLINVKELVFSNTEGSLGTSLIPVERPAGLNDIGMVAWILEMSTPEFPMGRKLLIVANDVTFKAGSFGPREDAFFLAVTELACTKKLPLIYLAANSGARLGVAEEVKACFKVGWSDEVSPGNDFQYIYLSSEDYARIGSSVIAHEVKLPSGETRWVIDTIVGKEDGLGVENLTGSGAIAGAYSRAYNETFTLTFVSGRSVGIGAYLARLGMRCIQRLDQPIILTGFSTLNKLLGREVYSSHMQLGGPKIMGTNGVVHLTVSDDLEGVSAILNWLSYIPAYVGGPLPVLAPLDPPERTVEYIPENSCDPRAAIAGINDNTGKWLGGIFDKNSFVETLEGWARTVVTGRAKLGGIPIGVVAVETQTVMHVIPADPGQLDSHERVVPQAGQVWFPDSAAKTAQALMDFNREQLPLFIIANWRGFSGGQRDLFEGILQAGSAIVENLRTYRQPVFVYIPMMGELRGGAWVVVDSQINSDYIEMYADETARGNVLEPEGMIEIKFRRKELLECMGRLDQTLINLKANIQDAKRNKAYANIELLQKQIKTREKQLLPVYTQIATKFAELHDTSMRMAAKGVIKSVVEWSGSRSFFYKKLYRRIAESSLVRNIRKASGDILSYKSAMGLIQDWFRKSEIAKGKEEAWTDDQLFFTWKDNVSNYEQKLSELRTQKLLNQLAEIGNSSDLQALPQGLANLLNKVDLSRREELVDAIRKVLG

SEQ ID NO: 10028 - DNA, 1386 bp, Streptomyces sp
  CDS (1)..(1386): transl_table=11
atgttcgagaaggtactcatcgccaaccgcggcgagatcgcgctgcgtgtcgccgcgacctgtcgggagctcggcatccggaccgtcgtcgtgcactccgatgccgaccgccactccgccgccgtgcggttcgcggacgaggccgtgtgcgtcggccccgccccgccgcgcgccagctacctcaacgccgccgccgtgctccaggccgccgtgcagaccggcgtcgaggcggtccaccccggctacggattcctgtccgaggacccggacttcgccgaggcgtgcgaggacgagggcatcaccctcatcggcccgcccgccgaggtgatgtcgcggctcgggaacaaggcgtccgcccggtcgatcatgtcgcaggccggccttccgctgctgcccggcagcctcgacccgctctccgaccgcgaggcgcacgcgctcgccgacacgatcggctaccccgtcatcgtcaaggcggcggccggcggcggcgggcgcggcatgtcggtggtccactccagcgacgacttccccgacacgttccgccgcacccaggccaccgcgttggcggtgttcggcgacgggcgggtgtacgtcgagcgctacctgcccgaggcccggcacgtcgagatccaggtgctcgccgaccgctacggcaacgtcgtccacctgggcgaacgcgactgctccgtgcagcgccggcaccagaagctcgtcgaggagacgcccgggccccggcttccggacggcctcgccgcccggatgggcgaggcggccgtcgccggggcgcgcgcggtcggctacgtcggcgccggcacgttcgagttcctgctcgcgcccgacggaacgttctccttcatggaggtcaactgccgtatccaggtcgagcacccggtcacagagatggtcaccggcatcgacctggtgcgcgagcagatcctggtcgccgccggccgtccgctgacggtgcgccaggaagacatccgacccaacggcgtgtccatggagtgccgcatcaacgccgaggacccgacgcgcggattcgtgccgacgccagggctgatcgacacgttcacgcccgccggcggcccgttcgtgcgcgtcgacacacacgtgcacgccgggtacaccgtgcccgcgtcgtacgactcgctgctggccaagctcgtggtgtgggcaccggaccgcgaacaggccctcgcccgcatgcgccgcgcgctcgaccagttcgaggtcgagggccaacgggtgcgcaccaccatcgggttcctgcgcgaggtgttcgacaacgacaagttcgccgccggacgccacagcacctccctcgtcgacgagatgctcgccgccgaggcccggaacgcgcggacgggagtgcccctgtccgcgtga

SEQ ID NO: 10029 - protein, 461 aa, Streptomyces sp
MFEKVLIANRGEIALRVAATCRELGIRTVVVHSDADRHSAAVRFADEAVCVGPAPPRASYLNAAAVLQAAVQTGVEAVHPGYGFLSEDPDFAEACEDEGITLIGPPAEVMSRLGNKASARSIMSQAGLPLLPGSLDPLSDREAHALADTIGYPVIVKAAAGGGGRGMSVVHSSDDFPDTFRRTQATALAVFGDGRVYVERYLPEARHVEIQVLADRYGNVVHLGERDCSVQRRHQKLVEETPGPRLPDGLAARMGEAAVAGARAVGYVGAGTFEFLLAPDGTFSFMEVNCRIQVEHPVTEMVTGIDLVREQILVAAGRPLTVRQEDIRPNGVSMECRINAEDPTRGFVPTPGLIDTFTPAGGPFVRVDTHVHAGYTVPASYDSLLAKLVVWAPDREQALARMRRALDQFEVEGQRVRTTIGFLREVFDNDKFAAGRHSTSLVDEMLAAEARNARTGVPLSA

SEQ ID NO: 10030 - DNA, 6966 bp, Brassica napus
  CDS (1)..(6966)
atggagatgagagctttagtttcgtgttctgctgccggaaatggagcttctgatcggtttagactctccaatgtttcaccatggatcacatcagctcgtggtgcaagtggcagtgactccccagccacagtgaagctgggaagcagctctatgattagagctttcaaaggcgtttcgatttacaaaaacaagaccagaaggaatgttctgtctcaaaggaacaaacagttccgtcctatggcctacttaggaaggaaggacttgagcagccctgatccgacctccttctgcgataatgatatatctgaacctcaagggaccggatccattaatgggaatgatcatagtgctgtaagagtgtctcaagtcgatgagttctgtaaggctcatggtggaaaaaggccaatccatagcattttggttgctaccaatggaatggcagctgtcaagttgatacggagtgttagagcatggtcttaccaaacatttggctcggaaaaatccatatcattggtggccatggcgactcctgaagacatgcggatcaatgcggaacatatcaggatcgctgatcagtttatgcaagtcccgggtggaacgaacaataacaattatgctaatgttcatcttattgtagagatggctcaagcaacaggtgtggatgcagtttggcctggttggggtcatgcatctgaaaaccctgagttgcctgatgcattaaaggccaaaggagtcatatttcttggtcctacagcagcctcaatgttagcattaggcgataagattgggtcgtccttgattgcacaagctgctgatgtacctactctgccatggagtggttcccatgttaaaatacctcctggtagcagcatggtaacgatccccgaggagatgtacaggcaagcttgtgtctacactaccgaagaagcggttgctagttgtcaagttgtcggttatccagcaatgatcaaagcttcgtggggtggtggtggtaaaggcattagggaggtccatgatgatgatgaggttaggactctattcaagcaagttcaaggcgaggtcccaggctcgccgatattcataatgaaggttgcttcccagagtcggcatctagaggtgcagctgctctgtgaccaatatggaaatgtttcagctttgcatagccgtgattgtagcgtccagagaagacaccaaaagatcatcgaggagggtcccatcactgtggctccccgagataccgtgaagaagctggagcaggcagctagaaggttggctaagagtgttaactatgttggagctgctactgttgagtttctctacagcatggacactggggactacttcttcttagagcttaaccctaggttacaggtcgagcaccctgtaaccgagcggatcgctgacataaatcttccagctgcccaagttgctgtcggtatgggaatccctctctggcaaatccctgagataagacggttctatggtatagaacaatatgattcgtggaggacaacatctttgctagcctccccttttgattttgataaagctgaatctgtaaggccaaaaggtcactgtgtcgctgtccgggtgacaagcgaggatcctgatgacgggtttaaacccaccagcggtcaagtgcaggagcttagttttaagagcaacccaaatgtgtgggggtacttctctgtcaagtctggtggaggcatccacgagttctcagattctcagtttggacatgtttttgcatttggggaatccagagccatggcaatatcaaatatggttcttgcgctgaaagaaattcaaattcgtggaggagttaggactaacgttgactacacgattgaccttctacatgcttctgattaccgggaaaacaaaattcacactggttggttggacagtagaattgctatgcgggtccgagcagataggcctccgtggcacctctctgttgtcagcgggactctctataaagcatcagcgactggtgctgccgtggtctcggattacattgcttatcttgacaaggggcaaattcccccaaagcatatatctcttgtgcattctcaagtgtctctgaatattgaaggaagtaaatatacggttgatgtggtccggagtggatcaggaagctacaagctaagaatgaacaactcagaagtggcagcagaaatacacactctacgtgatggaggtttgttgatgcagttggatggtaaaagccatgttatatatgcacaggaagaaacctcaggcacccgtcttctgattgacggcaaaacttgtttacttcagaatgaacacgacccttcaaaattaatggctgagacaccgtgcaagctagttaggtatctggtttcagatgatagcagcattgatgctgatacaccctatgcagaggttgaggtcatgaagatgtgcatgccgcttctttcacctgcgtcaggagttatccattttaaaatgtcagagggacaagtcatgctgcctggtgaacttatagccaatcttgatcttactgatccttcgactgtaagaaaggccgaacccttccatggtcgcttcccaagattagggcttccaacggaaatttctgctaaagttcataagagatgtgctgcaactttaaatgctgctcgcatgattcttgccggctatgagcatcaagtagatgaggttgttcaagacttggtttcttgccttgatagccctgaactcccattccttcagtggcaagagtgctttgcagttctggcgacacggttaccaaaagatctcagaatcatgctagaatcaaagtacatggaatatgagtgtatctccaggaactccttgaccgcagattttcctgccaaacttttaaaaggcattctaaaggctcatgtagcatcttgtgatgagaatgagagaggtgcccttgaaaggctcattgaaccattgatgagccttgcaaactcttacgaaggtggtagagaaagtcatgcctgtgctattgttcgttccctctttgaggaatatctatcagtagaaggattattcaacgataacatgctggctcatgttatagaacgtatgcgtcaggaatacaagaaagtagatcggtcgaagattgtggatatagtgctgtcacaccagggcctaaaaagcaaaaacaagctcgttctccgactcatggagcattttgtttatgctaatccttctgtgtacagagataaacttgtccgattcttgacacttaaccatactaactactctgatgtggtgctcaaggcgattcaattactcgaacagagaaaactaagtgaacttcgttctagcattctgtcggagttagaaatgtgtgcagaggatggggaaaatatggatactcccaagagtaagtgtgccatggaagatcttgtgagcgcacctttagctgttgaagatgctctcgtgggactatttgaccacagcgaccgcacacttcaaagattagttgttgagacttatattcgcagattgtaccagccctacgtcgttaaagaaagcgtgaggatgcagtggcaccaatatggtcttattgcttcctgggagtttctagacgatcttatggaaagaaaaaccactgactcagatgatgaccaagagacatgtgaaaaagtttttgttgagaagcgtagaaagaaaaaaaaggggtttatggttataatcaaatcgctggagtttttgccgaatataataagtgcagcactgacagaaacaaaccacagcgactatgaatctcctttatctggcaatataatgcacattgctattgtgggcatgagtcttcttcaggacaggtacttgacacaagcctgtgacgttttcaaactaagtgagaatgaggaacaagctcaaggaagagtggacaaagttctcaaagaggaagaagtaagttcgagactccgttctgcaggtgtcggtgtggtaagctgtataatccagcgggatgaagaacaaacgcctattagacattcgttccattggtcgatggagaaacagtattacgcagaagagccgatgctgcgccatcttgaacctcctctttccatataccttgagttggataagctgagaggatatgaaaatatacaatatacccctacacgagatcgtcaatggcatctgtatactgtcacagacaacaagccggtgccagtcaggaggatgttcctgagatctcttgttcgacaagggcaggataaccaacttagcctaacacttgttagatctttgagggatgcgatggaggaacttgaactgaatgcccataaggaggatgctatgaaaccagaccacgcacatatgtttctttgcctatctcgtgaacagcagattaatgatcttatgccttaccccaggagagttgacgtgaatgcggcggaggttgaagaaactacaatggagatgatgttagaagaaacagtaggagagatacacaagtcagctggagtgagaatgcataggttgggtgtgtgcgagtgggaagtgcgcctgcggttggcgtcctctggagtggctagtggcgcctggagggctgtggttacaaacgtgacaggccgtacatgcactgtccatatataccgagaagttgaagcgactgggggaaacagtttaatttatcaatcaataaccaagaagggacctttgcatggaaccccgatcaatgatcaatataagccactgggacatcttgacaggcaacgactagccgcaaggaggagtaacactacttattgctatgatttccctttggcatttgagacagccttggaagagttgtgggagtcacaacacccgggagttaagaaactttataagaatactctgatcaatgttgaagagcttgtactctctactccagaaggttctcttattccggttaaaagattaccgggtctcaacgactgtggaatggtggcatggaccctagagatgtcgactcctgagtttccaaagggacggaaaattatcatagtcgccaatgacgtcaccttcaaagctgggtcttttggtcctagagaggacgcgtttttcctcgctgtgactgagctcgcttgcgccgagaaacttcccttgatttacttagcagcaaactctggcgcccggctaggggtagctgaagaagtcaaagcctgctttaaagtcggatggtcggatgaagtttcccctgagaatggttttcagtatatatacctaagccctgaggatcatgcaaggattggatcatctgtcattgcgcacgaaataaagctgcccagcggggaaaaaaggtgggtcattgatacaatcgttggtcaagaagatggtattggcgtagagaatctaacgggaagcggggcaatagcgggtgcttactcgagggcgtacaaggaaacttttactttaacctttgtcagtggaagaacggttggcattggtgcttaccttggccgcctgggtatgcggtgcattcagagattagaccagcctatcattttgactggcttttcgacgctgaacaagttacttgggcgtgaggtctacagctctcacatgcagctcggcggccccaaaatcatgggcgcaaatggtgttgttcatcgtacagtctcagatgatctagaaggcgtgtcggcgattctaaactggctgagctacgttcctgctcacgcgggtggccctcttcctcttctcgcccctttagatccaccggagagaactgtggagtacgtcccgcagaactcttgcgacccgcgagctgctatagctggggtcaatgacaaggccggtaaatggcttggcggtatctttgataaaaacagctttatcgagactctggaaggctgggcgaggacggttgtgaccggtagagctaagctcgggggagtacctgttggagttgtagcagttgagacgcagactgtgacgcagattattccagcggatcctggacaggtggactcgcacgaaagagtggttccgcaggcagggcaagtctggttccctggctcagcagccaagacggctcaagcgctcatggatttcaaccgggaagggcttccgttgtttatcctagcgaactggcgagggttttcaggcgggcagagagatcttttcgaagggatactccaggctggttcagctatcgtcgaaagtctgagaacgtatgggcagcctgtgtttgtgtacatccccaagatgggagagctgcgaggtggagcgtgggtggttgttgatagccagattaattcggattacgttgaaatgtatgctgacgaaacttcacgtgggaatgtgctcgagcccgaagggatgatagagatcaaatttagaaagagagagatgttggagtgcatgggaaggttggaccagaacctgatcagtctcagagcaaaactgcaagacgccaaacaaagcgagatggaccttatcaagcaacagatcaaagctcggaagaagcagcttttaccgctttacatccaaatcgccaccaaatttgcggatcttcacgacacttccatgaggatggcagcaaaaggagtgatcaaatgcgttgtggattggagcggttcgcgatccttcttctatagaaagctcattcggagaattgcggagagctccctggtgaaacacgtaagagaagcttctggagacaacttatcgtacaaatctgcaatgggtttgattaaggattggttctgcaaatctgatgttgcaaaggggaaagaagaggcttggacagacgaccaagtgttctttacatggaaagacaatgttggtaactacgaatccgagctcagcgagttgagagcacgtaaactgctgaatcaacttgcggagattgggaattcatctgatctgcaggctctgccccagggacttgccaatattctacacaaggtggagcctttgaaaagaaaagagctagtggatgctctaagaaaggtgttgagttga

SEQ ID NO: 10031 - protein, 2321 aa, Brassica napus
MEMRALVSCSAAGNGASDRFRLSNVSPWITSARGASGSDSPATVKLGSSSMIRAFKGVSIYKNKTRRNVLSQRNKQFRPMAYLGRKDLSSPDPTSFCDNDISEPQGTGSINGNDHSAVRVSQVDEFCKAHGGKRPIHSILVATNGMAAVKLIRSVRAWSYQTFGSEKSISLVAMATPEDMRINAEHIRIADQFMQVPGGTNNNNYANVHLIVEMAQATGVDAVWPGWGHASENPELPDALKAKGVIFLGPTAASMLALGDKIGSSLIAQAADVPTLPWSGSHVKIPPGSSMVTIPEEMYRQACVYTTEEAVASCQVVGYPAMIKASWGGGGKGIREVHDDDEVRTLFKQVQGEVPGSPIFIMKVASQSRHLEVQLLCDQYGNVSALHSRDCSVQRRHQKIIEEGPITVAPRDTVKKLEQAARRLAKSVNYVGAATVEFLYSMDTGDYFFLELNPRLQVEHPVTERIADINLPAAQVAVGMGIPLWQIPEIRRFYGIEQYDSWRTTSLLASPFDFDKAESVRPKGHCVAVRVTSEDPDDGFKPTSGQVQELSFKSNPNVWGYFSVKSGGGIHEFSDSQFGHVFAFGESRAMAISNMVLALKEIQIRGGVRTNVDYTIDLLHASDYRENKIHTGWLDSRIAMRVRADRPPWHLSVVSGTLYKASATGAAVVSDYIAYLDKGQIPPKHISLVHSQVSLNIEGSKYTVDVVRSGSGSYKLRMNNSEVAAEIHTLRDGGLLMQLDGKSHVIYAQEETSGTRLLIDGKTCLLQNEHDPSKLMAETPCKLVRYLVSDDSSIDADTPYAEVEVMKMCMPLLSPASGVIHFKMSEGQVMLPGELIANLDLTDPSTVRKAEPFHGRFPRLGLPTEISAKVHKRCAATLNAARMILAGYEHQVDEVVQDLVSCLDSPELPFLQWQECFAVLATRLPKDLRIMLESKYMEYECISRNSLTADFPAKLLKGILKAHVASCDENERGALERLIEPLMSLANSYEGGRESHACAIVRSLFEEYLSVEGLFNDNMLAHVIERMRQEYKKVDRSKIVDIVLSHQGLKSKNKLVLRLMEHFVYANPSVYRDKLVRFLTLNHTNYSDVVLKAIQLLEQRKLSELRSSILSELEMCAEDGENMDTPKSKCAMEDLVSAPLAVEDALVGLFDHSDRTLQRLVVETYIRRLYQPYVVKESVRMQWHQYGLIASWEFLDDLMERKTTDSDDDQETCEKVFVEKRRKKKKGFMVIIKSLEFLPNIISAALTETNHSDYESPLSGNIMHIAIVGMSLLQDRYLTQACDVFKLSENEEQAQGRVDKVLKEEEVSSRLRSAGVGVVSCIIQRDEEQTPIRHSFHWSMEKQYYAEEPMLRHLEPPLSIYLELDKLRGYENIQYTPTRDRQWHLYTVTDNKPVPVRRMFLRSLVRQGQDNQLSLTLVRSLRDAMEELELNAHKEDAMKPDHAHMFLCLSREQQINDLMPYPRRVDVNAAEVEETTMEMMLEETVGEIHKSAGVRMHRLGVCEWEVRLRLASSGVASGAWRAVVTNVTGRTCTVHIYREVEATGGNSLIYQSITKKGPLHGTPINDQYKPLGHLDRQRLAARRSNTTYCYDFPLAFETALEELWESQHPGVKKLYKNTLINVEELVLSTPEGSLIPVKRLPGLNDCGMVAWTLEMSTPEFPKGRKIIIVANDVTFKAGSFGPREDAFFLAVTELACAEKLPLIYLAANSGARLGVAEEVKACFKVGWSDEVSPENGFQYIYLSPEDHARIGSSVIAHEIKLPSGEKRWVIDTIVGQEDGIGVENLTGSGAIAGAYSRAYKETFTLTFVSGRTVGIGAYLGRLGMRCIQRLDQPIILTGFSTLNKLLGREVYSSHMQLGGPKIMGANGVVHRTVSDDLEGVSAILNWLSYVPAHAGGPLPLLAPLDPPERTVEYVPQNSCDPRAAIAGVNDKAGKWLGGIFDKNSFIETLEGWARTVVTGRAKLGGVPVGVVAVETQTVTQIIPADPGQVDSHERVVPQAGQVWFPGSAAKTAQALMDFNREGLPLFILANWRGFSGGQRDLFEGILQAGSAIVESLRTYGQPVFVYIPKMGELRGGAWVVVDSQINSDYVEMYADETSRGNVLEPEGMIEIKFRKREMLECMGRLDQNLISLRAKLQDAKQSEMDLIKQQIKARKKQLLPLYIQIATKFADLHDTSMRMAAKGVIKCVVDWSGSRSFFYRKLIRRIAESSLVKHVREASGDNLSYKSAMGLIKDWFCKSDVAKGKEEAWTDDQVFFTWKDNVGNYESELSELRARKLLNQLAEIGNSSDLQALPQGLANILHKVEPLKRKELVDALRKVLS

SEQ ID NO: 10032 - DNA, 7128 bp, Arabidopsis thaliana
  CDS (1)..(7128)
atggagatgagagctttgggttcttcgtgttctactggtaatggaggttctgctccgattaccctcacgaatatatctccatggatcacaacagtttttccgtcgacagtgaagctgagaagtagtttgagaaccttcaaaggagtttcgtcaagagtgagaacctttaaaggagtttcttcgacaagagttttgtctcggaccaaacaacagtttcctctgttttgtttcctaaaccctgatccgatctccttcttggaaaatggtttctttctctctatcttttgcttaacttatgattgcattttttcgcttttttcctatacatttgacatgaatttgtctgtcatctctatgataacgctgatcggttcacgggctggatctgttaacgggtatcatagtgatgtagtacccggtagaaatgtggctgaggtcaatgagttctgtaaagctcttggagggaaaaggccaatccatagtattctggttgctactaatggaatggcagctgtgaagtttatacgtagtgtcagaacatgggcttacgaaacatttggctcggaaaaagcggtaaagttggtggcaatggcaactcctgaagacatgaggatcaatgcggaacatatcagaattgctgatcagtttgttgaggttccgggaggaactaataataacaattatgctaatgttcagcttattgtggagatggctgaggtcacgcgtgtggatgcagtttggcctggttggggtcatgcatctgagaaccctgaattacctgatgctttaaaggagaaaggaattatatttcttggtcctcctgcagattcaatgatagcattaggggataagattggttcgtcgttgattgctcaagctgctgatgtacctactcttccatggagtggttcccatgttaagatacctccggggagaagtttggtaactgtccccgaggagatatacaagaaagcttgtgtttacacaacagaagaagcaattgctagttgtcaagttgttggttatccagcaatgatcaaagcatcgtggggtggtggtggtaaaggcattaggaaggttcataatgatgatgaggttagggctctattcaagcaagttcaaggtgaggtcccgggctcgccgatatttataatgaaggttgcttcacagagtcgacatttagaggcccagttgctttgtgaccaatatggaaacgtagcagctttgcatagccgtgattgtagcgtccagagaagacaccaaaagatcatagaggaaggtccaatcaccgtagctccgcaagaaaccatcaagaaacttgaacaagcagctagaaggttagctaagagtgttaactatgttggagctgctactgttgagtatctctatagtatggacactggggagtactacttcttagagcttaaccctcgcttacaggttgagcatcctgtaaccgagtggatcgccgaggttaatcttcctgctgctcaagttgctgttgggatgggaattcctctctggcaaatccctgagataagacggttttacggtatggaacatggtggaggatatgattcttggaggaaaacatcggttgtagcctctccttttgattttgatgaagctgaatctttaaggccaaaaggtcattgtgtggctgtacgtgtgacaagcgaggatcctgatgacgggtttaaaccaaccagcggtgaaatacaggaattgagttttaagagcaagccaaatatgtggtcgtacttctctgtcaagtctggtggaggcatccacgagttctcagattcacagtttggacatgtttttgcatttggggaatccagatccgtggcgatagcaaatatggttcttgcgctgaaagaaattcaaatccgtggagatattaggactaacgttgactacacgatcgaccttctacatgcttctgattaccgggaaaacaaaatacacactggttggttggacagtaggattgctatgcgggtcagagcagagagacctccatggtatctctctgtagtcggtggggctctttataaagcatctacgaccagttctgctgtagtttcggattacgttggctatctagaaaaggggcaaattcccccaaagcatatatctcttgtgcattctcaagtgtcactgaatattgaaggaagtaaatatacgattgatgtagtccggggtggatcaggaacctacaggctaagaatgagcaactcagaagttgtagcagaaatacacactctacgtgatggaggtctattgatgcagttggatggtaaaagccatgtgatatatgcaaaggaagaagcgacaggaacccgtcttctcattgacggaagaacttgcttactacagaatgatcatgatccttcgaagttgatggctgagacaccatgcaagttgctaaggtacctggtttcagacaacagcagtattgatactgatacgccgtatgcagaagttgaagtcatgaagatgtgcatgccacttatttcacctgcgtcaggagttatccatttcaagttgtctgaaggacaagccatgcaggctggtgaactcatagccaagcttgatcttgatgatccttctgctgtaagaaaggccaaacccttccgtggaagtttcccacgattagggcttccaacggcaatctccggtaaagttcatcagagatgtgctgcaactttaaatgctgcacgtatgattcttgctggctatgatcataaagtagatgaggttcttcaagacttgcttaattgccttgatagccctgaactcccatttcttcagtggcaagagtgctttgcagttctggcgacacgactacctaaagatctcaggaacatgctagaattgaaatacaaggaatttgagattatctccaaaacctccctgaccccagatttccctgccaaactcttaaaaggcatccttgaggctcatctatcttcttgtgatgagaaagagagaggttcccttgaaaggctcattgaaccgttgatgagccttgtgaagtcttatgaaggtggtagagaaagtcatgcccgtcttattgttcattccctctttgaagaatacctatcagttgaagaattattcaatgataacatgctggctgatgttatagaacgcatgcgtcagcaatacaagaaggatcgattaaagattgtcgatatcgtgctttcacaccagggcataatacacaaaaacaaactggttcttcgacttatggagcagcttgtttatcctaatcctgctgcatacagagaaaaacttattcgattctcagcacttaatcatactaattactctcagttggcgctcaaggcgagtcaattgctcgaacagaccaaacgaagcgaacttcgttcaaatattgctagaagcctttcagaattagaaatgtttacagaggctggagaaaatatggatactcccaagaggaagagtgccattagtgaaacgatggaaaatcttgtgagctcatctttagctgttgaagacgctctcgtgggattatttgaccatagcgatcacacacttcaaagacgggttgttgagacttatattcacagattataccagccctatgtcgttaaagaaagtgtgaggatgcagtggcaccagtctggtgtcattgcttcttgggagttcctagaacatttcgaaagaaaaaacactggcccagacgatcacgagatatctgaaaaaggaattgttgcgaagagtagtaagagaaaacgggggactatggttataatcaaatcgctgcagtttctgccgagtataataaatgcatcattgagagaaacaaaccatagccactgtgaatatgcccgagctcctttatctggtaatatgatgcacattgctgttgtgggcatcaacaatcagatgagtctgcttcaggacagtggggacgaggaccaaactcaggaaagagtaaacaagctggccaaaattcttaaagaggaagaagtgagtttgactctctgttctgcaggtgtcggtgtgatcagttgtataattcagcgagatgaaggacgaacaccaatgagacattcttttcattggttgatggagaaacagtattatgtagaagagccgttgctgcgacatgttgaacctcctctatctgtataccttgagttggataagcttaaagggtactcaaatatacagtattcgccttcacgagaccgtcaatggcatatgtatagtgttacagacaggccagtgccaatcaaaagaatgttccttagatctcttgttcgacaaactacaatgaatgatgggtttctgttgcagcaagggcaggactaccaacttagccaaacagtgctctccatggcgtttacatcgaaatgcattctgaggtctttgatgaatgcaatggaggaactggaactgaatgcacataatgctgccatgaaaccagaccacgcacatatgttcctatgcatactacgtgagcagcagatagatgatcttgtgccttaccccaggagatttgaagtgaatgcggaggatgaagaaactacagttgagacgatcttagaagaagcaacacaggaaatacataggtctgttggagtgagaatgcatgcattgggtgtttgcgaatgggaagtgcgactgtggttggtgtcctcgggactggcaaatggcgcttggagggtcgtggttgcaaacgtgactggccgtacctgcactgtccatatataccgagaagtggaagctactgggagaaacagtttaatctaccactcaataactaagaagggacctttgcatggaactctgatcaatggtcaatataaaccacttaataatctggacaggaaacgtttagccgcaaggaggagtaacactacttattgctatgacttccccttggcatttgagacagcattggagctgaattgggcatcacaacactcgggagttaggaaaccatgcaagaatagactcatcaacgtcaaagagcttgtattctccaatacagaaggttctttgggtacatctcttattccggttgaacgaccagctggtctcaacgacattggaatggtggcctggatcttagagatgtcgactcctgagtttcctatgggacggaaacttctcattgtcgccaatgatgtcacattcaaagctggttcttttggtcctagagaggacgcatttttccttgctgtgactgaactcgcttgtaccaaaaagcttcccttgatttacttggcagcaaattctggtgcccgactcggtgtagctgaagaagtaaaagcatgcttcaaagttggatggtcggatgaagtttcccccggtaatgattttcagtatatatacctaagctctgaagactatgcaaggattggatcatctgtcattgcgcacgaagtgaagctccctagtggcgaaacaaggtgggtgattgatacaattgttggtaaagaagatggtcttggagttgagaatttaacaggaagtggggcaatagcgggtgcttactcaagggcgtacaatgaaacttttactttaacctttgttagtggaagatcggtcggaattggtgcttaccttgcccgactgggcatgaagtgcatacagagactagaccaaccgatcatcttgaccggcttttctacactcaacaagctgcttggacgtgaggtctatagctctcacatgcaacttggtggcccaaaaatcatggggacaaatggtgttgttcatcttacagtctcagatgatctcgaaggtgtatcagcaattctcaactggctgagctacattcctgcgtatgtgggtggtcctcttcctgttcttgctcctttagatccaccggagagaactgtggagtatatcccagagaactcttgtgacccacgagctgctatagctgggattaacgataatactggtaaatggcttggtggtatctttgataaaaatagctttgttgagactcttgaaggctgggcaaggacggtagtgactggtagagctaagcttgggggaatacccattggagttgttgctgtcgagacacagactgtaatgcatgtcatcccagcagatcctggacagcttgactctcatgaaagagtggttccgcaagcagggcaagtctggtttcctgattcagcagccaagacagctcaagcgctcatggatttcaaccgggaacagcttcctttgtttatcatagcaaactggagaggtttttcaggtgggcaaagagatctttttgaaggaatacttcaggcgggttcagctatagtagaaaatctgagaacatatcggcagccagtgtttgtgtacatcccaatgatgggagaactgcgaggtggagcatgggtggttgttgatagccagataaattcggattatattgaaatgtacgctgatgaaaccgctcgtggaaatgtgcttgagcctgaagggatgatagagataaaatttagaaggaaagagctgttagagtgcatgggaaggttggaccagacgctaatcaatctgaaagcaaatatccaagatgccaagcgaaacaaggcatatgcaaacatcgagcttctccagaaacagattaaaacccgagagaagcaacttttaccagtttatacccaaatcgctaccaaatttgctgaactccatgacacttccatgagaatggctgcaaaaggtgtgatcaaaagtgttgtggaatggagcggctcgcggtcattcttctataaaaagctctatcggagaatcgcagagagctctctagtgaggaacataagaaaagcttctggagacatcttatcatataaatctgctatgggtttgattcaggactggttccgcaaatccgagattgcaaaggggaaagaagaagcttggacggacgaccaactgttctttacatggaaagacaatgttagtaactacgagcagaagctgagcgagttgagaacacagaaactgctgaatcaacttgcagagattgggaattcgtcagatctgcaggctctgccacaaggacttgctaatcttctaaacaaggtggatctttcaagaagagaagagctggtggacgcgattcggaaggtgttgggttga

SEQ ID NO: 10033 - protein, 2375 aa, Arabidopsis thaliana
MEMRALGSSCSTGNGGSAPITLTNISPWITTVFPSTVKLRSSLRTFKGVSSRVRTFKGVSSTRVLSRTKQQFPLFCFLNPDPISFLENGFFLSIFCLTYDCIFSLFSYTFDMNLSVISMITLIGSRAGSVNGYHSDVVPGRNVAEVNEFCKALGGKRPIHSILVATNGMAAVKFIRSVRTWAYETFGSEKAVKLVAMATPEDMRINAEHIRIADQFVEVPGGTNNNNYANVQLIVEMAEVTRVDAVWPGWGHASENPELPDALKEKGIIFLGPPADSMIALGDKIGSSLIAQAADVPTLPWSGSHVKIPPGRSLVTVPEEIYKKACVYTTEEAIASCQVVGYPAMIKASWGGGGKGIRKVHNDDEVRALFKQVQGEVPGSPIFIMKVASQSRHLEAQLLCDQYGNVAALHSRDCSVQRRHQKIIEEGPITVAPQETIKKLEQAARRLAKSVNYVGAATVEYLYSMDTGEYYFLELNPRLQVEHPVTEWIAEVNLPAAQVAVGMGIPLWQIPEIRRFYGMEHGGGYDSWRKTSVVASPFDFDEAESLRPKGHCVAVRVTSEDPDDGFKPTSGEIQELSFKSKPNMWSYFSVKSGGGIHEFSDSQFGHVFAFGESRSVAIANMVLALKEIQIRGDIRTNVDYTIDLLHASDYRENKIHTGWLDSRIAMRVRAERPPWYLSVVGGALYKASTTSSAVVSDYVGYLEKGQIPPKHISLVHSQVSLNIEGSKYTIDVVRGGSGTYRLRMSNSEVVAEIHTLRDGGLLMQLDGKSHVIYAKEEATGTRLLIDGRTCLLQNDHDPSKLMAETPCKLLRYLVSDNSSIDTDTPYAEVEVMKMCMPLISPASGVIHFKLSEGQAMQAGELIAKLDLDDPSAVRKAKPFRGSFPRLGLPTAISGKVHQRCAATLNAARMILAGYDHKVDEVLQDLLNCLDSPELPFLQWQECFAVLATRLPKDLRNMLELKYKEFEIISKTSLTPDFPAKLLKGILEAHLSSCDEKERGSLERLIEPLMSLVKSYEGGRESHARLIVHSLFEEYLSVEELFNDNMLADVIERMRQQYKKDRLKIVDIVLSHQGIIHKNKLVLRLMEQLVYPNPAAYREKLIRFSALNHTNYSQLALKASQLLEQTKRSELRSNIARSLSELEMFTEAGENMDTPKRKSAISETMENLVSSSLAVEDALVGLFDHSDHTLQRRVVETYIHRLYQPYVVKESVRMQWHQSGVIASWEFLEHFERKNTGPDDHEISEKGIVAKSSKRKRGTMVIIKSLQFLPSIINASLRETNHSHCEYARAPLSGNMMHIAVVGINNQMSLLQDSGDEDQTQERVNKLAKILKEEEVSLTLCSAGVGVISCIIQRDEGRTPMRHSFHWLMEKQYYVEEPLLRHVEPPLSVYLELDKLKGYSNIQYSPSRDRQWHMYSVTDRPVPIKRMFLRSLVRQTTMNDGFLLQQGQDYQLSQTVLSMAFTSKCILRSLMNAMEELELNAHNAAMKPDHAHMFLCILREQQIDDLVPYPRRFEVNAEDEETTVETILEEATQEIHRSVGVRMHALGVCEWEVRLWLVSSGLANGAWRVVVANVTGRTCTVHIYREVEATGRNSLIYHSITKKGPLHGTLINGQYKPLNNLDRKRLAARRSNTTYCYDFPLAFETALELNWASQHSGVRKPCKNRLINVKELVFSNTEGSLGTSLIPVERPAGLNDIGMVAWILEMSTPEFPMGRKLLIVANDVTFKAGSFGPREDAFFLAVTELACTKKLPLIYLAANSGARLGVAEEVKACFKVGWSDEVSPGNDFQYIYLSSEDYARIGSSVIAHEVKLPSGETRWVIDTIVGKEDGLGVENLTGSGAIAGAYSRAYNETFTLTFVSGRSVGIGAYLARLGMKCIQRLDQPIILTGFSTLNKLLGREVYSSHMQLGGPKIMGTNGVVHLTVSDDLEGVSAILNWLSYIPAYVGGPLPVLAPLDPPERTVEYIPENSCDPRAAIAGINDNTGKWLGGIFDKNSFVETLEGWARTVVTGRAKLGGIPIGVVAVETQTVMHVIPADPGQLDSHERVVPQAGQVWFPDSAAKTAQALMDFNREQLPLFIIANWRGFSGGQRDLFEGILQAGSAIVENLRTYRQPVFVYIPMMGELRGGAWVVVDSQINSDYIEMYADETARGNVLEPEGMIEIKFRRKELLECMGRLDQTLINLKANIQDAKRNKAYANIELLQKQIKTREKQLLPVYTQIATKFAELHDTSMRMAAKGVIKSVVEWSGSRSFFYKKLYRRIAESSLVRNIRKASGDILSYKSAMGLIQDWFRKSEIAKGKEEAWTDDQLFFTWKDNVSNYEQKLSELRTQKLLNQLAEIGNSSDLQALPQGLANLLNKVDLSRREELVDAIRKVLG

SEQ ID NO: 10034 - DNA, 1620 bp, Glycine max
  CDS (1)..(1620)
  misc_feature (1206)..(1206): v is a, g or c
atggaagtcacactttcagcctgcaagtccgttagctcgccttctgttcccgtcgcaggtttgtttgcggggaatggaggaattaagagctcgcaatgcagtttcttagcgggagcgagcaaagtgaggtttcctaggcaagtaggtcaagttagccaccttcgcaaacagcgccaaacgcgtcactgcggtgctctccacgcgacttgcagcggtgacaagatcctgatcgcgaacagaggcgagattgccgtccgcgttattcgaaccgctcatgaattggggattccttgtgtggctgtgtactccaccatcgacaaggacgcgcttcatgtcaaattggctgatgaagccgtttgcatcggggaagcgccgagtagccagtcctacttgctgatcccgaatgttctgtcagctgctattagccgcagatgcaccatgttgcatcctggctatggttttcttgcggagaatgcagtgtttgttgaaatgtgcagagaacatggaatcaactttattgggcctaaccctgacagtattcgggttatgggtgacaaagcaactgccagagagacaatgaagaaagcaggtgttcccaccgttccgggaagtgatggccttttacagagcacagaagaagccatcagactggcaaatgagattggtttccctgtgatgatcaaggcaacagctggtggtggaggacgtggcatgcgtcttgctaaagaacctgctgagcttgtgaagtttttacagcaagctaagagtgaggcagctgctgcatttggcaatgatggggtttatttggagaagtacattcaaaacccaaggcacattgagttccaggttcttgcagataaatatggtaatgttgttcactttggagaacgtgattgcagcattcagaggcgcaaccagaaactgcttgaagaagcaccatctcctgccctgacccctgagttgcgaaaggcaatgggagatgcagcagttgcagctgctgcatctattggttacataggtgttggaacggttgagttccttttggatgaaagaggttccttttactttatggagatgaacactcgtatccaggttgagcatccggtgacagaaatgatttcctcaacggatttgatagaagagcaaattcgtgtagctatgggagaaaaacttcgatacaaacaggaggatattgtcctcagaggvcattctattgaatgccgtatcaatgcagaagatgcttttaagggatttagaccagggccaggtagaattactgcatacttgccatccggaggtccatttgttagaatggatagccatgtttatcctgattatgtggttcctccaagctatgattcccttcttggaaagctgattgtatgggccccaactagagaaaaagcaattgaacgcatgaaaagggcacttgatgatactattatcacaggagttcctactacaattgattatcataaacttatccttgacatagaggatttcagaaatggcaaggttgatactgcttttattccaaaacacgaggaagagttggcaatgccaccgcagaagatggtactcgctaacagggtgaatgaactagctggttcaactgcctga

SEQ ID NO: 10035 - protein, 539 aa, Glycine max
MEVTLSACKSVSSPSVPVAGLFAGNGGIKSSQCSFLAGASKVRFPRQVGQVSHLRKQRQTRHCGALHATCSGDKILIANRGEIAVRVIRTAHELGIPCVAVYSTIDKDALHVKLADEAVCIGEAPSSQSYLLIPNVLSAAISRRCTMLHPGYGFLAENAVFVEMCREHGINFIGPNPDSIRVMGDKATARETMKKAGVPTVPGSDGLLQSTEEAIRLANEIGFPVMIKATAGGGGRGMRLAKEPAELVKFLQQAKSEAAAAFGNDGVYLEKYIQNPRHIEFQVLADKYGNVVHFGERDCSIQRRNQKLLEEAPSPALTPELRKAMGDAAVAAAASIGYIGVGTVEFLLDERGSFYFMEMNTRIQVEHPVTEMISSTDLIEEQIRVAMGEKLRYKQEDIVLRGHSIECRINAEDAFKGFRPGPGRITAYLPSGGPFVRMDSHVYPDYVVPPSYDSLLGKLIVWAPTREKAIERMKRALDDTIITGVPTTIDYHKLILDIEDFRNGKVDTAFIPKHEEELAMPPQKMVLANRVNELAGSTA

SEQ ID NO: 10036 - DNA, 1335 bp, Bacillus subtilis
  CDS (1)..(1335): transl_table=11
atgtttacaaaagtactgatcgccaatcgcggagaaattgcaatgagaattatccgaacatgcagccgtctcggcatcaaaacggtcgcggtttattctgaagcagacagagacgctccccatacaaaggcggccacggaggcttatttgatcggggaatcaagagtcagtgaaagttatttaaatatagagagaatcatagagacagcgaaaaaagcaaacgccgatgccatccacccgggatacgggttattatcagaaaacagccgattcgctgaacgctgcaagcaagaaaacatcgtgtttatcggccctgcacccgatatcatcgcaaagatggggagcaaaattgaagcacgtaaagcaatggaagcggcaggtgtccctgtagtacccggtgtttccgaatccctcggagacattcaggaagcttgccgcactgcaagtcaaatcggctatcctgtcatgctgaaagcttcagcgggcggaggcggcatcggtatgcagcttgttcaaaacgaggaagcattaagaaaggcgtacgaggggaacaaaaagcgcgcagcagattttttcggtgacgggtcgatgtatatagagaaagttattgaacatgcccgccacatcgaagttcagcttttagccgatcatttcggccatacaatacacctgtttgaacgcgattgctctgttcagaggcggcatcaaaaggtcattgaagaagcgccgtcaccatttttagacgataaactaagaatgaagatcgggcaaacggccgtaaaagcagcgaaagcgatcggctatacaaatgcaggcacgatcgaatttttagttgacccgaatcaaaacttttatttcctcgaaatgaatacgagattgcaagttgaacatcccgtgactgaagaaataacgggcctggacttagttgagcagcagttacggattgctgcgggccatacactcacattctcccagcaagacattaaacgaaacgggcatgcgatagaggtcagaatatacgcagaagatcccaagaccttctatccgtcaccaggtacgatcactgcgttttcactccctgaccaaaaaggggtcagacacgaatgtgcggtcgcaaaagacagcaccgttactcctttttatgacccgatgatcgccaagatgatcgtcaaaggccaaaccagagcggatgcaattgaaaagctggagtcagcgctccgcgactatcggatagagggaatcaaaacaaatcttccgcttctcatacaggctgcggcatcaaaagcatttaaagaaggtaatgtcacgactgactttttgaaacaacacctataa

SEQ ID NO: 10037 - protein, 444 aa, Bacillus subtilis
MFTKVLIANRGEIAMRIIRTCSRLGIKTVAVYSEADRDAPHTKAATEAYLIGESRVSESYLNIERIIETAKKANADAIHPGYGLLSENSRFAERCKQENIVFIGPAPDIIAKMGSKIEARKAMEAAGVPVVPGVSESLGDIQEACRTASQIGYPVMLKASAGGGGIGMQLVQNEEALRKAYEGNKKRAADFFGDGSMYIEKVIEHARHIEVQLLADHFGHTIHLFERDCSVQRRHQKVIEEAPSPFLDDKLRMKIGQTAVKAAKAIGYTNAGTIEFLVDPNQNFYFLEMNTRLQVEHPVTEEITGLDLVEQQLRIAAGHTLTFSQQDIKRNGHAIEVRIYAEDPKTFYPSPGTITAFSLPDQKGVRHECAVAKDSTVTPFYDPMIAKMIVKGQTRADAIEKLESALRDYRIEGIKTNLPLLIQAAASKAFKEGNVTTDFLKQHL

SEQ ID NO: 10038 - DNA, 1773 bp, Streptomyces coelicolor
  CDS (1)..(1773): transl_table=11
gtgcgcaaggtgctcatcgccaatcgtggcgaaatcgctgtccgcgtggcccgggcctgccgggacgccgggatcgcgagcgtggccgtctacgcggatccggaccgggacgcgttgcacgtccgtgccgctgatgaggcgttcgccctgggtggtgacacccccgcgaccagctatctggacatcgccaaggtcctcaaagccgcgcgcgagtcgggcgcggacgccatccaccccggctacggattcctctcggagaacgccgagttcgcgcaggcggtcctggacgccggcctgatctggatcggcccgcccccgcacgccatccgcgaccgtggcgaaaaggtcgccgcccgccacatcgcccagcgggccggcgcccccctggtcgccggcacccccgaccccgtctccggcgcggacgaggtcgtcgccttcgccaaggagcacggcctgcccatcgccatcaaggccgccttcggcggcggcgggcgcggcctcaaggtcgcccgcaccctcgaagaggtgccggagctgtacgactccgccgtccgcgaggccgtggccgccttcggccgcggggagtgcttcgtcgagcgctacctcgacaagccccgccacgtggagacccagtgcctggccgacacccacggcaacgtggtcgtcgtctccacccgcgactgctccctccagcgccgccaccaaaagctcgtcgaggaggcccccgcgccctttctctccgaggcccagacggagcagctgtactcatcctccaaggccatcctgaaggaggccggctacggcggcgccggcaccgtggagttcctcgtcggcatggacggcacgatcttcttcctggaggtcaacacccgcctccaggtcgagcacccggtcaccgaggaagtcgccggcatcgacttggtccgcgagatgttccgcatcgccgacggcgaggaactcggttacgacgaccccgccctgcgcggccactccttcgagttccgcatcaacggcgaggaccccggccgcggcttcctgcccgcccccggcaccgtcaccctcttcgacgcgcccaccggccccggcgtccgcctggacgccggcgtcgagtccggctccgtcatcggccccgcctgggactccctcctcgccaaactgatcgtcaccggccgcacccgcgccgaggcactccagcgcgcggcccgcgccctggacgagttcaccgtcgagggcatggccaccgccatccccttccaccgcacggtcgtccgcgacccggccttcgcccccgaactcaccggctccacggaccccttcaccgtccacacccggtggatcgagacggagttcgtcaacgagatcaagcccttcaccacgcccgccgacaccgagacggacgaggagtcgggccgggagacggtcgtcgtcgaggtcggcggcaagcgcctggaagtctccctcccctccagcctgggcatgtccctggcccgcaccggcctggccgccggggcccgccccaagcgccgcgcggccaagaagtccggccccgccgcctcgggcgacaccctcgcctccccgatgcagggcacgatcgtcaagatcgccgtcgaggaaggccaggaagtccaggaaggcgacctcatcgtcgtactcgaggcgatgaagatggaacagcccctcaacgcccacaggtccggcaccatcaagggcctcaccgccgaggtcggcgcctccctcacctccggcgccgccatctgcgagatcaaggactga

SEQ ID NO: 10039 - protein, 590 aa, Streptomyces coelicolor
MRKVLIANRGEIAVRVARACRDAGIASVAVYADPDRDALHVRAADEAFALGGDTPATSYLDIAKVLKAARESGADAIHPGYGFLSENAEFAQAVLDAGLIWIGPPPHAIRDRGEKVAARHIAQRAGAPLVAGTPDPVSGADEVVAFAKEHGLPIAIKAAFGGGGRGLKVARTLEEVPELYDSAVREAVAAFGRGECFVERYLDKPRHVETQCLADTHGNVVVVSTRDCSLQRRHQKLVEEAPAPFLSEAQTEQLYSSSKAILKEAGYGGAGTVEFLVGMDGTIFFLEVNTRLQVEHPVTEEVAGIDLVREMFRIADGEELGYDDPALRGHSFEFRINGEDPGRGFLPAPGTVTLFDAPTGPGVRLDAGVESGSVIGPAWDSLLAKLIVTGRTRAEALQRAARALDEFTVEGMATAIPFHRTVVRDPAFAPELTGSTDPFTVHTRWIETEFVNEIKPFTTPADTETDEESGRETVVVEVGGKRLEVSLPSSLGMSLARTGLAAGARPKRRAAKKSGPAASGDTLASPMQGTIVKIAVEEGQEVQEGDLIVVLEAMKMEQPLNAHRSGTIKGLTAEVGASLTSGAAICEIKD

SEQ ID NO: 10040 - DNA, 6774 bp, Arabidopsis thaliana
  CDS (1)..(6774)
atggctggctcggttaacgggaatcatagtgctgtaggacctggtataaattatgagacggtgtctcaagtggatgagttctgtaaagcacttagagggaaaaggccgatccatagtattttgatagctaacaatggaatggcggctgtgaagtttatacgtagtgtcagaacatgggcttatgaaacatttggtacggaaaaagccatattgttggtggggatggcaacccctgaagacatgcggatcaatgcggagcatatcagaatcgctgatcagtttgttgaggttcccggaggaaccaacaataacaattatgctaacgttcagctgattgtggagatggctgaagtaacacgcgtggatgcagtttggcctggttggggtcatgcatctgaaaaccccgaattacctgatgccctagatgcaaaaggaatcatatttcttggtcctccagcatcttcaatggcagcactgggagataagattggttcttcgttgattgcacaagctgctgatgtacccactctgccatggagtggttcccatgttaaaatacctcctaatagcaacttggtaaccatcccagaggagatctaccggcaagcatgtgtctacacaactgaagaagcgattgctagctgtcaagttgtcggttacccagcaatgatcaaagcatcgtggggtggtggtggtaaaggaatcaggaaggttcataatgatgatgaggttagggctctattcaagcaagttcagggtgaggtcccaggctcaccaatattcataatgaaggttgcgtcacagagtcggcatctagaggtccagctgctctgtgacaagcatggaaatgtttcagctctgcatagccgtgattgtagcgtccagagaagacatcaaaagatcatagaggagggtccaattactgtggctccgccagaaactgtcaagaaacttgaacaagcagctagaaggttggctaagagtgttaactatgttggagctgctactgttgagtatctctacagtatggacactggggagtactacttcttagagcttaaccctcgcttacaggttgagcatcctgtcactgagtggattgccgagataaatcttcctgctgcccaagttgctgtggggatgggaattcctctctggcaaatccctgagataagacggttctatggaatagaacatggtggaggttatgattcttggcgaaaaacatctgttgtagccttcccttttgattttgataaagctcaatctataaggccaaaaggtcattgtgtggctgtacgtgtgacaagtgaggatcctgatgacgggttcaaaccaaccagcggtagagttcaggagttgagttttaagagcaagccaaatgtgtgggcgtacttctctgtcaagtctggtggaggcatccacgagttctcggattcccagtttggacatgtttttgcatttggggaatccagagccctggcgatagcgaatatggttcttgggctaaaagaaattcagatccgtggagaaattaggactaacgttgactacacgatcgaccttttacatgcttctgattaccgtgataacaaaattcacactggttggttggatagtaggattgctatgcgggtcagagctgagaggcctccatggtatctctctgttgtcggcggagctctctataaagcatcagcgaccagtgctgctgtggtttcagattacgttggttatctggagaaggggcaaatccctccaaagcatatatctcttgtacattctcaagtgtctctgaatattgaaggaagtaaatatacgattgatgtagtccggggtggatcaggaacctacaggctaagaatgaacaagtcagaagtggtagcagaaatacacactctacgtgatggaggtctgttgatgcagttggatggcaaaagccatgtgatatatgcagaggaagaagctgcaggaactcgtcttctcattgatggaagaacttgtttgctacagaatgaccacgatccatcaaagttaatggctgagacaccgtgcaagttgatgaggtatttgatttccgacaacagcaatattgacgctgatacgccttatgccgaagttgaggtcatgaagatgtgcatgccacttctttcacctgcttcaggagttatccattttaaaatgtctgaaggacaagccatgcaggctggtgaacttatagccaatcttgatcttgatgatccttctgctgtaagaaaggccgaacccttccatggaagtttcccaagattagggcttccaactgcaatatccggtagagttcatcagagatgtgccgcaacattaaatgctgcacgcatgattcttgctggctatgagcataaagtagatgaggttgttcaagacttacttaattgccttgatagccctgaactcccatttcttcagtggcaagagtgctttgcagttctggcgacacgactacctaaaaatctcaggaacatgctagaatcaaagtatagggaatttgagagtatttccagaaactctttgaccaccgatttccctgccaaacttttaaaaggcattcttgaggcacatttatcttcttgtgatgagaaagagagaggtgcccttgaaaggctcattgaaccattgatgagccttgcaaaatcttatgaaggtggtagagaaagtcatgcccgtgttattgttcattctctctttgaagaatatctatcagtagaagaattattcaatgataacatgctggctgatgttatagaacgcatgcgtcagctatacaagaaagatctgttgaaaattgtggatatagtgctctcacaccagggcataaaaaacaaaaacaaactcgttctccggctcatggagcagcttgtttaccctaatcctgctgcttacagagataaacttattcgattctcaacacttaaccatactaactactctgaggtgcgtttgttggcgctcaaggcgagtcaattacttgaacagaccaaactaagtgagcttcgttcaaacattgctagaagcctttcagagttagaaatgtttacagaggacggagaaaatatggatactcccaagaggaaaagtgccattaatgaaagaatagaagatcttgtaagcgcatctttagctgttgaagacgctctcgtgggactatttgaccatagcgatcacacacttcaaagacgggttgttgagacttatattcgcagattataccagccctacgtcgttaaagatagcgtgaggatgcagtggcaccgttctggtcttcttgcttcctgggagttcctagaggagcatatggaaagaaaaaacattggcttagacgatcccgacacatctgaaaaaggattggttgagaagcgtagtaagagaaaatggggggctatggttataatcaaatctttgcagtttcttccaagtataataagtgcagcattgagagaaacaaagcacaacgactatgaaactgccggagctcctttatctggcaatatgatgcacattgctattgtgggcatcaacaaccagatgagtctgcttcaggacagtggggatgaagaccaagctcaggaaagagtaaacaagttggccaaaattcttaaagaggaagaagtgagttcaagcctctgttctgccggtgttggtgtaatcagctgtataattcagcgagatgaaggacgaacacccatgagacattctttccattggtcgttggagaaacagtattatgtagaagagccgttgctgcgtcatcttgaacctcctctgtccatttaccttgagttggataagctgaaaggatactcaaatatacaatatacgccttctcgagatcgtcaatggcatctgtatactgttacagacaagccagtgccaatcaagaggatgttcctgagatctcttgttcgacaggctacaatgaacgatggatttatattgcagcaagggcaggataagcagcttagccaaacactgatctccatggcgtttacgtcgaaatgtgttctgaggtctttgatggatgccatggaggaactggaactgaatgcccataatgctgcaatgaaaccagatcacgcacatatgtttctttgcatattgcgtgagcagcagatagatgatcttgtgcctttccccaggagagttgaagtgaatgcggaggatgaagaaactacagttgaaatgatcttagaagaagcagcacgagagatacatagatctgttggagtgagaatgcataggttgggcgtgtgcgagtgggaagtgcggctgtggttggtgtcctctggactggcatgtggtgcttggagggttgtggttgcaaacgtgacaggccgtacatgcactgtccacatataccgagaagttgaaactcctggaagaaacagtttaatctaccactcaataaccaagaagggacctttgcatgaaacaccaatcagtgatcaatataagcccctgggatatctcgacaggcaacgtttagcagcaaggaggagtaacactacttattgctatgacttcccgttggcatttgggacagccttggaactgttgtgggcatcacaacacccaggagttaagaaaccatataaggatactctgatcaatgttaaagagcttgtattctcaaaaccagaaggttcttcgggtacatctctagatctggttgaaagaccacccggtctcaacgactttggaatggttgcctggtgcctagatatgtcgaccccagagtttcctatggggcggaaacttctcgtgattgcgaatgatgtcaccttcaaagctggttcttttggtcctagagaggacgcgtttttccttgctgttactgaactcgcttgtgccaagaagcttcccttgatttacttggcagcaaattctggtgcccgacttggggttgctgaagaagtcaaagcctgcttcaaagttggatggtcggatgaaatttcccctgagaatggttttcagtatatatacctaagccctgaagaccacgaaaggattggatcatctgtcattgcccatgaagtaaagctctctagtggggaaactaggtgggtgattgatacgatcgttggcaaagaagatggtattggtgtagagaacttaacaggaagtggggccatagcgggtgcttactcaaaggcatacaatgaaacttttactttaacctttgttagtggaagaacggttggaattggtgcttatcttgcccgcctaggtatgcggtgcatacagagacttgatcagccgatcatcttgactggcttctctacactcaacaagttacttgggcgtgaggtctatagctctcacatgcaactgggtggcccgaaaatcatgggcacaaatggtgttgttcatcttacagtctcagatgatcttgaaggcgtatcagcaattctcaactggctcagctacattcctgcttacgtgggtggtcctcttcctgttcttgcccctttagatccaccggagagaattgtggagtatgtcccagagaactcttgcgacccacgagcggctatagctggggtcaaagacaataccggtaaatggcttggaggtatctttgataaaaatagtttcattgagactcttgaaggctgggcaaggacggtagtgactggtagagccaagctcgggggaatacccgttggagttgttgcagttgagacacagactgtcatgcagatcatcccagccgatcctggacagcttgactctcatgaaagagtggttccgcaagcagggcaagtctggtttcctgattcagcggccaagactgctcaagcgcttatggatttcaaccgggaagagcttccattgtttatcctagcgaactggagagggttttcaggtgggcagagagatcttttcgaaggaatacttcaggcaggttcaactatagtagaaaatctgagaacctatcgtcagccagtgtttgtgtacatcccaatgatgggagagctgcgcggtggagcgtgggttgttgttgacagccagataaattcggattatgttgaaatgtatgctgatgaaacagctcgtggaaatgtgcttgagccagaagggacaatagagataaaatttagaacaaaagagctattagagtgcatgggaaggttggaccagaagctaatcagtctgaaagcaaaactgcaagatgccaagcaaagcgaggcctatgcaaacatcgagcttctccagcaacagattaaagcccgagagaaacagcttttaccagtttatatccaaatcgccaccaaatttgcagaacttcatgacacttccatgagaatggctgcaaagggagtgatcaaaagtgttgtggaatggagcggctcgcggtccttcttctacaaaaagctcaataggagaatcgctgagagctctcttgtgaaaaacgtaagagaagcatctggagacaacttagcatataaatcttcaatgcgtctgattcaggattggttctgcaactctgatattgcaaaggggaaagaagaagcttggacagacgaccaagtgttctttacatggaaggacaatgttagtaactacgagttgaagctgagcgagttgagagcgcagaaactactgaaccaacttgcagagattgggaattcctcagatttgcaagctctgccacaaggacttgctaatcttctaaacaaggtggagccgtcgaaaagagaagagctggtggctgctattcgaaaggtcttgggttga

SEQ ID NO: 10041 - protein, 2257 aa, Arabidopsis thaliana
MAGSVNGNHSAVGPGINYETVSQVDEFCKALRGKRPIHSILIANNGMAAVKFIRSVRTWAYETFGTEKAILLVGMATPEDMRINAEHIRIADQFVEVPGGTNNNNYANVQLIVEMAEVTRVDAVWPGWGHASENPELPDALDAKGIIFLGPPASSMAALGDKIGSSLIAQAADVPTLPWSGSHVKIPPNSNLVTIPEEIYRQACVYTTEEAIASCQVVGYPAMIKASWGGGGKGIRKVHNDDEVRALFKQVQGEVPGSPIFIMKVASQSRHLEVQLLCDKHGNVSALHSRDCSVQRRHQKIIEEGPITVAPPETVKKLEQAARRLAKSVNYVGAATVEYLYSMDTGEYYFLELNPRLQVEHPVTEWIAEINLPAAQVAVGMGIPLWQIPEIRRFYGIEHGGGYDSWRKTSVVAFPFDFDKAQSIRPKGHCVAVRVTSEDPDDGFKPTSGRVQELSFKSKPNVWAYFSVKSGGGIHEFSDSQFGHVFAFGESRALAIANMVLGLKEIQIRGEIRTNVDYTIDLLHASDYRDNKIHTGWLDSRIAMRVRAERPPWYLSVVGGALYKASATSAAVVSDYVGYLEKGQIPPKHISLVHSQVSLNIEGSKYTIDVVRGGSGTYRLRMNKSEVVAEIHTLRDGGLLMQLDGKSHVIYAEEEAAGTRLLIDGRTCLLQNDHDPSKLMAETPCKLMRYLISDNSNIDADTPYAEVEVMKMCMPLLSPASGVIHFKMSEGQAMQAGELIANLDLDDPSAVRKAEPFHGSFPRLGLPTAISGRVHQRCAATLNAARMILAGYEHKVDEVVQDLLNCLDSPELPFLQWQECFAVLATRLPKNLRNMLESKYREFESISRNSLTTDFPAKLLKGILEAHLSSCDEKERGALERLIEPLMSLAKSYEGGRESHARVIVHSLFEEYLSVEELFNDNMLADVIERMRQLYKKDLLKIVDIVLSHQGIKNKNKLVLRLMEQLVYPNPAAYRDKLIRFSTLNHTNYSEVRLLALKASQLLEQTKLSELRSNIARSLSELEMFTEDGENMDTPKRKSAINERIEDLVSASLAVEDALVGLFDHSDHTLQRRVVETYIRRLYQPYVVKDSVRMQWHRSGLLASWEFLEEHMERKNIGLDDPDTSEKGLVEKRSKRKWGAMVIIKSLQFLPSIISAALRETKHNDYETAGAPLSGNMMHIAIVGINNQMSLLQDSGDEDQAQERVNKLAKILKEEEVSSSLCSAGVGVISCIIQRDEGRTPMRHSFHWSLEKQYYVEEPLLRHLEPPLSIYLELDKLKGYSNIQYTPSRDRQWHLYTVTDKPVPIKRMFLRSLVRQATMNDGFILQQGQDKQLSQTLISMAFTSKCVLRSLMDAMEELELNAHNAAMKPDHAHMFLCILREQQIDDLVPFPRRVEVNAEDEETTVEMILEEAAREIHRSVGVRMHRLGVCEWEVRLWLVSSGLACGAWRVVVANVTGRTCTVHIYREVETPGRNSLIYHSITKKGPLHETPISDQYKPLGYLDRQRLAARRSNTTYCYDFPLAFGTALELLWASQHPGVKKPYKDTLINVKELVFSKPEGSSGTSLDLVERPPGLNDFGMVAWCLDMSTPEFPMGRKLLVIANDVTFKAGSFGPREDAFFLAVTELACAKKLPLIYLAANSGARLGVAEEVKACFKVGWSDEISPENGFQYIYLSPEDHERIGSSVIAHEVKLSSGETRWVIDTIVGKEDGIGVENLTGSGAIAGAYSKAYNETFTLTFVSGRTVGIGAYLARLGMRCIQRLDQPIILTGFSTLNKLLGREVYSSHMQLGGPKIMGTNGVVHLTVSDDLEGVSAILNWLSYIPAYVGGPLPVLAPLDPPERIVEYVPENSCDPRAAIAGVKDNTGKWLGGIFDKNSFIETLEGWARTVVTGRAKLGGIPVGVVAVETQTVMQIIPADPGQLDSHERVVPQAGQVWFPDSAAKTAQALMDFNREELPLFILANWRGFSGGQRDLFEGILQAGSTIVENLRTYRQPVFVYIPMMGELRGGAWVVVDSQINSDYVEMYADETARGNVLEPEGTIEIKFRTKELLECMGRLDQKLISLKAKLQDAKQSEAYANIELLQQQIKAREKQLLPVYIQIATKFAELHDTSMRMAAKGVIKSVVEWSGSRSFFYKKLNRRIAESSLVKNVREASGDNLAYKSSMRLIQDWFCNSDIAKGKEEAWTDDQVFFTWKDNVSNYELKLSELRAQKLLNQLAEIGNSSDLQALPQGLANLLNKVEPSKREELVAAIRKVLG

SEQ ID NO: 10042 - DNA, 1773 bp, Streptomyces coelicolor
  CDS (1)..(1773): transl_table=11
gtgcgcaaggtgctcatcgccaatcgtggcgaaatcgctgtccgcgtggcccgggcctgccgggacgccgggatagcgagcgtggccgtctacgcggatccggaccgggacgcgttgcacgtccgtgccgctgatgaggcgttcgccctgggtggtgacacccccgcgaccagctatctggacatcgccaaggtcctcaaagccgcgcgcgagtcgggcgcggacgccatccaccccggctacggtttcctctcggagaacgccgacttcgcgcaggcggtcctggacgccggcctgatctggatcggcccgcccccgcacgccatccgcgaccgtggcgaaaaggtcgccgcccgccacatcgcccagcgggccggcgcccccctggtcgccggcacccccgaccccgtctccggcgcggacgaggtcgtcgccttcgccaaggagcacggcctgcccatcgccatcaaggccgccttcggcggcggcgggcgcggcctcaaggtcgcccgcaccctcgaagaggtgccggagctgtacgactccgccgtccgcgaggccgtggccgccttcggccgcggggagtgcttcgtcgagcgctacctcgacaagccccgccacgtggagacccagtgcctggccgacacccacggcaacgtggtcgtcgtctccacccgcgactgctccctccagcgccgccaccaaaagctcgtcgaggaggcccccgcgcccttcctctccgaggcccagacggagcagctgtactcatcctccaaggccatcctgaaggaggccggctacgtcggcgccggcaccgtggagttcctcgtcggcatggacggcacgatctccttcctggaggtcaacacccgcctccaggtcgagcacccggtcaccgaggaagtcgccggcatcgacctggtccgcgagatgttccgcatcgccgacggcgaggaactcggctacgacgaccccgccctgcgcggccactccttcgagttccgcatcaacggcgaccaccccggccgcggcttcctgcccgcccccggcaccgtcaccctcttcgacgcgcccaccggccccggcgtccgcctggacgccggcgtcgagtccggctccgtcatcggccccgcctgggactccctcctcgccaaactgatcgtcaccggccgcacccgcgccgaggcactccagcgcgcggcccgcgccctggacgagttcaccgtcgagggcatggccaccgccatccccttccaccgcacggtcgtccgcgacccggccttcgcccccgaactcaccggctccacggaccccttcaccgtccacacccggtggatcgagacggagttcgtcaacgagatcaagcccttcaccacgcccgccgacaccgagacggacgaggagtcgggccgggagacggtcgtcgtcgaggtcggcggcaagcgcctggaagtctccctcccctccagcctgggcatgtccctggcccgcaccggcctggccgccggggcccgccccaagcgccgcgcggccaagaagtccggccccgccgcctcgggcgacaccctcgcctccccgatgcagggcacgatcgtcaagatcgccgtcgaggagggccaggaagtccaggaaggcgacctcatcgtcgtactcgaggcgatgaagatggaacagcccctcaacgcccacaggtccggcaccatcaagggcctcaccgccgaggtcggcgcctccctcacctccggcgccgccatctgcgagatcaaggactga

SEQ ID NO: 10043 - protein, 590 aa, Streptomyces coelicolor
MRKVLIANRGEIAVRVARACRDAGIASVAVYADPDRDALHVRAADEAFALGGDTPATSYLDIAKVLKAARESGADAIHPGYGFLSENADFAQAVLDAGLIWIGPPPHAIRDRGEKVAARHIAQRAGAPLVAGTPDPVSGADEVVAFAKEHGLPIAIKAAFGGGGRGLKVARTLEEVPELYDSAVREAVAAFGRGECFVERYLDKPRHVETQCLADTHGNVVVVSTRDCSLQRRHQKLVEEAPAPFLSEAQTEQLYSSSKAILKEAGYVGAGTVEFLVGMDGTISFLEVNTRLQVEHPVTEEVAGIDLVREMFRIADGEELGYDDPALRGHSFEFRINGDHPGRGFLPAPGTVTLFDAPTGPGVRLDAGVESGSVIGPAWDSLLAKLIVTGRTRAEALQRAARALDEFTVEGMATAIPFHRTVVRDPAFAPELTGSTDPFTVHTRWIETEFVNEIKPFTTPADTETDEESGRETVVVEVGGKRLEVSLPSSLGMSLARTGLAAGARPKRRAAKKSGPAASGDTLASPMQGTIVKIAVEEGQEVQEGDLIVVLEAMKMEQPLNAHRSGTIKGLTAEVGASLTSGAAICEIKD

SEQ ID NO: 10044 - DNA, 1755 bp, Streptomyces venezuelae
  CDS (1)..(1755): transl_table=11
gtgcgcaaggtgctcatcgccaaccgtggcgaaatcgctgtccgtgtggcccgggcgtgccgggacgcgggtatcggcagcgtggccgtgtacgccgagccggaccgggatgctctgcatgtccgggcggctgacgaggcgttcgctctgggcggtgacactccggcgaccagttatctggacatggcgaaggtgttgcaggccgccgcggactcgggtgcggacgcggtccaccccggttacgggttcctttcggagaacgcggagttcgcgcaggcggtcctcgacgcgggtctgacgtggatcggtccgccgccgcaggcgatccgggatctgggtgacaaggtggcggcccgtcacatcgcccagcgtgccggggccccgctggtggccggcacgcccgacccggtctcgggtgcggacgaggtcgtggcgttcgccgaggagcacggtctgccgatcgcgatcaaggcggcgttcggtggcggtggccgtggtctgaaggtggcgcggacgctggaggaggtcccggagctgtacgactccgcggtccgtgaggcggtggcggcgttcgggcggggcgagtgcttcgtggagcggtacctggacaagccgcggcacgtggagacgcagtgcctggccgaccagcacggcaacgtggtcgtcgtctcgacgcgtgactgctcgctgcagcgccgtcaccagaagctggtggaggaggctccggcgccgttcctgtcggaggctcagaacgcggagctgtacgcggcgtcgaaggcgatcctgaaggaggccggttacgtcggtgccggcacggtggagttcctcgtcggcacggacggcacgatctcgttcctcgaggtcaacacccgtctgcaggtggagcacccggtgacggaggaggtcacggggatcgacctggtgcgggagatgttccggatcgcggacggtgaggagctcggctacggcgacccggagatccggggtcactccttcgagttccggatcaacggtgaggacccgggccgtggtttcctcccggcgcccggcaccgtcaccgagttcacgccgccgaccggtccgggtgtccgcctcgacgcgggtgtggagtcgggttccgtgatcggccccgcgtgggactcgctgcttgcgaacgtgatcgtgaccggtgcgagccgtgagcaggcgctgcagcgtgcggcgcgtgccgtggcggagttccgcgtcgagggcatggcgaccgcgatccccttccaccaggcggtggtgaccgacccggacttcaccgcggacccgttccgggtgcacacgcggtggatcgagacggagttcgtcaacgagatcaagccgttcgcgccggcgggggaggcggacgaggacgaggccggccgcgagacgatcgtggtcgaggtcggcggcaagcgtcttgaggtctccctgccgtcctcgctcgggatgacgctggcccggacggtcttgcggcgggtgccgaagccgaagcggcgggcgtcgaagaaggtccgggcttcggccgcctcgggtgacaccctcgcctccccgatgcagggcacgatcgtgaaggtcgcggtcgaggagggccaggaggtcaaggaaggcgatctgatcgtcgtcctggaggccatgaagatggaacagcccctcaacgcccaccgctccggcaccgtgaagggcctgaccgccgaagtcggcgcgtccgtcacctccggcgccaccatctgcgacatcaaggactga

SEQ ID NO: 10045 - protein, 584 aa, Streptomyces venezuelae
MRKVLIANRGEIAVRVARACRDAGIGSVAVYAEPDRDALHVRAADEAFALGGDTPATSYLDMAKVLQAAADSGADAVHPGYGFLSENAEFAQAVLDAGLTWIGPPPQAIRDLGDKVAARHIAQRAGAPLVAGTPDPVSGADEVVAFAEEHGLPIAIKAAFGGGGRGLKVARTLEEVPELYDSAVREAVAAFGRGECFVERYLDKPRHVETQCLADQHGNVVVVSTRDCSLQRRHQKLVEEAPAPFLSEAQNAELYAASKAILKEAGYVGAGTVEFLVGTDGTISFLEVNTRLQVEHPVTEEVTGIDLVREMFRIADGEELGYGDPEIRGHSFEFRINGEDPGRGFLPAPGTVTEFTPPTGPGVRLDAGVESGSVIGPAWDSLLANVIVTGASREQALQRAARAVAEFRVEGMATAIPFHQAVVTDPDFTADPFRVHTRWIETEFVNEIKPFAPAGEADEDEAGRETIVVEVGGKRLEVSLPSSLGMTLARTVLRRVPKPKRRASKKVRASAASGDTLASPMQGTIVKVAVEEGQEVKEGDLIVVLEAMKMEQPLNAHRSGTVKGLTAEVGASVTSGATICDIKD

SEQ ID NO: 10046 - DNA, 1344 bp, Anabaena sp
  CDS (1)..(1344): transl_table=11
atgaagtttgacaaaatattaattgccaatcggggagaaatagcgctgcgcattctccgcgcctgtgaggaaatggggattgcgacgatcgcagttcattcgactgttgaccggaatgctcttcatgtccaacttgctgacgaagcggtttgtattggcgaacctgctagcgctaaaagttatttgaatattcccaatattattgctgcggctttaacgcgcaatgccagtgctattcatcctgggtatggctttttatctgaaaatgccaaatttgcggaaatctgtgctgaccatcacattgcattcattggccccaccccagaagctatccgcctcatgggggacaaatccactgccaaggaaaccatgcaaaaagctggtgtaccgacagtaccgggtagtgaaggtttggtagagacagagcaagaaggattagaactggcgaaagatattggctacccagtgatgatcaaagccacggctggtggtggcggccggggtatgcgactggtgcgatcgccagatgaatttgtcaaactgttcttagccgcccaaggtgaagctggtgcagcctttggtaatgctggcgtttatatagaaaaatttattgaacgtccgcgccacattgaatttcaaattttggctgataattacggcaatgtgattcacttgggtgagagggattgctcaattcagcgtcgtaaccaaaagttactagaagaagcccccagcccagccttggactcagacctaagggaaaaaatgggacaagcggcggtgaaagcggctcagtttatcaattacaccggggcaggtactatcgagtttttgctagatagatccggtcagttttactttatggagatgaacacccggattcaagtagaacatcccgtaactgagatggttactggagtggatttattggttgagcaaatcagaattgcccaaggggaaagacttagactaactcaagaccaagtagttttacgcggtcatgcgatcgaatgtcgcatcaatgccgaagacccagaccacgatttccgcccagcacccggacgcattagcggttatcttccccctggcggccctggcgtgcggattgactcccacgtttacacggattaccaaattccgccctactacgattccttaattggtaaattgatcgtttggggccctgatcgcgctactgctattaaccgcatgaaacgcgccctcagggaatgcgccatcactggattacctacaaccattgggtttcatcaaagaattatggaaaatccccaatttttacaaggtaatgtgtctactagttttgtgcaggagatgaataaatag

SEQ ID NO: 10047 - protein, 447 aa, Anabaena sp
MKFDKILIANRGEIALRILRACEEMGIATIAVHSTVDRNALHVQLADEAVCIGEPASAKSYLNIPNIIAAALTRNASAIHPGYGFLSENAKFAEICADHHIAFIGPTPEAIRLMGDKSTAKETMQKAGVPTVPGSEGLVETEQEGLELAKDIGYPVMIKATAGGGGRGMRLVRSPDEFVKLFLAAQGEAGAAFGNAGVYIEKFIERPRHIEFQILADNYGNVIHLGERDCSIQRRNQKLLEEAPSPALDSDLREKMGQAAVKAAQFINYTGAGTIEFLLDRSGQFYFMEMNTRIQVEHPVTEMVTGVDLLVEQIRIAQGERLRLTQDQVVLRGHAIECRINAEDPDHDFRPAPGRISGYLPPGGPGVRIDSHVYTDYQIPPYYDSLIGKLIVWGPDRATAINRMKRALRECAITGLPTTIGFHQRIMENPQFLQGNVSTSFVQEMNK

SEQ ID NO: 10048 - DNA, 1353 bp, Bacillus subtilis
  CDS (1)..(1353): transl_table=11
atgattaaaaagctattgatcgccaacagaggagaaattgctgtcagaatcatcagagcctgcagagagctcggaattgagactgtcgctgtttattcagaagctgataaagatgcccttcatgttcaaatggccgatgaagctttttgtatcggaccgaaagcatcaaaagacagctatttaaacgttacaaatattgtgagtgttgcaaagctgactggcacggacgccattcatccgggatacggatttttagctgaaaatgctgatttcgctgaattatgtgaagaagtgaatgtcacgtttgtcggcccgagccctgacgccatttcaaaaatgggaacaaaagacgttgcgcgggaaacgatgaaacaggccggcgtgccaatcgtaccgggttcacagggaattatagaaaatgtggaagaagcggtttcgcttgctaatgaaattgggtatcctgtaattataaaagccaccgcaggcggaggcggaaaaggaattagggttgcccgcactgaagaggaactgattaatggcattaagattacacagcaggaagcggcaactgcatttcggaatccaggtgtatacatcgaaaaatacatagaagattttcgccacgttgagatccaagtgcttgctgataactacggaaatacgatccatttgggcgaacgcgactgctcgatccaaagacgcctgcaaaagcttttggaagaatcaccatctcctgcccttgattcagaaatcagggagcaaatgggagatgcagcggtaaaggctgccaaagcggttggctatacaggtgctggaacagttgaatttatctatgactacaatgaacagcgctattacttcatggaaatgaacacgagaatccaggtggagcacccagtcacagaaatggtgacgggaactgacctgatcaaggaacaaatcaaagtggcttcaggaatggaactgagcctcaagcaagaagatgttgaatttgaaggctgggccatcgaatgccgaatcaacgcagaaaacccaagcaaaaatttcatgccgtcacctggtgaaattaaaatgtacctgcctcctggcggtcttggtgtccgtgtcgattcagctgcgtaccctggctattccatcccaccgtactatgacagcatgattgcaaaggtaatcacatacggaaaaacgagagatgaagcgattgcccgcatgaagcgcgcattgagcgaattcgtcatcgaaggcattgagacaacaatccctttccatttaaaactgcttgaacacgaaacatttgtgagcggagagtttaataccaaatttttagaaacatatgatgtaatgggctcataa

SEQ ID NO: 10049 - protein, 450 aa, Bacillus subtilis
MIKKLLIANRGEIAVRIIRACRELGIETVAVYSEADKDALHVQMADEAFCIGPKASKDSYLNVTNIVSVAKLTGTDAIHPGYGFLAENADFAELCEEVNVTFVGPSPDAISKMGTKDVARETMKQAGVPIVPGSQGIIENVEEAVSLANEIGYPVIIKATAGGGGKGIRVARTEEELINGIKITQQEAATAFRNPGVYIEKYIEDFRHVEIQVLADNYGNTIHLGERDCSIQRRLQKLLEESPSPALDSEIREQMGDAAVKAAKAVGYTGAGTVEFIYDYNEQRYYFMEMNTRIQVEHPVTEMVTGTDLIKEQIKVASGMELSLKQEDVEFEGWAIECRINAENPSKNFMPSPGEIKMYLPPGGLGVRVDSAAYPGYSIPPYYDSMIAKVITYGKTRDEAIARMKRALSEFVIEGIETTIPFHLKLLEHETFVSGEFNTKFLETYDVMGS

SEQ ID NO: 10050 - DNA, 1347 bp, Haemophilus influenzae
  CDS (1)..(1347): transl_table=11
atgttagaaaaagttgtgattgctaaccgcggtgaaattgcactacgcattttacgtgcttgtaaagaattaggtattaaaactgtggcggttcactccactgctgatcgtgatttaaaacacgttttactcgctgatgaaaccatttgtatcggtccagcaccttccgcaaaaagttatttaaatattccagctatcattgctgccgccgaagtaacaggtgcggatgcaattcatcctggatacggtttcttatctgaaaacgctgactttgctgaacaagttgaacgttcaggtttcactttcatcggcccaacagcagatgttattcgtttaatgggcgataaagtttcagctattaaagcgatgaaaaaagcaggcgtgccttgtgtaccaggttcggatggccctgtaagtaatgatattgctaaaaataaagaaatcgccaaacgtattggttatccaatcatcatcaaagcatcaggcggcggcggtggccgaggaatgcgtgttgttcgtagcgaagacgcattagaagaatctattgcgatgaccaaagcagaagcgaaagccgcattcaacaatgatatggtttatatggaaaaatacttagaaaatccacgtcacgtggaaattcaagtattagcagatacccatggaaatgcggtttatttggctgaacgtgactgctcaatgcagcgtcgtcaccaaaaagttgtggaagaagcaccagctccaggtattacagaagaagttcgccgcgatattggctctcgctgtgcaaatgcttgtgtagaaatcggctatcgcggagcgggaacctttgaattcttatatgaaaatggcgaattctactttattgaaatgaatacccgtatccaagtagaacacccagtaacagaaatgattacaggtgtagatttagtgaaagagcaattgcgtattgcagcaggcttgccaatttcctttaaacaagaggacattaaagttaaaggccatgcaatggaatgccgtattaacgcagaagatcccaaaacattcttaccgtctccgggcaaagtaaatcacttacattcgcctggcggtttgggcgttcgttgggattctcatgtttatggtggctatactgtgcctccacattacgactccatgatcgcaaaacttatcacttacggcgatacacgtgaagtggcaatccgtcgtatgcaaaatgccttatctgaaacaattattgatggtatcaaaaccaatatcccacttcatgaattaattcttgaagatgaaaatttccaaaaaggcggaacaaacatccattatttggagaaaaaattaggtatgaatgaataa

SEQ ID NO: 10051 - protein, 448 aa, Haemophilus influenzae
MLEKVVIANRGEIALRILRACKELGIKTVAVHSTADRDLKHVLLADETICIGPAPSAKSYLNIPAIIAAAEVTGADAIHPGYGFLSENADFAEQVERSGFTFIGPTADVIRLMGDKVSAIKAMKKAGVPCVPGSDGPVSNDIAKNKEIAKRIGYPIIIKASGGGGGRGMRVVRSEDALEESIAMTKAEAKAAFNNDMVYMEKYLENPRHVEIQVLADTHGNAVYLAERDCSMQRRHQKVVEEAPAPGITEEVRRDIGSRCANACVEIGYRGAGTFEFLYENGEFYFIEMNTRIQVEHPVTEMITGVDLVKEQLRIAAGLPISFKQEDIKVKGHAMECRINAEDPKTFLPSPGKVNHLHSPGGLGVRWDSHVYGGYTVPPHYDSMIAKLITYGDTREVAIRRMQNALSETIIDGIKTNIPLHELILEDENFQKGGTNIHYLEKKLGMNE

SEQ ID NO: 10052 - DNA, 1350 bp, Pseudomonas aeruginosa
  CDS (1)..(1350): transl_table=11
atgttggaaaaagtgctgatcgccaaccgcggcgaaatcgccttgcgcatccttcgcgcatgcaaggagctggggatcaagacggtggcggtacactccaccgccgaccgcgagttgatgcacctgtcgctcgccgacgaatcggtgtgcatcggtccggccccggccacccagtcgtacctgcagatcccggcgatcatcgccgcggccgaggtcaccggcgccaccgcgatccaccccggctacggcttcctcgccgagaacgccgacttcgccgagcagatcgaacgctccggcttcaccttcgtcggcccgaccgccgaggtgatccgcctgatgggcgacaaggtctcggccaaggacgccatgaagcgcgccggcgtccccaccgtgccgggctccgacggcccgctgccggaagatgaagaaaccgccctggcgatcgcccgcgaggtcggctacccggtgatcatcaaggccgccggcggcggcggcgggcgcggcatgcgtgtggtctacgacgaatccgagctgatcaagtcggccaagctgacccgcaccgaggccggcgcggcgttcggcaacccgatggtctacctggagaagttcctgaccaacccgcgccacgtggaagtccaggtgctttccgacggccagggcaacgccatccacctcggcgaccgcgactgctccctgcagcgccgccaccagaaggtgatcgaagaggcgccggcccccggcatcgacgagaaggctcgccaggaagtcttcgcccgctgcgtccaggcctgcatcgagatcggctaccgcggcgccggcaccttcgagttcctctacgagaacggccgcttctacttcatcgagatgaacactcgcgtgcaggtggagcacccggtatctgagatggtcaccggtgtcgacatcgtcaaggagatgctgcgcatcgcctccggcgagaagctctcgatccgccaggaggacgtggtcatccgcggccatgcgctggagtgccggatcaacgccgaagacccgaagaccttcatgcccagcccgggcaaggtcaagcacttccacgcccccggcggcaacggcgtgcgcgtcgactcgcacctctacagcggctacagcgtgccgccgaactacgactcgctggtcggcaaggtcatcacctacggtgccgaccgcgacgaggcgctggcgcggatgcgcaatgccctggacgagttgatcgtcgacggtatcaagaccaataccgaactgcacaaggacctggtgcgcgacgccgccttctgcaagggcggggtgaacatccattacctggagaagaaactgggtatggacaagcactga

SEQ ID NO: 10053 - protein, 449 aa, Pseudomonas aeruginosa
MLEKVLIANRGEIALRILRACKELGIKTVAVHSTADRELMHLSLADESVCIGPAPATQSYLQIPAIIAAAEVTGATAIHPGYGFLAENADFAEQIERSGFTFVGPTAEVIRLMGDKVSAKDAMKRAGVPTVPGSDGPLPEDEETALAIAREVGYPVIIKAAGGGGGRGMRVVYDESELIKSAKLTRTEAGAAFGNPMVYLEKFLTNPRHVEVQVLSDGQGNAIHLGDRDCSLQRRHQKVIEEAPAPGIDEKARQEVFARCVQACIEIGYRGAGTFEFLYENGRFYFIEMNTRVQVEHPVSEMVTGVDIVKEMLRIASGEKLSIRQEDVVIRGHALECRINAEDPKTFMPSPGKVKHFHAPGGNGVRVDSHLYSGYSVPPNYDSLVGKVITYGADRDEALARMRNALDELIVDGIKTNTELHKDLVRDAAFCKGGVNIHYLEKKLGMDKH

SEQ ID NO: 10054 - DNA, 6702 bp, Saccharomyces cerevisiae
  CDS (1)..(6702)
atgagcgaagaaagcttattcgagtcttctccacagaagatggagtacgaaattacaaactactcagaaagacatacagaacttccaggtcatttcattggcctcaatacagtagataaactagaggagtccccgttaagggactttgttaagagtcacggtggtcacacggtcatatccaagatcctgatagcaaataatggtattgccgccgtgaaagaaattagatccgtcagaaaatgggcatacgagacgttcggcgatgacagaaccgtccaattcgtcgccatggccaccccagaagatctggaggccaacgcagaatatatccgtatggccgatcaatacattgaagtgccaggtggtactaataataacaactacgctaacgtagacttgatcgtagacatcgccgaaagagcagacgtagacgccgtatgggctggctggggtcacgcctccgagaatccactattgcctgaaaaattgtcccagtctaagaggaaagtcatctttattgggcctccaggtaacgccatgaggtctttaggtgataaaatctcctctaccattgtcgctcaaagtgctaaagtcccatgtattccatggtctggtaccggtgttgacaccgttcacgtggacgagaaaaccggtctggtctctgtcgacgatgacatctatcaaaagggttgttgtacctctcctgaagatggtttacaaaaggccaagcgtattggttttcctgtcatgattaaggcatccgaaggtggtggtggtaaaggtatcagacaagttgaacgtgaagaagatttcatcgctttataccaccaggcagccaacgaaattccaggctcccccattttcatcatgaagttggccggtagagcgcgtcacttggaagttcaactgctagcagatcagtacggtacaaatatttccttgttcggtagagactgttccgttcagagacgtcatcaaaaaattatcgaagaagcaccagttacaattgccaaggctgaaacatttcacgagatggaaaaggctgccgtcagactggggaaactagtcggttatgtctctgccggtaccgtggagtatctatattctcatgatgatggaaaattctactttttagaattgaacccaagattacaagtcgagcatccaacaacggaaatggtctccggtgttaacttacctgcagctcaattacaaatcgctatgggtatccctatgcatagaataagtgacattagaactttatatggtatgaatcctcattctgcctcagaaatcgatttcgaattcaaaactcaagatgccaccaagaaacaaagaagacctattccaaagggtcattgtaccgcttgtcgtatcacatcagaagatccaaacgatggattcaagccatcgggtggtactttgcatgaactaaacttccgttcttcctctaatgtttggggttacttctccgtgggtaacaatggtaatattcactccttttcggactctcagttcggccatatttttgcttttggtgaaaatagacaagcttccaggaaacacatggttgttgccctgaaggaattgtccattaggggtgatttcagaactactgtggaatacttgatcaaacttttggaaactgaagatttcgaggataacactattaccaccggttggttggacgatttgattactcataaaatgaccgctgaaaagcctgatccaactcttgccgtcatttgcggtgccgctacaaaggctttcttagcatctgaagaagcccgccacaagtatatcgaatccttacaaaagggacaagttctatctaaagacctactgcaaactatgttccctgtagattttatccatgagggtaaaagatacaagttcaccgtagctaaatccggtaatgaccgttacacattatttatcaatggttctaaatgtgatatcatactgcgtcaactatctgatggtggtcttttgattgccataggcggtaaatcgcataccatctattggaaagaagaagttgctgctacaagattatccgttgactctatgactactttgttggaagttgaaaacgatccaacccagttgcgtactccatcccctggtaaattggttaaattcttggtggaaaatggtgaacacattatcaagggccaaccatatgcagaaattgaagttatgaaaatgcaaatgcctttggtttctcaagaaaatggtatcgtccagttattaaagcaacctggttctaccattgttgcaggtgatatcatggctattatgactcttgacgatccatccaaggtcaagcacgctctaccatttgaaggtatgctgccagattttggttctccagttatcgaaggaaccaaacctgcctataaattcaagtcattagtgtctactttggaaaacattttgaagggttatgacaaccaagttattatgaacgcttccttgcaacaattgatagaggttttgagaaatccaaaactgccttactcagaatggaaactacacatctctgctttacattcaagattgcctgctaagctagatgaacaaatggaagagttagttgcacgttctttgagacgtggtgctgttttcccagctagacaattaagtaaattgattgatatggccgtgaagaatcctgaatacaaccccgacaaattgctgggcgccgtcgtggaaccattggcggatattgctcataagtactctaacgggttagaagcccatgaacattctatatttgtccatttcttggaagaatattacgaagttgaaaagttattcaatggtccaaatgttcgtgaggaaaatatcattctgaaattgcgtgatgaaaaccctaaagatctagataaagttgcgctaactgttttgtctcattcgaaagtttcagcgaagaataacctgatcctagctatcttgaaacattatcaaccattgtgcaagttatcttctaaagtttctgccattttctctactcctctacaacatattgttgaactagaatctaaggctaccgctaaggtcgctctacaagcaagagaaattttgattcaaggcgctttaccttcggtcaaggaaagaactgaacaaattgaacatatcttaaaatcctctgttgtgaaggttgcctatggctcatccaatccaaagcgctctgaaccagatttgaatatcttgaaggacttgatcgattctaattacgttgtgttcgatgttttacttcaattcctaacccatcaagacccagttgtgactgctgcagctgctcaagtctatattcgtcgtgcttatcgtgcttacaccataggagatattagagttcacgaaggtgtcacagttccaattgttgaatggaaattccaactaccttcagctgcgttctccacctttccaactgttaaatctaaaatgggtatgaacagggctgtttctgtttcagatttgtcatatgttgcaaacagtcagtcatctccgttaagagaaggtattttgatggctgtggatcatttagatgatgttgatgaaattttgtcacaaagtttggaagttattcctcgtcaccaatcttcttctaacggacctgctcctgatcgttctggtagctccgcatcgttgagtaatgttgctaatgtttgtgttgcttctacagaaggtttcgaatctgaagaggaaattttggtaaggttgagagaaattttggatttgaataagcaggaattaatcaatgcttctatccgtcgtatcacatttatgttcggttttaaagatgggtcttatccaaagtattatacttttaacggtccaaattataacgaaaatgaaacaattcgtcacattgagccggctttggccttccaactggaattaggaagattgtccaacttcaacattaaaccaattttcactgataatagaaacatccatgtctacgaagctgttagtaagacttctccattggataagagattctttacaagaggtattattagaacgggtcatatccgtgatgacatttctattcaagaatatctgacttctgaagctaacagattgatgagtgatatattggataatttagaagtcaccgacacttcaaattctgatttgaatcatatcttcatcaacttcattgcggtgtttgatatctctccagaagatgtcgaagccgccttcggtggtttcttagaaagatttggtaagagattgttgagattgcgtgtttcttctgccgaaattagaatcatcatcaaagatcctcaaacaggtgccccagtaccattgcgtgccttgatcaataacgtttctggttatgttatcaaaacagaaatgtacaccgaagtcaagaacgcaaaaggtgaatgggtatttaagtctttgggtaaacctggatccatgcatttaagacctattgctactccttaccctgttaaggaatggttgcaaccaaaacgttataaggcacacttgatgggtaccacatatgtctatgacttcccagaattattccgccaagcatcgtcatcccaatggaaaaatttctctgcagatgttaagttaacagatgatttctttatttccaacgagttgattgaagatgaaaacggcgaattaactgaggtggaaagagaacctggtgccaacgctattggtatggttgcctttaagattactgtaaagactcctgaatatccaagaggccgtcaatttgttgttgttgctaacgatatcacattcaagatcggttcctttggtccacaagaagacgaattcttcaataaggttactgaatatgctagaaagcgtggtatcccaagaatttacttggctgcaaactcaggtgccagaattggtatggctgaagagattgttccactatttcaagttgcatggaatgatgctgccaatccggacaagggcttccaatacttatacttaacaagtgaaggtatggaaactttaaagaaatttgacaaagaaaattctgttctcactgaacgtactgttataaacggtgaagaaagatttgtcatcaagacaattattggttctgaagatgggttaggtgtcgaatgtctacgtggatctggtttaattgctggtgcaacgtcaagggcttaccacgatatcttcactatcaccttagtcacttgtagatccgtcggtatcggtgcttatttggttcgtttgggtcaaagagctattcaggtcgaaggccagccaattattttaactggtgctcctgcaatcaacaaaatgctgggtagagaagtttatacttctaacttacaattgggtggtactcaaatcatgtataacaacggtgtttcacatttgactgctgttgacgatttagctggtgtagagaagattgttgaatggatgtcttatgttccagccaagcgtaatatgccagttcctatcttggaaactaaagacacatgggatagaccagttgatttcactccaactaatgatgaaacttacgatgtaagatggatgattgaaggtcgtgagactgaaagtggatttgaatatggtttgtttgataaagggtctttctttgaaactttgtcaggatgggccaaaggtgttgtcgttggtagagcccgtcttggtggtattccactgggtgttattggtgttgaaacaagaactgtcgagaacttgattcctgctgatccagctaatccaaatagtgctgaaacattaattcaagaacctggtcaagtttggcatccaaactccgccttcaagactgctcaagctatcaatgactttaacaacggtgaacaattgccaatgatgattttggccaactggagaggtttctctggtggtcaacgtgatatgttcaacgaagtcttgaagtatggttcgtttattgttgacgcattggtggattacaaacaaccaattattatctatatcccacctaccggtgaactaagaggtggttcatgggttgttgtcgatccaactatcaacgctgaccaaatggaaatgtatgccgacgtcaacgctagagctggtgttttggaaccacaaggtatggttggtatcaagttccgtagagaaaaattgctggacaccatgaacagattggatgacaagtacagagaattgagatctcaattatccaacaagagtttggctccagaagtacatcagcaaatatccaagcaattagctgatcgtgagagagaactattgccaatttacggacaaatcagtcttcaatttgctgatttgcacgataggtcttcacgtatggtggccaagggtgttatttctaaggaactggaatggaccgaggcacgtcgtttcttcttctggagattgagaagaagattgaacgaagaatatttgattaaaaggttgagccatcaggtaggcgaagcatcaagattagaaaagatcgcaagaattagatcgtggtaccctgcttcagtggaccatgaagatgataggcaagtcgcaacatggattgaagaaaactacaaaactttggacgataaactaaagggtttgaaattagagtcattcgctcaagacttagctaaaaagatcagaagcgaccatgacaatgctattgatggattatctgaagttatcaagatgttatctaccgatgataaagaaaaattgttgaagactttgaaataa

SEQ ID NO: 10055 - protein, 2233 aa, Saccharomyces cerevisiae
MSEESLFESSPQKMEYEITNYSERHTELPGHFIGLNTVDKLEESPLRDFVKSHGGHTVISKILIANNGIAAVKEIRSVRKWAYETFGDDRTVQFVAMATPEDLEANAEYIRMADQYIEVPGGTNNNNYANVDLIVDIAERADVDAVWAGWGHASENPLLPEKLSQSKRKVIFIGPPGNAMRSLGDKISSTIVAQSAKVPCIPWSGTGVDTVHVDEKTGLVSVDDDIYQKGCCTSPEDGLQKAKRIGFPVMIKASEGGGGKGIRQVEREEDFIALYHQAANEIPGSPIFIMKLAGRARHLEVQLLADQYGTNISLFGRDCSVQRRHQKIIEEAPVTIAKAETFHEMEKAAVRLGKLVGYVSAGTVEYLYSHDDGKFYFLELNPRLQVEHPTTEMVSGVNLPAAQLQIAMGIPMHRISDIRTLYGMNPHSASEIDFEFKTQDATKKQRRPIPKGHCTACRITSEDPNDGFKPSGGTLHELNFRSSSNVWGYFSVGNNGNIHSFSDSQFGHIFAFGENRQASRKHMVVALKELSIRGDFRTTVEYLIKLLETEDFEDNTITTGWLDDLITHKMTAEKPDPTLAVICGAATKAFLASEEARHKYIESLQKGQVLSKDLLQTMFPVDFIHEGKRYKFTVAKSGNDRYTLFINGSKCDIILRQLSDGGLLIAIGGKSHTIYWKEEVAATRLSVDSMTTLLEVENDPTQLRTPSPGKLVKFLVENGEHIIKGQPYAEIEVMKMQMPLVSQENGIVQLLKQPGSTIVAGDIMAIMTLDDPSKVKHALPFEGMLPDFGSPVIEGTKPAYKFKSLVSTLENILKGYDNQVIMNASLQQLIEVLRNPKLPYSEWKLHISALHSRLPAKLDEQMEELVARSLRRGAVFPARQLSKLIDMAVKNPEYNPDKLLGAVVEPLADIAHKYSNGLEAHEHSIFVHFLEEYYEVEKLFNGPNVREENIILKLRDENPKDLDKVALTVLSHSKVSAKNNLILAILKHYQPLCKLSSKVSAIFSTPLQHIVELESKATAKVALQAREILIQGALPSVKERTEQIEHILKSSVVKVAYGSSNPKRSEPDLNILKDLIDSNYVVFDVLLQFLTHQDPVVTAAAAQVYIRRAYRAYTIGDIRVHEGVTVPIVEWKFQLPSAAFSTFPTVKSKMGMNRAVSVSDLSYVANSQSSPLREGILMAVDHLDDVDEILSQSLEVIPRHQSSSNGPAPDRSGSSASLSNVANVCVASTEGFESEEEILVRLREILDLNKQELINASIRRITFMFGFKDGSYPKYYTFNGPNYNENETIRHIEPALAFQLELGRLSNFNIKPIFTDNRNIHVYEAVSKTSPLDKRFFTRGIIRTGHIRDDISIQEYLTSEANRLMSDILDNLEVTDTSNSDLNHIFINFIAVFDISPEDVEAAFGGFLERFGKRLLRLRVSSAEIRIIIKDPQTGAPVPLRALINNVSGYVIKTEMYTEVKNAKGEWVFKSLGKPGSMHLRPIATPYPVKEWLQPKRYKAHLMGTTYVYDFPELFRQASSSQWKNFSADVKLTDDFFISNELIEDENGELTEVEREPGANAIGMVAFKITVKTPEYPRGRQFVVVANDITFKIGSFGPQEDEFFNKVTEYARKRGIPRIYLAANSGARIGMAEEIVPLFQVAWNDAANPDKGFQYLYLTSEGMETLKKFDKENSVLTERTVINGEERFVIKTIIGSEDGLGVECLRGSGLIAGATSRAYHDIFTITLVTCRSVGIGAYLVRLGQRAIQVEGQPIILTGAPAINKMLGREVYTSNLQLGGTQIMYNNGVSHLTAVDDLAGVEKIVEWMSYVPAKRNMPVPILETKDTWDRPVDFTPTNDETYDVRWMIEGRETESGFEYGLFDKGSFFETLSGWAKGVVVGRARLGGIPLGVIGVETRTVENLIPADPANPNSAETLIQEPGQVWHPNSAFKTAQAINDFNNGEQLPMMILANWRGFSGGQRDMFNEVLKYGSFIVDALVDYKQPIIIYIPPTGELRGGSWVVVDPTINADQMEMYADVNARAGVLEPQGMVGIKFRREKLLDTMNRLDDKYRELRSQLSNKSLAPEVHQQISKQLADRERELLPIYGQISLQFADLHDRSSRMVAKGVISKELEWTEARRFFFWRLRRRLNEEYLIKRLSHQVGEASRLEKIARIRSWYPASVDHEDDRQVATWIEENYKTLDDKLKGLKLESFAQDLAKKIRSDHDNAIDGLSEVIKMLSTDDKEKLLKTLK

SEQ ID NO: 10056 - DNA, 5508 bp, Saccharomyces cerevisiae
  CDS (1)..(5508)
atgacagttagttccgatacaactgctgaaatatcgttaggttggtcaatccaagactggattgatttccacaagtcatcaagctcccaggcttcactaaggcttcttgaatcactactagactctcaaaatgttgcgccagtcgataatgcgtggatatcgctaatttcaaaggaaaatttactgcaccaattccaaattttaaagagcagagaaaataaagaaactctacctctctacggtgtccctattgctgttaaggacaacatcgacgttagaggtctacccaccaccgctgcatgtccatcctttgcatatgagccttccaaagactctaaagtagtagaactactaagaaatgcaggtgcgataatcgtgggtaagacaaacttggaccaatttgccacaggattagtcggcacacggtctccatatgggaaaacaccttgcgcttttagcaaagagcatgtatctggtggttcctccgctgggtcagcatcggtggtcgccagaggtatcgtaccaattgcattgggtactgatacagcaggttctggtagagtcccagccgccttgaacaacctgattggcctaaagccaacaaagggcgtcttttcctgtcaaggtgtagttcccgcttgtaaatctttagactgcgtctccatctttgcattaaacctaagtgatgctgaacgctgcttccgcatcatgtgccagccagatcctgataatgatgaatattctagaccctatgtttccaaccctttgaaaaaattttcaagcaatgtaacgattgctattcctaaaaatatcccatggtatggtgaaaccaagaatcctgtactgttttccaatgctgtcgaaaatctatcaagaacgggcgctaacgtcatagaaattgattttgagcctcttttagagttagctcgctgtttatacgaaggtacttgggtggccgagcgttatcaagctattcaatcgtttttggacagtaaaccaccaaaggaatctttggaccctactgttatttcaattatagaaggggccaagaaatacagtgcagtagactgcttcagttttgaatacaaaagacaaggcatcttgcaaaaagtgagacgacttctcgaatcagtcgatgtattgtgtgtgcccacatgtcctttaaatcctactatgcaacaagttgcggatgaaccagtcctagtcaattcaagacaaggcacatggactaattttgtcaacttggcagatttggcagcccttgctgttcccgcagggttccgagacgatggtttgccaaatggtattactttaatcggtaaaaaattcacagattacgcactattagagttggctaaccgctatttccaaaatatattccccaacggttccagaacatacggtacttttacctcttcttcagtaaagccagcaaacgatcaattagtgggaccagactatgacccatctacgtccataaaattggctgttgtcggtgcacatcttaagggtctgcctctacattggcaattggaaaaggtcaatgcaacatatttatgtacaacaaaaacatcaaaagcttaccagctttttgctttgcccaaaaatggaccagttttaaaacctggtttgagaagagttcaagatagcaatggctctcaaatcgaattagaagtgtacagtgttccaaaagaactgttcggtgcttttatttccatggttcctgaaccattaggaataggttcagtggagttagaatctggtgaatggatcaaatcctttatttgtgaagaatctggttacaaagccaaaggtacagttgatatcacaaagtatggtggatttagagcatattttgaaatgttgaagaaaaaagagtcccaaaagaagaagttatttgataccgtgttaattgccaatagaggtgaaattgccgttcgtattatcaagacattaaaaaaattgggtattagatcagttgcagtttattccgaccctgataaatattctcaacacgttactgatgcagatgtttctgtaccccttcatggcacaaccgcagcccaaacttatttagacatgaataagatcatagatgccgctaagcaaactaatgcacaggccattattcctggttatggtttcttgtcggaaaatgcggatttttctgatgcgtgcaccagtgctggcattacctttgttggtccttcgggagatattatcagaggtttagggttaaaacattctgctagacagattgcacagaaggctggcgttcctctagtgccaggctctttgcttatcacatcagttgaagaggctaagaaagtcgcagcggaattggaatacccagttatggtgaagtcaactgctggtggcggtggtattggtttgcagaaagtcgattctgaagaggacatcgagcatatttttgagactgtgaaacatcaaggtgaaacatttttcggtgacgctggtgtatttctggaacggtttatcgaaaatgccaggcatgttgaagtccaacttatgggagatggttttggtaaggccattgctttgggcgaacgtgattgttctttacagcgtcgtaaccaaaaagttatcgaagaaactcctgcaccaaatttgccagaaaagacgaggttggcgttaagaaaggcagctgaaagtttgggatctttattgaattacaagtgtgctggtacggttgaatttatttacgatgagaaaaaggacgagttttactttttagaagttaatacaagattacaagttgaacatccaataacagaaatggttacagggttagacttggtcgagtggatgatcaggattgccgctaatgatgcacctgattttgattctacaaaggtagaagtcaatggggtttcaatggaggcacgtttatatgctgaaaatccattgaaaaatttcagaccttctccaggtttacttgtcgatgtgaaatttcctgattgggcaagagtggatacttgggttaagaaaggtactaatatttctcccgaatatgatccaacattggccaaaattatcgttcatgggaaagaccgtgatgatgcaatttccaagttaaatcaagcgttagaagaaacaaaagtttacggatgtattactaacattgactacctgaagtctatcattaccagtgatttctttgctaaagcaaaagtttctacaaacattttgaactcttatcaatatgagcctaccgccatcgaaattactttgcccggtgcacacactagtattcaggattaccccggtagagttgggtactggagaattggtgttccgccctctggtccaatggacgcatattcgtttagattggcgaacagaattgttggtaatgactacaggactcctgccattgaagtaacgttgactggtccatccatcgttttccattgtgaaactgtcattgccattactggtggtaccgctctatgtacattagacggccaagaaattccccaacacaaaccggtcgaagttaagaggggatctactttatccattggcaagttgacaagcggctgtagagcatacttaggtatcaggggtggcattgatgtgcctaaatacttgggctcttattctactttcactctaggaaatgtcggtggatacaatggaagggtgctaaaacttggagacgtactattcttaccaagcaatgaagaaaataaatcagttgagtgccttccacagaatattcctcaatcattaattcctcaaatttccgaaactaaggaatggagaattggtgtaacatgtggtccccatgggtctccagatttttttaaacctgagtccatcgaagaatttttcagtgagaagtggaaggttcattacaactccaatagatttggtgtccgtttgattggacctaaacctaagtgggcaagaagtaatggtggtgaaggtggtatgcatccttcaaacactcacgattacgtttattctctgggtgcaattaatttcacgggtgatgagccagttattattacttgcgatggtccttccttaggtggttttgtgtgtcaagctgttgtcccagaagcagaactgtggaaggttggacaggttaaacccggtgattccattcagtttgtgccactttcttacgaaagctcgagatccttaaaggaatctcaggatgttgcaattaaatcattggatggtactaagttaaggcgcttagactctgtttcaattttaccatcattcgaaacgcctattcttgcacaaatggaaaaagtgaatgagctttcaccaaaggttgtatacagacaagcaggtgatcgttatgttttggtggaatacggtgataatgaaatgaattttaatatttcctatagaattgaatgcctgatctcccttgtgaaaaagaataagactattggtattgttgaaatgtcccaaggtgttagatctgtattgatagaatttgatggttacaaagtcactcaaaaagaattgcttaaagtattggtggcatatgaaacagaaatccagtttgatgaaaattggaagataacttctaatataataagattaccgatggctttcgaagactcgaagactttggcatgtgttcaaaggtatcaagaaacaattcgttcgtctgctccatggttgccaaataacgttgatttcattgccaatgtaaatggaatttcaaggaatgaagtttatgatatgttgtattctgccagatttatggttttaggtttaggtgatgtcttcctagggtcgccttgtgctgttccattagatcctcgtcacagatttttgggaagcaagtacaacccaagtagaacatatacagaaagaggtgcagtcggtattggcggtatgtatatgtgcatatatgctgctaacagtcctggtgggtaccaattagtgggtagaacaataccaatttgggacaaactatgtctggccgcatcttctgaggttccgtggttgatgaacccatttgaccaagtcgaattttacccagtttctgaagaagatttggataaaatgactgaagattgtgataatggtgtttataaagtcaatatcgaaaagagtgtttttgatcatcaagaatacttgagatggatcaacgcaaacaaagattccatcacagcattccaggagggccagcttggtgaaagagcagaggaatttgccaaattgattcaaaatgcaaactctgaactaaaagaaagtgtcacagtcaaacctgacgaggaagaagacttcccagaaggtgcagaaattgtatattctgagtattctgggcgtttttggaaatccatagcatctgttggagatgttattgaagcaggtcaagggctactaattattgaagccatgaaagcggaaatgattatatccgctcctaaatcgggtaagattatcaagatttgccatggcaatggtgatatggttgattctggtgacatagtggccgtcatagagacattggcatga

SEQ ID NO: 10057 - protein, 1835 aa, Saccharomyces cerevisiae
MTVSSDTTAEISLGWSIQDWIDFHKSSSSQASLRLLESLLDSQNVAPVDNAWISLISKENLLHQFQILKSRENKETLPLYGVPIAVKDNIDVRGLPTTAACPSFAYEPSKDSKVVELLRNAGAIIVGKTNLDQFATGLVGTRSPYGKTPCAFSKEHVSGGSSAGSASVVARGIVPIALGTDTAGSGRVPAALNNLIGLKPTKGVFSCQGVVPACKSLDCVSIFALNLSDAERCFRIMCQPDPDNDEYSRPYVSNPLKKFSSNVTIAIPKNIPWYGETKNPVLFSNAVENLSRTGANVIEIDFEPLLELARCLYEGTWVAERYQAIQSFLDSKPPKESLDPTVISIIEGAKKYSAVDCFSFEYKRQGILQKVRRLLESVDVLCVPTCPLNPTMQQVADEPVLVNSRQGTWTNFVNLADLAALAVPAGFRDDGLPNGITLIGKKFTDYALLELANRYFQNIFPNGSRTYGTFTSSSVKPANDQLVGPDYDPSTSIKLAVVGAHLKGLPLHWQLEKVNATYLCTTKTSKAYQLFALPKNGPVLKPGLRRVQDSNGSQIELEVYSVPKELFGAFISMVPEPLGIGSVELESGEWIKSFICEESGYKAKGTVDITKYGGFRAYFEMLKKKESQKKKLFDTVLIANRGEIAVRIIKTLKKLGIRSVAVYSDPDKYSQHVTDADVSVPLHGTTAAQTYLDMNKIIDAAKQTNAQAIIPGYGFLSENADFSDACTSAGITFVGPSGDIIRGLGLKHSARQIAQKAGVPLVPGSLLITSVEEAKKVAAELEYPVMVKSTAGGGGIGLQKVDSEEDIEHIFETVKHQGETFFGDAGVFLERFIENARHVEVQLMGDGFGKAIALGERDCSLQRRNQKVIEETPAPNLPEKTRLALRKAAESLGSLLNYKCAGTVEFIYDEKKDEFYFLEVNTRLQVEHPITEMVTGLDLVEWMIRIAANDAPDFDSTKVEVNGVSMEARLYAENPLKNFRPSPGLLVDVKFPDWARVDTWVKKGTNISPEYDPTLAKIIVHGKDRDDAISKLNQALEETKVYGCITNIDYLKSIITSDFFAKAKVSTNILNSYQYEPTAIEITLPGAHTSIQDYPGRVGYWRIGVPPSGPMDAYSFRLANRIVGNDYRTPAIEVTLTGPSIVFHCETVIAITGGTALCTLDGQEIPQHKPVEVKRGSTLSIGKLTSGCRAYLGIRGGIDVPKYLGSYSTFTLGNVGGYNGRVLKLGDVLFLPSNEENKSVECLPQNIPQSLIPQISETKEWRIGVTCGPHGSPDFFKPESIEEFFSEKWKVHYNSNRFGVRLIGPKPKWARSNGGEGGMHPSNTHDYVYSLGAINFTGDEPVIITCDGPSLGGFVCQAVVPEAELWKVGQVKPGDSIQFVPLSYESSRSLKESQDVAIKSLDGTKLRRLDSVSILPSFETPILAQMEKVNELSPKVVYRQAGDRYVLVEYGDNEMNFNISYRIECLISLVKKNKTIGIVEMSQGVRSVLIEFDGYKVTQKELLKVLVAYETEIQFDENWKITSNIIRLPMAFEDSKTLACVQRYQETIRSSAPWLPNNVDFIANVNGISRNEVYDMLYSARFMVLGLGDVFLGSPCAVPLDPRHRFLGSKYNPSRTYTERGAVGIGGMYMCIYAANSPGGYQLVGRTIPIWDKLCLAASSEVPWLMNPFDQVEFYPVSEEDLDKMTEDCDNGVYKVNIEKSVFDHQEYLRWINANKDSITAFQEGQLGERAEEFAKLIQNANSELKESVTVKPDEEEDFPEGAEIVYSEYSGRFWKSIASVGDVIEAGQGLLIIEAMKAEMIISAPKSGKIIKICHGNGDMVDSGDIVAVIETLA

SEQ ID NO: 10058 - DNA, 2205 bp, Arabidopsis thaliana
  CDS (1)..(2205)
atgtcgatgatgacggtgtgggcacttcgacggaatgttcgtcggaaaaatcactcgatgctcgtgagatatatttccggctccgcatcgatgaagcctaaggagcaatgtattgagaagattttggtggcgaacagaggcgagattgcttgccggatcatgagaacggcgaagcgtttagggattcagaccgttgcggtttacagtgacgctgatagagattcgctccatgtgaaatctgcagacgaagcggtacggattggcccgccctcggctagacttagttacctcagcggtgtgactatcatggaggcagcggctcggactggtgcacaggcaatacaccctggctatgggttcttgtcagaaagttctgactttgcccaactctgtgaggattcgggtctaacattcattggacctccagcatctgctattagagacatgggtgataaaagtgcatccaagagaattatgggagctgctggagttcctctcgtgcctggatatcatggccatgagcaagatattgatcatatgaagtcagaagctgaaaagattggataccctataataatcaagccaacacatggaggtggggggaagggaatgaggatagtgcaaagtgggaaggattttgctgactcgtttttgggtgcccaacgtgaagctgctgcttcttttggcgttaacactattcttctcgagaaatacattactcgaccgaggcatatagaagtccagatatttggtgacaaacatggaaatgttcttcatctatacgaaagggattgcagtgtgcaaagaagacaccaaaagattattgaagaagctcctgcgcctaatatatctgaaaagttccgcgcaaacttaggccaagctgctgtctctgcggcacgggcagttggatattataatgctgggacggtggaatttatagttgacaccgagtctgatcaattttattttatggaaatgaacacccgtctacaggtcgaacatcctgtaactgagatgattgttggtcaagatcttgtggaatggcaaattcgggttgccaatggggaacctctccccttaagccaatccgaggtgccaatgtcaggtcatgcctttgaggccaggatatatgctgaaaacgttccaaaaggatttcttcctgcaactggggtcctcaatcattatcgccctgttgcagtctcaccatcagttcgggttgaaactggagttgagcaaggagacactgttagcatgcactatgatcctatgattgcaaagcttgttgtctggggaggtaatcgtggcgaagctttagtgaaactgaaggattgcttgtctaactttcaggtagcaggtgtacctacgaacataaatttccttcaaaaacttgctagtcataaggagtttgcagtgggcaatgtagaaactcattttattgagcaccataaaagtgatctatttgctgacgaaagcaatccagctgcaacagaagtggcatacaaggcagtcaagcatagtgcagcattggtggctgcttgtatctccacaatcgagcattctacttggaatgaaagtaatcatgggaaagttccatcgatatggtattcgaatcctccttttagggtccatcatgaagccaaacaaaccattgagctagaatggaataatgaatgcgagggaactggctctaacctcatatcactcggtgtaagatatcaaccagatggaagctatctcattgaggaaggcaatgattctccaagtttagaactcagagtaacacgagcaggaaagtgcgattttagagttgaagcggccggattgagcatgaatgttagtctagctgcgtacttgaaggatggttataagcatatccatatatggcatggttcagaacaccatcagttcaagcagaaggtaggaatcgaattctctgaagatgaagaaggtgtccaacacagaaccagctccgaaacatcatcacaccctccaggaaccattgtggcccccatggctggtttggtagtcaaggtccttgtcgaaaacgaagccaaagtagatcaaggtcaacctatattagtcctagaggcaatgaagatggagcacgttgtgaaagcaccatcctctggaagcatacaggacctcaaagttaaagcaggccaacaggtttcagatggcagtgctctattcaggatcaaagggtaa

SEQ ID NO: 10059 - protein, 734 aa, Arabidopsis thaliana
MSMMTVWALRRNVRRKNHSMLVRYISGSASMKPKEQCIEKILVANRGEIACRIMRTAKRLGIQTVAVYSDADRDSLHVKSADEAVRIGPPSARLSYLSGVTIMEAAARTGAQAIHPGYGFLSESSDFAQLCEDSGLTFIGPPASAIRDMGDKSASKRIMGAAGVPLVPGYHGHEQDIDHMKSEAEKIGYPIIIKPTHGGGGKGMRIVQSGKDFADSFLGAQREAAASFGVNTILLEKYITRPRHIEVQIFGDKHGNVLHLYERDCSVQRRHQKIIEEAPAPNISEKFRANLGQAAVSAARAVGYYNAGTVEFIVDTESDQFYFMEMNTRLQVEHPVTEMIVGQDLVEWQIRVANGEPLPLSQSEVPMSGHAFEARIYAENVPKGFLPATGVLNHYRPVAVSPSVRVETGVEQGDTVSMHYDPMIAKLVVWGGNRGEALVKLKDCLSNFQVAGVPTNINFLQKLASHKEFAVGNVETHFIEHHKSDLFADESNPAATEVAYKAVKHSAALVAACISTIEHSTWNESNHGKVPSIWYSNPPFRVHHEAKQTIELEWNNECEGTGSNLISLGVRYQPDGSYLIEEGNDSPSLELRVTRAGKCDFRVEAAGLSMNVSLAAYLKDGYKHIHIWHGSEHHQFKQKVGIEFSEDEEGVQHRTSSETSSHPPGTIVAPMAGLVVKVLVENEAKVDQGQPILVLEAMKMEHVVKAPSSGSIQDLKVKAGQQVSDGSALFRIKG

SEQ ID NO: 10060 - DNA, 4201 bp, Saccharomyces cerevisiae
  CDS (430)..(3966)
ccgcccaatgtcgcgggttgacccgcgacattgggcgggcaatactctcatcttattggctattcaacttagacaacggccagttgcgcgcacaaatttggtcatgaccgctccaccggcatgcgtgtcgtcatcccgcatcattcgggacattttggccttttccgcagtgcgtagttgacgtggggagaaagctagtgggctgtcgcatatggttggttttaggtggcgaaagtttcgccgcgatagcaatcatgtcctcgaccttaatctcaatggaatgggtcatgctcggtaagtgagtctcgctgtatataagtatatatgtaatcgcctagttcgatagatacaaggaggtcttgagtatgtagataaacgaaaagaagataacaaaaggaaaatctcagcctctccccttcctcttagacaatgtcgcaaagaaaattcgccggcttgagagataacttcaatctcttgggtgaaaagaacaaaatattggtggctaatagaggagaaattccaatcagaatttttcgtaccgctcatgaactgtctatgcagacggtagctatatattctcatgaagatcgtctttcaacgcacaaacaaaaggctgacgaagcatacgtcataggtgaagtaggccaatatacccccgtcggcgcttatttggccattgacgaaatcatttccattgcccaaaaacaccaggtagatttcatccatccaggttatgggttcttgtctgaaaattcggaatttgccgacaaagtagtgaaggccggtatcacttggattggccctccagctgaagttattgactccgtgggtgataaggtctcagctagaaacctggcagcaaaagctaatgtgcccaccgttcctggtacaccaggtcctatagaaactgtagaggaagcacttgacttcgtcaatgaatacggctacccggtgatcattaaggccgcctttggtggtggtggtagaggtatgagagtcgttagagaaggtgacgacgtggcagatgcctttcaacgtgctacctccgaagcccgtactgccttcggtaatggtacctgctttgtggaaagattcttggacaagccaaagcatattgaagttcaattgttggccgataaccacggaaacgtggttcatcttttcgaaagagactgttccgtgcagagaagacaccaaaaggttgtcgaagtggccccagcaaagactttaccccgtgaagtccgtgacgccattttgacagatgcagttaaattggccaaagagtgtggctacagaaatgcgggtactgctgaattcttggttgataaccaaaatagacactatttcattgaaattaatccaagaatccaagtggaacataccatcacagaagaaattaccggtatagatattgtggcggctcagatccaaattgcggcaggtgcctctctaccccagctgggcctattccaggacaaaattacgactcgtggctttgccattcagtgccgtattaccacggaagaccctgctaagaacttccaaccagataccggtagaatagaagtgtaccgttctgcaggtggtaatggtgttagactggatggtggtaacgcctatgcaggaacaataatctcacctcattacgactcaatgctggtcaaatgctcatgctccggttccacctacgaaatcgttcgtagaaaaatgattcgtgcattaatcgagttcagaattagaggtgtcaagaccaacattcccttcctattgactcttttgaccaatccagtatttattgagggtacatactggacgacttttattgacgacaccccacaactgttccaaatggtttcatcacaaaacagagcccaaaaacttttacattacctcgccgacgtggcagtcaatggttcatctatcaagggtcaaattggcttgccaaaattaaaatcaaatccaagtgtcccccatttgcacgatgctcagggcaatgtcatcaacgttacaaagtctgcaccaccatccggatggaggcaagtgctactagaaaaggggccagctgaatttgccagacaagttagacagttcaatggtactttattgatggacaccacctggagagacgctcatcaatctctacttgcaacaagagtcagaacccacgatttggctacaatcgctccaacaaccgcacatgcccttgcaggtcgtttcgccttagaatgttggggtggtgccacattcgatgttgcaatgagatttttgcatgaggatccatgggaacgtttgagaaaattaagatctctggtgcctaatattccattccaaatgttattgcgtggtgccaatggtgtggcttattcttcattgcctgacaatgctattgaccatttcgtcaagcaagccaaggataatggtgttgatatatttagagtctttgatgccttaaatgacttggaacaattgaaggtcggtgtagatgctgtgaagaaggcaggtggtgttgtagaagccactgtttgtttctctggggatatgcttcagccaggcaagaaatacaatttggattactacttggaaattgctgaaaaaattgtccaaatgggcactcatatcctgggtatcaaagatatggcaggtaccatgaagccagcagctgccaaactactgattggatctttgagggctaagtaccctgatctcccaatacatgttcacactcacgattctgcaggtactgctgttgcatcaatgactgcgtgtgctctggcgggcgccgatgtcgttgatgttgccatcaactcaatgtctggtttaacttcacaaccatcaatcaatgctctgttggcttcattagaaggtaatattgacactggtattaacgttgagcatgtccgtgaactagatgcatattgggcagagatgagattgttatactcttgtttcgaggctgacttgaagggcccagatccagaagtttatcaacatgaaatcccaggtggtcaattgacaaacttgttgtttcaagcccaacaattgggtcttggagaacaatgggccgaaacaaaaagagcttacagagaagccaattatttattgggtgatattgtcaaagttaccccaacttcgaaggtcgttggtgatctggcacaatttatggtctccaataaattaacttccgatgatgtgagacgcctggctaattctttggatttccctgactctgttatggatttcttcgaaggcttaatcggccaaccatatggtgggttcccagaaccatttagatcagacgttttaaggaacaagagaagaaagttgacttgtcgtccaggcctggaactagagccatttgatctcgaaaaaattagagaagacttgcagaatagatttggtgatgttgatgagtgcgacgttgcttcttataacatgtacccaagagtttatgaagacttccaaaagatgagagaaacgtatggtgatttatctgtattgccaacaagaagctttttgtctccactagagactgacgaagaaattgaagttgtaatcgaacaaggtaaaacgctaattatcaagctacaggctgtgggtgatttgaacaaaaagaccggtgaaagagaagtttactttgatttgaatggtgaaatgagaaaaattcgtgttgctgacagatcacaaaaagtggaaactgttactaaatccaaagcagacatgcatgatccattacacattggtgcaccaatggcaggtgtcattgttgaagttaaagttcataaaggatcactaataaagaagggccaacctgtagccgtattaagcgccatgaaaatggaaatgattatatcttctccatccgatggacaagttaaagaagtgtttgtctctgatggtgaaaatgtggactcttctgatttattagttctattagaagaccaagttcctgttgaaactaaggcatgaaccggttagttctcatttataatgtataatatacccgaatcttatttatttacctttcctattttttgacgaccagtaaatactaatacataattaggaacaaaagttaaataaaaaaaaaaataataatttaacgcatccaattaacgtgtccttttttcatcattaatttatctactatttcgatttaaattccatatacaataaatcctagatacattcccgaaagcatctt

SEQ ID NO: 10061 - protein, 1178 aa, Saccharomyces cerevisiae
MSQRKFAGLRDNFNLLGEKNKILVANRGEIPIRIFRTAHELSMQTVAIYSHEDRLSTHKQKADEAYVIGEVGQYTPVGAYLAIDEIISIAQKHQVDFIHPGYGFLSENSEFADKVVKAGITWIGPPAEVIDSVGDKVSARNLAAKANVPTVPGTPGPIETVEEALDFVNEYGYPVIIKAAFGGGGRGMRVVREGDDVADAFQRATSEARTAFGNGTCFVERFLDKPKHIEVQLLADNHGNVVHLFERDCSVQRRHQKVVEVAPAKTLPREVRDAILTDAVKLAKECGYRNAGTAEFLVDNQNRHYFIEINPRIQVEHTITEEITGIDIVAAQIQIAAGASLPQLGLFQDKITTRGFAIQCRITTEDPAKNFQPDTGRIEVYRSAGGNGVRLDGGNAYAGTIISPHYDSMLVKCSCSGSTYEIVRRKMIRALIEFRIRGVKTNIPFLLTLLTNPVFIEGTYWTTFIDDTPQLFQMVSSQNRAQKLLHYLADVAVNGSSIKGQIGLPKLKSNPSVPHLHDAQGNVINVTKSAPPSGWRQVLLEKGPAEFARQVRQFNGTLLMDTTWRDAHQSLLATRVRTHDLATIAPTTAHALAGRFALECWGGATFDVAMRFLHEDPWERLRKLRSLVPNIPFQMLLRGANGVAYSSLPDNAIDHFVKQAKDNGVDIFRVFDALNDLEQLKVGVDAVKKAGGVVEATVCFSGDMLQPGKKYNLDYYLEIAEKIVQMGTHILGIKDMAGTMKPAAAKLLIGSLRAKYPDLPIHVHTHDSAGTAVASMTACALAGADVVDVAINSMSGLTSQPSINALLASLEGNIDTGINVEHVRELDAYWAEMRLLYSCFEADLKGPDPEVYQHEIPGGQLTNLLFQAQQLGLGEQWAETKRAYREANYLLGDIVKVTPTSKVVGDLAQFMVSNKLTSDDVRRLANSLDFPDSVMDFFEGLIGQPYGGFPEPFRSDVLRNKRRKLTCRPGLELEPFDLEKIREDLQNRFGDVDECDVASYNMYPRVYEDFQKMRETYGDLSVLPTRSFLSPLETDEEIEVVIEQGKTLIIKLQAVGDLNKKTGEREVYFDLNGEMRKIRVADRSQKVETVTKSKADMHDPLHIGAPMAGVIVEVKVHKGSLIKKGQPVAVLSAMKMEMIISSPSDGQVKEVFVSDGENVDSSDLLVLLEDQVPVETKA

SEQ ID NO: 10062 - DNA, 4112 bp, Saccharomyces cerevisiae
  CDS (253)..(3795)
taagtaagaagtactccccatcggatatttcctattgtgtttctgtgatttttagtccttttttcttttctcttactttcggtatccttacttgattacatacataaacaagcccctcttttcttccaaactcttgtagcttactatctgtggcccgtcatttgagtttgatttttttgccaattactatattgcaaaataaaggacagttactaggagagaaaataagggacatagagaacaaaataaaatatgagcagtagcaagaaattggccggtcttagggacaatttcagtttgctcggcgaaaagaataagatcttggtcgccaatagaggtgaaattccgattagaatttttagatctgctcatgagctgtctatgagaaccatcgccatatactcccatgaggaccgtctttcaatgcacaggttgaaggcggacgaagcgtatgttatcggggaggagggccagtatacacctgtgggtgcttacttggcaatggacgagatcatcgaaattgcaaagaagcataaggtggatttcatccatccaggttatgggttcttgtctgaaaattcggaatttgccgacaaagtagtgaaggccggtatcacttggatcggccctccagctgaagttattgactctgtgggtgacaaagtctctgccagacacttggcagcaagagctaacgttcctaccgttcccggtactccaggacctatcgaaactgtgcaagaggcacttgacttcgttaatgaatacggctacccggtgatcattaaggccgcctttggtggtggtggtagaggtatgagagtcgttagagaaggtgacgacgtggcagatgcctttcaacgtgctacctccgaagcccgtactgccttcggtaatggtacctgctttgtggaaagattcttggacaagccaaagcatattgaagttcaattgttggctgataaccacggaaacgtggttcatcttttcgaaagagactgttctgtgcaaagaagacaccaaaaagttgtcgaagtcgctccagcaaagactttgccccgtgaagttcgtgacgctattttgacagatgctgttaaattagctaaggtatgtggttacagaaacgcaggtaccgccgaattcttggttgacaaccaaaacagacactatttcattgaaattaatccaagaattcaagtggagcataccatcactgaagaaatcaccggtattgacattgtttctgcccaaatccagattgccgcaggtgccactttgactcaactaggtctattacaggataaaatcaccacccgtgggttttccatccaatgtcgtattaccactgaagatccctctaagaatttccaaccggataccggtcgcctggaggtctatcgttctgccggtggtaatggtgtgagattggacggtggtaacgcttatgcaggtgctactatctcgcctcactacgactcaatgctggtcaaatgttcatgctctggttctacttatgaaatcgtccgtaggaagatgattcgtgccctgatcgaattcagaatcagaggtgttaagaccaacattcccttcctattgactcttttgaccaatccagtttttattgagggtacatactggacgacttttattgacgacaccccacaactgttccaaatggtatcgtcacaaaacagagcgcaaaaactgttacactatttggcagacttggcagttaacggttcttctattaagggtcaaattggcttgccaaaactaaaatcaaatccaagtgtcccccatttgcacgatgctcagggcaatgtcatcaacgttacaaagtctgcaccaccatccggatggagacaagtgctactggaaaagggaccatctgaatttgccaagcaagtcagacagttcaatggtactctactgatggacaccacctggagagacgctcatcaatctctacttgcaacaagagtcagaacccacgatttggctacaatcgctccaacaaccgcacatgcccttgcaggtgctttcgctttagaatgttggggtggtgctacattcgacgttgcaatgagattcttgcatgaggatccatgggaacgtctgagaaaattaagatctctggtgcctaatattccattccaaatgttattacgtggtgccaacggtgtggcttactcttcattacctgacaatgctattgaccattttgtcaagcaagccaaggataatggtgttgatatatttagagtttttgatgccttgaatgatttagaacaattaaaagttggtgtgaatgctgtcaagaaggccggtggtgttgtcgaagctactgtttgttactctggtgacatgcttcagccaggtaagaaatacaacttagactactacctagaagttgttgaaaaaatagttcaaatgggtacacatatcttgggtattaaggatatggcaggtactatgaaaccggccgctgccaaattattaattggctccctaagaaccagatatccggatttaccaattcatgttcacagtcatgactccgcaggtactgctgttgcgtctatgactgcatgtgccctagcaggtgctgatgttgtcgatgtagctatcaattcaatgtcgggcttaacttcccaaccatcaattaatgcactgttggcttcattagaaggtaacattgatactgggattaacgttgagcatgttcgtgaattagatgcatactgggccgaaatgagactgttgtattcttgtttcgaggccgacttgaagggaccagatccagaagtttaccaacatgaaatcccaggtggtcaattgactaacttgttattccaagctcaacaactgggtcttggtgaacaatgggctgaaactaaaagagcttacagagaagccaattacctactgggagatattgttaaagttaccccaacttctaaggttgtcggtgatttagctcaattcatggtttctaacaaactgacttccgacgatattagacgtttagctaattctttggactttcctgactctgttatggacttttttgaaggtttaattggtcaaccatacggtgggttcccagaaccattaagatctgatgtattgagaaacaagagaagaaagttgacgtgccgtccaggtttagaattagaaccatttgatctcgaaaaaattagagaagacttgcagaacagattcggtgatattgatgaatgcgatgttgcttcttacaatatgtatccaagggtctatgaagatttccaaaagatcagagaaacatacggtgatttatcagttctaccaaccaaaaatttcctagcaccagcagaacctgatgaagaaatcgaagtcaccatcgaacaaggtaagactttgattatcaaattgcaagctgttggtgacttaaataagaaaactgggcaaagagaagtgtattttgaattgaacggtgaattaagaaagatcagagttgcagacaagtcacaaaacatacaatctgttgctaaaccaaaggctgatgtccacgatactcaccaaatcggtgcaccaatggctggtgttatcatagaagttaaagtacataaagggtctttggtgaaaaagggcgaatcgattgctgttttgagtgccatgaaaatggaaatggttgtctcttcaccagcagatggtcaagttaaagacgttttcattaaggatggtgaaagtgttgacgcatcagatttgttggttgtcctagaagaagaaaccctacccccatcccaaaaaaagtaatttttactcgttaattatattttatgacatctgaaaatactagctgtactatatatggcgtatattttatctagttatgttcccatgtatatttaaatgccaaatagaaagtaatcaaacactttcgatgaaatacgtgctaactgtgtttcttccttaatgctttcacttaccatgtctccattctccattttcttcttgagtgaaaatgtgagtttataacgctcaagtacgttaactactctatttaatatcgtacgggatttttgatcgactgtaggttttcttcttagaccattccagcgcccgggtattta

SEQ ID NO: 10063 - protein, 1180 aa, Saccharomyces cerevisiae
MSSSKKLAGLRDNFSLLGEKNKILVANRGEIPIRIFRSAHELSMRTIAIYSHEDRLSMHRLKADEAYVIGEEGQYTPVGAYLAMDEIIEIAKKHKVDFIHPGYGFLSENSEFADKVVKAGITWIGPPAEVIDSVGDKVSARHLAARANVPTVPGTPGPIETVQEALDFVNEYGYPVIIKAAFGGGGRGMRVVREGDDVADAFQRATSEARTAFGNGTCFVERFLDKPKHIEVQLLADNHGNVVHLFERDCSVQRRHQKVVEVAPAKTLPREVRDAILTDAVKLAKVCGYRNAGTAEFLVDNQNRHYFIEINPRIQVEHTITEEITGIDIVSAQIQIAAGATLTQLGLLQDKITTRGFSIQCRITTEDPSKNFQPDTGRLEVYRSAGGNGVRLDGGNAYAGATISPHYDSMLVKCSCSGSTYEIVRRKMIRALIEFRIRGVKTNIPFLLTLLTNPVFIEGTYWTTFIDDTPQLFQMVSSQNRAQKLLHYLADLAVNGSSIKGQIGLPKLKSNPSVPHLHDAQGNVINVTKSAPPSGWRQVLLEKGPSEFAKQVRQFNGTLLMDTTWRDAHQSLLATRVRTHDLATIAPTTAHALAGAFALECWGGATFDVAMRFLHEDPWERLRKLRSLVPNIPFQMLLRGANGVAYSSLPDNAIDHFVKQAKDNGVDIFRVFDALNDLEQLKVGVNAVKKAGGVVEATVCYSGDMLQPGKKYNLDYYLEVVEKIVQMGTHILGIKDMAGTMKPAAAKLLIGSLRTRYPDLPIHVHSHDSAGTAVASMTACALAGADVVDVAINSMSGLTSQPSINALLASLEGNIDTGINVEHVRELDAYWAEMRLLYSCFEADLKGPDPEVYQHEIPGGQLTNLLFQAQQLGLGEQWAETKRAYREANYLLGDIVKVTPTSKVVGDLAQFMVSNKLTSDDIRRLANSLDFPDSVMDFFEGLIGQPYGGFPEPLRSDVLRNKRRKLTCRPGLELEPFDLEKIREDLQNRFGDIDECDVASYNMYPRVYEDFQKIRETYGDLSVLPTKNFLAPAEPDEEIEVTIEQGKTLIIKLQAVGDLNKKTGQREVYFELNGELRKIRVADKSQNIQSVAKPKADVHDTHQIGAPMAGVIIEVKVHKGSLVKKGESIAVLSAMKMEMVVSSPADGQVKDVFIKDGESVDASDLLVVLEEETLPPSQKK

SEQ ID NO: 10064 - DNA, 1521 bp, Archaeoglobus fulgidus
  CDS (1)..(1521): transl_table=11
atgttcagcaaaattcttgtggcaaacagaggggaaatagccgtcagggtgatgagggcctgccgggagcttggaattaagaccgtcggggtttacagctctgcggacaaaagggcctttcacagggtttacgctgacgagtgctactacatcggcaaagctgatccaagagacagctatctcaacattgacagaatcattgaagttgccaagaagtctggagcggaggcaattcaccctggctacggctttctcgcggaaaatgccgagtttgcggaaaggtgcgaagaggagggaatcgttttcatcggaccatctcctgaagttatacgcatcgccggctcgaaggtgaggtcgagagagagcatgcagagggctggagttcctgtcattccgggctcaccgaaaattgataccgttgatgaggcgaaggagtgggcggagaagattggataccccgtagcggtcaaagcttctggaggtggaggcggaataggcattgtagttgtcaacagtcaagaagagcttgaggaagctttcagaaagtcgaaaaagctcggtgagagctacttcaaggactccaccgtttacctcgaaaagtatcttgcgagaccgaggcacatagaggttcagattcttgcagaccagcacggaaacgtcatccatctgggcgagagggagtgcagcatccagaggaggcaccagaagctcatagaggaggctccatctccagcgttgaacgaggaaatgagggaggagctcggaaagcttgcggtgaagggagcgagggaaatcggatacacaaacgccggaaccttcgagtttctttacgagaacggaaacttctacttccttgaaataaactcaaggcttcaggtcgagcacacaataactgaagttgttactggcattgacatcgtgaagtatcagattcgcatcgcttacggtgaggaactcaggcacggacaggaggatgtagccattaggggacacgcaattgagtgcagaataaatgccgaggaccctgtaaacttctatccgagaagcggacggattttgcactacagaagcccgggaggaattgggataagggttgacagcggaatccacatgggctacaggattccggaggagtacgacagcatgatttccaagctcatcgcctacggcgagacgagggaggaggccattgcgaggatgaagagggctctctacgagtacatcatagagggtgtggaaacgaacatccccttccatttcgctgtgctcaacgatgaggagtttgttaggggcaacatccacacgaagttcgtggaagagaggaacattgcggagaaggtaaaggagtacttgaggattttcaggccgataaaggcgaggctcgacgagatattcatggagagcgagtttacatgggaggaaatatccgccatcgtaactgcaatcgacgcatacgagcaggaactggagcgcggaattgaagagagaatctggcaggcaattttcagcctgggagcctga

SEQ ID NO: 10065 - protein, 506 aa, Archaeoglobus fulgidus
MFSKILVANRGEIAVRVMRACRELGIKTVGVYSSADKRAFHRVYADECYYIGKADPRDSYLNIDRIIEVAKKSGAEAIHPGYGFLAENAEFAERCEEEGIVFIGPSPEVIRIAGSKVRSRESMQRAGVPVIPGSPKIDTVDEAKEWAEKIGYPVAVKASGGGGGIGIVVVNSQEELEEAFRKSKKLGESYFKDSTVYLEKYLARPRHIEVQILADQHGNVIHLGERECSIQRRHQKLIEEAPSPALNEEMREELGKLAVKGAREIGYTNAGTFEFLYENGNFYFLEINSRLQVEHTITEVVTGIDIVKYQIRIAYGEELRHGQEDVAIRGHAIECRINAEDPVNFYPRSGRILHYRSPGGIGIRVDSGIHMGYRIPEEYDSMISKLIAYGETREEAIARMKRALYEYIIEGVETNIPFHFAVLNDEEFVRGNIHTKFVEERNIAEKVKEYLRIFRPIKARLDEIFMESEFTWEEISAIVTAIDAYEQELERGIEERIWQAIFSLGA

SEQ ID NO: 10066 - DNA, 1506 bp, Methanococcus jannaschii
  CDS (1)..(1506): transl_table=11
atgtttaacaaagttttaattgcaaatagaggggagatagcgattagaattataagagcatgttgggagttgggaattaagacagttgcagtttattctgaggcagataagaggtctttacatgctactttggctgatgaagcttactgtataggtcctgctccagcggcaaagagttatttaaacattgatgccatattaaatgtagctgagaaagctaaggttgatgccatccatccaggatatggatttttagctgaaaatgctgaatttgcaagggctgttaaaaaagctggttttgaatttatagggcctaatccagatgctatagaagcaatgggaagtaaaattaacgctaaaaaaatcatgaaaaaagcaggagttcctttaattcctggtagtgagggggctattgaagatattgatgaagcaatagaaatagctgaagctatcggtttccctgtagttgttaaagcttcagctggcggtggcggaatgggaatgagtgttgcatatagcaaagaggagttaaaagaagttattgaatctgcaagaaacattgcaaagagtgcatttggtgacccaacagtatttattgagaaatacttagaaaatccaagacacattgaaatccaattattgggagataagcatgggaatattattcatttaggagatagagagtgttcaatacagaggagacatcagaagttgattgaagaggctccctcaccaataatgactgaagagttaagagaaagaatgggagaagcggcaatcaaagcaggaaaggcaataaattatgacagtgcaggaactgttgagtttttgtatgaaaatggcaacttttacttcttagagatgaatacaagaattcaagttgagcatacagttacagagcaagttactggaatagatttggttaaggcgatgattaaaatagctgctggagaagaattaactttaaagcaggaagatgttaaaataagagggcatgcaattgagtgcagaattaacgcagaagacccattaaatgatttcgttccatgtcctggaaagataaaactatataggtctccaggggggcctggagttaggattgacagtggtgtctatggaggggctgaaattcctccttactatgattcaatgatagctaagctaattacttatggaaatagcagagaggaggcaatagcaagaatgaaaagagctttgagggagtatgttataataggcgttaaaacaaatattccattccatagggctgttttagaggaggagaactttttaaaagggaatatctcaactcactatgtagagcagaatatgcataaattaagagagaaaatggttaaatacgcattagaatcaagagatttatacagtgttgtatcagagaaggtatttgaaaagaataaaaagatagccgccgctgttggtggtttaacaatgtatatatcccaaattatgaaagaaaatgaagtgaataacaaagaatggtaa

SEQ ID NO: 10067 - protein, 501 aa, Methanococcus jannaschii
MFNKVLIANRGEIAIRIIRACWELGIKTVAVYSEADKRSLHATLADEAYCIGPAPAAKSYLNIDAILNVAEKAKVDAIHPGYGFLAENAEFARAVKKAGFEFIGPNPDAIEAMGSKINAKKIMKKAGVPLIPGSEGAIEDIDEAIEIAEAIGFPVVVKASAGGGGMGMSVAYSKEELKEVIESARNIAKSAFGDPTVFIEKYLENPRHIEIQLLGDKHGNIIHLGDRECSIQRRHQKLIEEAPSPIMTEELRERMGEAAIKAGKAINYDSAGTVEFLYENGNFYFLEMNTRIQVEHTVTEQVTGIDLVKAMIKIAAGEELTLKQEDVKIRGHAIECRINAEDPLNDFVPCPGKIKLYRSPGGPGVRIDSGVYGGAEIPPYYDSMIAKLITYGNSREEAIARMKRALREYVIIGVKTNIPFHRAVLEEENFLKGNISTHYVEQNMHKLREKMVKYALESRDLYSVVSEKVFEKNKKIAAAVGGLTMYISQIMKENEVNNKEW

SEQ ID NO: 10068 - DNA, 1476 bp, Methanobacterium thermoautotrophicum
  CDS (1)..(1476): transl_table=11
atgttcagtaaaatccttgttgcaaaccgtggtgaaatagcaataagagttatgcgtgcctgcagggaacttggaataaagagcgtggctgtttactctgaagcagacaaaaacgcccttttcacaagatacgccgatgaggcatatgagataggaaaaccagccccatcacagagctacctcaggatcgacaggatactggaggtggccgagaaggcaggcgccgaagccatccacccgggctacggtttcctcgcagagaacccccgcctcggagaggaatgtgaaaaacagggaatcaaactcataggtcccaagggctcagttatagaggccatgggggataaaataacctcaaagaagctcatgaagaaggccggtgtacccgtgatccccggtaccgatcagggcgtcagtgaccctgatgaagccgccaggatagctgattccataggttaccccgtcattataaaggcatctgcaggcgggggcgggatcggtatgcgggctgtctacgaggaggatgaactcataagggccatggagtccacccagtcggtggctgcatcagccttcggggaccccaccgtgtacatcgagaagtaccttgaaaggccacggcacatcgaattccaggtcatggcagatgaatcaggcaacgtgatacaccttgcagacagggagtgctcgatacagaggaggcaccagaaactgatagaggaggcaccgtcccccataatgacaccggaactcagggagaggatgggatccgctgcagttaaggccgctgaatatataggctatgaaaacgcaggtacagttgagttcctttactccaacggggacttctacttccttgagatgaacaccaggatacaggtggaacatcccataacagaggttatcacaggagtcgaccttgtcaaggaacagataagggtcgcctccggagaggaacttcgcttcacccagaaggatataaacatcagggggcatgccatcgagtgccgtataaacgcagagaacccccttgcagatttcgcgccaaaccccggtaagatcacaggttacagatccccagggggtataggtgtgagggttgacagcggcgtttacatgaactatgagataccccccttctatgattccatgatatcaaaactcatagtgtggggtatggaccgccaggaggccataaaccggatgaagagggccctcagtgagtacataatactgggggttaaaaccaccatacccttccacaaggccataatgaggaacgaggcattcaggcgaggcgaactccatacacacttcgttgacgaatacagaaggggtatagacgccgagatgcgaaaaatcgttaaggaggaccaggagatggttgaacgtctccagtcaacatttctcccatcaaagaaggttgccgccatatcagcggcgataggaacctacatgcattcaaggagggggtga

SEQ ID NO: 10069 - protein, 491 aa, Methanobacterium thermoautotrophicum
MFSKILVANRGEIAIRVMRACRELGIKSVAVYSEADKNALFTRYADEAYEIGKPAPSQSYLRIDRILEVAEKAGAEAIHPGYGFLAENPRLGEECEKQGIKLIGPKGSVIEAMGDKITSKKLMKKAGVPVIPGTDQGVSDPDEAARIADSIGYPVIIKASAGGGGIGMRAVYEEDELIRAMESTQSVAASAFGDPTVYIEKYLERPRHIEFQVMADESGNVIHLADRECSIQRRHQKLIEEAPSPIMTPELRERMGSAAVKAAEYIGYENAGTVEFLYSNGDFYFLEMNTRIQVEHPITEVITGVDLVKEQIRVASGEELRFTQKDINIRGHAIECRINAENPLADFAPNPGKITGYRSPGGIGVRVDSGVYMNYEIPPFYDSMISKLIVWGMDRQEAINRMKRALSEYIILGVKTTIPFHKAIMRNEAFRRGELHTHFVDEYRRGIDAEMRKIVKEDQEMVERLQSTFLPSKKVAAISAAIGTYMHSRRG

SEQ ID NO: 10070 - DNA, 3582 bp, Aspergillus terreus
  CDS (1)..(3582)
atggcggccccctatcgtcagccagaggaggcagtcgatgactccgagttcatcgacgaccatcatgatcacctccgcgacaccgtccaccatcgcctccgggccaactccgccatcatgcagttccagaagatcctcgtcgccaaccgcggcgaaatccccattcggatcttccgtaccgctcacgaactctccctccagacggtcgccatcttctcccatgaggaccgtctctccatgcaccgtcagaaggccgacgaggcctacatgatcggccaccgcggccagtacacccccgtcggcgcctatctggccgccgatgagatcgtcaagatcgccctcgagcatggcgtccacttgatccaccccggctacgggttcttatccgaaaacgccgactttgcccgcaaggtcgagaaggctggcatggtcttcgtcggtcccacccccgacaccattgacagcctcggtgacaaggtctccgcccgtcagctggccatccgctgcaacgtccccgtcgtgcccggcaccgagggccccgtcgagcgctacgaggaggtcaaggccttcaccgacacctatggcttccccatcatcatcaaggccgccttcggtggtggtggtcgcggcatgcgtgtcgtgcgcaaccaggccgatctgcgcgactccttcgagcgtgccacctccgaggcccgctccgcctttggcaacggcaccgtcttcgtcgagcgcttcctcgacaagcccaagcacatcgaggtccagctgctcggtgacaaccacggcaacgtcgtccacctcttcgagcgtgactgctccgtccagcgtcgtcaccagaaggtcgtcgaggtcgcccccgccaaggacctgcccacggatgtgcgcgaccgcatcctgtccgacgccgtgaagctggccaagtcggtcaactaccgcaacgccggtaccgccgagttcctggtggaccagcagaaccgccactactttatcgagatcaacccccgtatccaggtcgagcacaccattacggaagaaatcaccggcatcgatatcgtcgccgcccagatccagatcgccgctggcgccacgctggagcagctcggtctgactcaggaccgcatctctacccgcggcttcgccatccagtgccgtatcaccaccgaggatccctccaagggcttctctcccgacaccggcaagatcgaggtctaccggtccgccggtggtaacggtgtccgtctcgacggtggaaacggcttcgccggtgccatcatcaccccccactacgactccatgctggtcaagtgcacctgccgcgggtccacctatgaaatcgcccgtcgcaaggtcgttcgtgccctggtcgagttccgtatccgcggcgtgaagaccaacatccccttcctgacctccctgctgagtcaccccacctttgtcgatggcaactgctggaccaccttcatcgacgacacccccgaactgttcgctctggtgggctcgcagaaccgcgcccagaagctgctcgcctaccttggtgatgtcgccgtcaacggcagcagcatcaagggtcagatgggtgagcccaagttcaagggcgagatcatcaagcccaagctgctggatgcccagggtaagccgctggacgtctcgcagccctgcaccaagggttggaagcagatcatcgaccaggagggccccgtcgcctttgccaaggccgtccgcgccaacaagggctgcttgatcatggacactacctggcgtgacgcccatcagtcgctgctggccacccgtgtgcgcaccattgacctgttgaacatcgcccacgagaccagccacgccctgtccaacgcctacagtttggaatgctggggtggtgccaccttcgacgtcgccatgcgcttcctctacgaggacccctgggaccgtctgcgcaagatgcgcaaggccgtgcccaacatccccttccagatgctcctccgtggcgccaacggcgtggcttactcctccctccccgacaacgccatctaccacttctgtaagaacgccaagaagtgcggtgtcgacatcttccgtgtcttcgacgccttgaacgacatcgaccagctcgaagtcggcatcaaggccgtccacgccgccgagggtgtggttgaggctaccgtttgctacagcggtgacatgctgaaccccaaaaagaagtacaatctggagtactacctggcgctggtcgacaagatcgtcgccctgaagccccacgtcctcggcatcaaggatatggccggtgtgctcaagccccaggccgcgcgcctgctggtcggctccatccgcgagcgctaccccgacctccccatccacgtccacacccacgactccgccggtactggtgtggcgtcgatgatcgcctgcgcccaggccggcgccgacgccgtggatgccgccaccgacagcatgtccggcatgacctcgcagcccagcatcggtgccatcctcgcctccctcgagggcaccgagcacgaccccggcctcaactcggcccacgtgcgcgccctcgacagctactgggcccagctgcgtctgctgtactcgcccttcgaggccaatctcaccggccccgacccggaggtctacgagcacgagatccccggtggccagctgaccaacctcatcttccaggctagccagctgggtctgggccagcagtgggccgagaccaagaaggcctacgaggtggccaatgacctgctgggtgacatcgtcaaggtcacgcccacctccaaggtggtcggcgatctggcccagttcatcgtctccaacaagctgagcgcgcaggacgtggtcgaccgcgccgccgagctagacttccccggctccgtcctggagttcctcgagggcctgatgggccagccctttggcgggttccctgagccgctgcggtcccgcgcgctgcgcaaccgccgcaagctcgacaagcggcccggtctgtatctggagccgctggatctggccgcgatcaagaatcagatccgcgagcagttcggcagcgccaccgagtacgacgtggccagctacgccatgtaccccaaggtgtttgaggactacaagaagtttgtgcagaagtacggcgacctctcggtgctgccaacgcgctacttcctggccaagcccgagatcggcgaggagttccacgtcgagctggagaagggtaaggtgctgatcctcaagctgctggccatcgggcccttgtccgagcagaccggccagcgcgaggtgttctacgaggtcaacggtgaggtgcgccaggtcagcatcgacgacaagaaggcctcgatcgacaacacggcgcgccccaaggcggatgtgggcgacagcagccaggtcggcgcgcccatgagcggtgtggtggtcgagatccgcgtgcacgacggtctggaggtgaagaagggagatcctctggctgttctgagcgccatgaagatggaaatggtgatctcggctccacacagcggcaaggtgtccggattgctggtcaaggagggcgattctgtggacggccaggatctggtctgcaagatcaccaaggcgtaa

SEQ ID NO: 10071 - protein, 1193 aa, Aspergillus terreus
MAAPYRQPEEAVDDSEFIDDHHDHLRDTVHHRLRANSAIMQFQKILVANRGEIPIRIFRTAHELSLQTVAIFSHEDRLSMHRQKADEAYMIGHRGQYTPVGAYLAADEIVKIALEHGVHLIHPGYGFLSENADFARKVEKAGMVFVGPTPDTIDSLGDKVSARQLAIRCNVPVVPGTEGPVERYEEVKAFTDTYGFPIIIKAAFGGGGRGMRVVRNQADLRDSFERATSEARSAFGNGTVFVERFLDKPKHIEVQLLGDNHGNVVHLFERDCSVQRRHQKVVEVAPAKDLPTDVRDRILSDAVKLAKSVNYRNAGTAEFLVDQQNRHYFIEINPRIQVEHTITEEITGIDIVAAQIQIAAGATLEQLGLTQDRISTRGFAIQCRITTEDPSKGFSPDTGKIEVYRSAGGNGVRLDGGNGFAGAIITPHYDSMLVKCTCRGSTYEIARRKVVRALVEFRIRGVKTNIPFLTSLLSHPTFVDGNCWTTFIDDTPELFALVGSQNRAQKLLAYLGDVAVNGSSIKGQMGEPKFKGEIIKPKLLDAQGKPLDVSQPCTKGWKQIIDQEGPVAFAKAVRANKGCLIMDTTWRDAHQSLLATRVRTIDLLNIAHETSHALSNAYSLECWGGATFDVAMRFLYEDPWDRLRKMRKAVPNIPFQMLLRGANGVAYSSLPDNAIYHFCKNAKKCGVDIFRVFDALNDIDQLEVGIKAVHAAEGVVEATVCYSGDMLNPKKKYNLEYYLALVDKIVALKPHVLGIKDMAGVLKPQAARLLVGSIRERYPDLPIHVHTHDSAGTGVASMIACAQAGADAVDAATDSMSGMTSQPSIGAILASLEGTEHDPGLNSAHVRALDSYWAQLRLLYSPFEANLTGPDPEVYEHEIPGGQLTNLIFQASQLGLGQQWAETKKAYEVANDLLGDIVKVTPTSKVVGDLAQFIVSNKLSAQDVVDRAAELDFPGSVLEFLEGLMGQPFGGFPEPLRSRALRNRRKLDKRPGLYLEPLDLAAIKNQIREQFGSATEYDVASYAMYPKVFEDYKKFVQKYGDLSVLPTRYFLAKPEIGEEFHVELEKGKVLILKLLAIGPLSEQTGQREVFYEVNGEVRQVSIDDKKASIDNTARPKADVGDSSQVGAPMSGVVVEIRVHDGLEVKKGDPLAVLSAMKMEMVISAPHSGKVSGLLVKEGDSVDGQDLVCKITKA

SEQ ID NO: 10072 - DNA, 3447 bp, Bacillus subtilis
  CDS (1)..(3447): transl_table=11
ttgtctcagcaatcgatacaaaaagtattagtagcaaacaggggagaaattgcaatccgaatattccgggcgtgtaccgagttgaatattcgtacagttgcggtctattcaaaagaagattccggttcctaccatcggtacaaagcggatgaagcatacttggtcggtgaagggaaaaaaccgattgatgcttacctggatattgaaggtatcattgatattgcgaaaagaaacaaagtcgatgcaattcatccgggatacggtttcttatctgaaaatattcattttgcgagacgatgtgaagaagaaggcatcgtattcatagggccaaaatccgagcatctcgatatgtttggtgacaaggtaaaagcgcgtgagcaggcagaaaaagcgggaatccccgtgattccgggaagcgacggtcctgccgaaacgcttgaagccgtcgaacaatttggacaagctaacggttatccgatcatcattaaagcctcgcttggcggcggcggccgcggtatgcggattgtcagatctgaaagtgaagttaaagaagcatatgagcgtgctaaatcagaggcgaaagcagcctttggcaatgatgaagtttatgtagaaaaattaattgagaatccgaaacatattgaggttcaggtcattggagacaagcagggcaatgtcgtccatctttttgagagggattgctccgttcaaagacgccatcaaaaagtcattgaagtggcgccgagtgtctcgctgtcacctgaattaagggaccaaatttgtgaggctgcagttgcgcttgccaaaaatgtaaactatataaatgcggggacggtcgaattccttgttgcaaacaacgagttctactttattgaagtaaatcctcgcgtacaagttgaacacacgataacagaaatgattactggtgtcgatattgttcaaactcagatccttgttgcccaagggcacagccttcacagcaaaaaagtaaatattcctgagcaaaaggacatttttacaatcggctatgccattcagtcacgggttacgactgaggatccgcaaaatgatttcatgcctgatacaggaaaaatcatggcttaccgctcaggcggcggttttggtgtccgtcttgataccggaaacagcttccagggcgccgtgatcacaccatactatgattcacttctcgttaagctttcaacttgggctttaacgtttgaacaggcagctgccaaaatggtgcgaaaccttcaggagtttagaatcagaggcataaaaacgaacattccgttccttgagaacgttgcaaagcatgagaagttcctgacagggcaatatgatacatctttcattgatacaacgcctgaattatttaatttccctaaacaaaaagaccgcggaacgaaaatgctcacttacatcggcaatgtgacagtgaacggcttccctggaatcgggaaaaaagaaaaaccggcgtttgacaaaccgttaggcgtaaaggtagacgttgatcagcagcctgccagaggaacaaagcaaattctcgatgaaaaaggtgcagaagggcttgcaaattgggttaaggagcagaaatctgtccttttaactgatacgacattcagggatgcccaccaatcgttattggcaactagaatcagatcgcatgatttgaaaaaaatcgcaaatccgacggctgcgttatggcctgaactattcagtatggaaatgtggggaggcgcgaccttcgatgtagcctaccgattcctgaaagaagatccgtggaaacgtttggaagatcttcgcaaagaagtgccgaataccttattccagatgttgcttcgctcatcaaatgcggtcggctatacgaattatccggacaatgtgattaaagaatttgtgaagcaatcagctcaatccggtattgatgtgtttcgtattttcgacagcttaaactgggtaaaagggatgacgttagccattgatgctgttagggataccggcaaagtggcagaagctgcgatttgttatacgggagatatccttgacaagaaccggacgaagtacgaccttgcatattatacatcgatggcgaaggagcttgaggcggccggagcccatattctcgggattaaagatatggcagggctgttaaaaccgcaggctgcatatgagctcgtttctgcgttgaaagaaacgatcgacattccggttcaccttcatacgcatgatacgagcggaaacggtatttatatgtatgcgaaagctgttgaagccggcgttgatatcatagacgtggcggtcagctcaatggcgggattaacgtcacagcctagcgcgagcggattttatcatgcgatggaaggcaacgaccgccgtccggaaatgaatgtccaaggcgttgaattgctgtcccaatattgggagtcggtgcgtaaatattatagtgaatttgaaagcggaatgaagtctccgcatactgaaatttatgaacacgaaatgccagggggccaatacagcaacctgcagcagcaagccaagggagtaggccttggcgaccgctggaacgaagtcaaggaaatgtacagacgcgtgaacgatatgttcggtgacatcgtcaaggtaacgccttcctcaaaagtagtcggagatatggcactctacatggtgcaaaacaatctgactgaaaaagacgtttacgaaaaaggtgaatctttagatttccctgattctgtcgtggagctttttaaaggaaatatcggccagcctcatggcggattcccagaaaaactgcaaaagctgatcttaaaagggcaggagccgattacagtcagaccgggcgaactgcttgagccggtgtcatttgaagcgatcaaacaggaatttaaagagcagcataacttggaaatttcagatcaggatgctgtggcatatgccctttatcctaaagtcttcactgattatgtgaaaacgacagaaagctatggagacatctcggtattagatacaccgacattcttctacggtatgacattaggtgaagagatagaagttgaaattgagcgcggcaaaacgctgatcgttaagctgatttcaatcggtgagcctcagcctgatgccacccgcgtcgtttatttcgaactcaacgggcagccgcgtgaagtagtcattaaagatgaaagcattaagtcttccgttcaggaaaggctgaaagcagaccggacaaatccaagccacatcgcagcttccatgcctggaacagttattaaggtattggctgaagcaggcacaaaagtcaataaaggtgatcatttgatgattaatgaagcgatgaaaatggaaacaacggttcaggcgcctttctcaggaacaatcaagcaggttcatgtgaaaaatggtgagccgatccaaacgggagatctgctccttgaaattgaaaaagcataa

SEQ ID NO: 10073 - protein, 1148 aa, Bacillus subtilis
MSQQSIQKVLVANRGEIAIRIFRACTELNIRTVAVYSKEDSGSYHRYKADEAYLVGEGKKPIDAYLDIEGIIDIAKRNKVDAIHPGYGFLSENIHFARRCEEEGIVFIGPKSEHLDMFGDKVKAREQAEKAGIPVIPGSDGPAETLEAVEQFGQANGYPIIIKASLGGGGRGMRIVRSESEVKEAYERAKSEAKAAFGNDEVYVEKLIENPKHIEVQVIGDKQGNVVHLFERDCSVQRRHQKVIEVAPSVSLSPELRDQICEAAVALAKNVNYINAGTVEFLVANNEFYFIEVNPRVQVEHTITEMITGVDIVQTQILVAQGHSLHSKKVNIPEQKDIFTIGYAIQSRVTTEDPQNDFMPDTGKIMAYRSGGGFGVRLDTGNSFQGAVITPYYDSLLVKLSTWALTFEQAAAKMVRNLQEFRIRGIKTNIPFLENVAKHEKFLTGQYDTSFIDTTPELFNFPKQKDRGTKMLTYIGNVTVNGFPGIGKKEKPAFDKPLGVKVDVDQQPARGTKQILDEKGAEGLANWVKEQKSVLLTDTTFRDAHQSLLATRIRSHDLKKIANPTAALWPELFSMEMWGGATFDVAYRFLKEDPWKRLEDLRKEVPNTLFQMLLRSSNAVGYTNYPDNVIKEFVKQSAQSGIDVFRIFDSLNWVKGMTLAIDAVRDTGKVAEAAICYTGDILDKNRTKYDLAYYTSMAKELEAAGAHILGIKDMAGLLKPQAAYELVSALKETIDIPVHLHTHDTSGNGIYMYAKAVEAGVDIIDVAVSSMAGLTSQPSASGFYHAMEGNDRRPEMNVQGVELLSQYWESVRKYYSEFESGMKSPHTEIYEHEMPGGQYSNLQQQAKGVGLGDRWNEVKEMYRRVNDMFGDIVKVTPSSKVVGDMALYMVQNNLTEKDVYEKGESLDFPDSVVELFKGNIGQPHGGFPEKLQKLILKGQEPITVRPGELLEPVSFEAIKQEFKEQHNLEISDQDAVAYALYPKVFTDYVKTTESYGDISVLDTPTFFYGMTLGEEIEVEIERGKTLIVKLISIGEPQPDATRVVYFELNGQPREVVIKDESIKSSVQERLKADRTNPSHIAASMPGTVIKVLAEAGTKVNKGDHLMINEAMKMETTVQAPFSGTIKQVHVKNGEPIQTGDLLLEIEKA

SEQ ID NO: 10074 - DNA, 4190 bp, Pichia angusta
  CDS (275)..(3802)
cgctctagaatagagttggacacaaaggtgactgctgcaaagggtgggagtcatcgcatttctattgttttaggtgcaagacacaatacggagttcactccgtgctcaatttgctgctctgtaaattttttttactcatgactaaaaaaaaaatcgctgccccctcgtcattggcggcacgtcatgtgctcccatttactagtgcagacatttttattagcatcaaattcccttttttcctaatcatcttttatcatcttttataataacttcgatggcccaggtcgaggattattcgtcgctgcacagattgcggaaaaattccgagattctgtccaatgcaaacaagatcctggtggccaatagaggcgagattcccattagaatcttcagatctgcccacgagctctccatgcagacagttgctatctactcccacgaggaccgactgtcgatgcacagattgaaggccgacgaggcctacgtcataggagctaggggccagtactcccctgttcaggcgtacttgcagattgacgagattatcaacatcgcccttgaacacaacgtctccatgattcatcccggttacggctttttgtctgaaaactcagaatttgcccggaaagttgaggacagtggcatgatttggattggcccgccccacaacgtcattgacgctgttggagacaaggtcagtgccagaaacctggccggcaagtgcaacgttcccgtggtccctggaacagacggcccaattgacagcgttgagcaggcccaggagtttgtggataagtatggctatccagtgattatcaaggccgcttttggtggaggtggacgtggtatgagagtggttcgcgagggcgagagcattgctgacgctttccaaagagccacctccgaagccaagaccgcttttggaaacggtacctgtttcattgagcggtttttggacaagccaaagcacattgaggtgcaattgctggccgacaactacggcaacgttatccacctttttgaaagagactgttccgtgcagagaagacaccagaaggtggttgagattgccccagccaagacgcttcctgtcgaggtcagagacgccattctgactgacgcagtgaaactggctaaggctgccaactacagaaacgctggtactgcagagttccttgttgacaaccaaaacagacattatttcatcgaaatcaaccctagaatccaggtcgagcacaccatcactgaggaggtcaccggagtcgacattgttgctgctcagattcagatcgctgccggtgcttcattgcagcaactgggtctgttgcaggacaaaattaccaccaggggatttgccattcagtgcagaattaccaccgaagaccctgccaagaacttccagccagacacaggaaaaatcgaggtgtacagatcttcgggtggaaatggtgtgagactggacggtggtaatggatttgcaggcgccatcatttctccccactacgattccatgttggtcaagtgctccacgtctggctcaaactacgagattgccagaagaaagatgatcagggctttggttgagttcagaattagaggtgtcaagaccaacattcctttcctgctggctcttctgacccatccaacgttcgtttctggcgactgctggacgacattcatcgacgacactccttcgttgttcgagatggtgcaatccaagaacagagctcagaagttgctctcgtaccttgccgatctctgtgtcaacggatcgtcgatcaagggccagattggtctgccaaagctgaccagagatgctgacatcccggtgatccacgacattaacggctgggatatcgatatcaagaacactcctcctccagaatcctttagacaataccttttggactacggtcctgagcaatttgccaaccaaattagggctttcgatggttgcttgatcatggacactacctggagagacgctcaccagtcgcttctggcaaccagagttagaaccatagacttgttgaacattgctccggctacggcccatgcctttagatacgccttcgccctggaatgttggggaggtgccactttcgacgttgctatgcgtttcttgcacgaggatccgtgggacagactcagaaagctgagaaaagccgtgccaaacatcccattccagatgcttctgagaggagcgaatggtgtggcgtactcgtcgctgcctgacaacgccatagaccactttgtgaagcaggctaaggacgccggagtggacattttcagagtctttgatgctctgaacgatttggagcaactgaaggtcggcgtcgacgccgtcaagaaggccggaggtgtggtcgaagccactgtttgctactctggagacatgctcaagccaggcaagaaatacaatctcaagtactacctggagaccgtcgacaagattatggagatgggcacccatttgcttggtatcaaggacatggccggtactttgaagccggccgcggcaaagctgctgatcagcagtatcagaaagaagtatccttctgttcctatccacgtccacacccacgactcggccggtaccggtgtgattacctatgttgcttgtgctcttgctggtgcggacgttgttgattgtgctgtcaactcgatgtcgggcctgacatctcagccttccatgagcgcgttcattgctgccttggacaacgagatcaacaccggcattaccgagcagaatgccagggagattgatgcttattggtccgagatgagactgctgtactcgtgcttcgaggctgacctcaagggtccagacccagaagtgtacaaccacgagattccaggaggccaattgacaaacctgttgttccaggcccagcaggttggtctgggcgagaagtggcttgaaaccaagaaagcctacgaggaggccaacatgcttttgggcgatatcgtcaaggtcactccaacttccaaggttgttggtgatctggcccagttcatggtctccaacaagctttctccaaaggatgtggagaggctggcttcggagctggacttcccagactccgtgctggacttctttgagggtttgatgggtacgccatacggcgggttcccggagcctttgagaacgaatattcttgccggaaagagaagaaagctgactcgcaggccgggattggagctcgagccattcgacctcaagaagatcaaagaggagctccagtcgaggttcggcaactccattaccgagtgcgacgtggcctcgtacaacatgtatccaaaagtgtttgagtcgttcaagaagatccaggagaagtacggcgacctttctgtgctgcctacgagattcttccttgctcctccaaagctgaacgaagagatctctgtggaaatcgagcagggtaaaacctttgtcatcaaggtgatggccattggagacctgtcgccgcaaaccggcaccagagaggtgtatttcgagttcaacggtgaaatgagaaaggtcactgtcgaggacaagctcgccgctgtggagacagtcacgcgtcctaaggccgacgcacacaacccgaacgaggtgggggctcctatggccggtgtggttatcgaggtgcgtgtccatcctggagtcgaggtcaagaagggtgacccattgtgtgttctgagtgcgatgaagatggagatggttatcagctcgcctgtttctggaagagttggcgaggtgattgtgcacgagaacgacagcgtcgacgctggcgacctgatctgcaagattacgaaataatagtaacaaagctttaaacgtttatattatacagcattatttgcgtctcgctctgcgcttttcgtcgctcttcttctcctcgacgagctgttcgtaccgcgcggccagctcctcgtactcagccattttgtccgtgcactttttcgtcctcgtggctggctccctgccacacgttgtgcgggtctgccagcaactccgcagtgtgcttgttttgcgacaggatccccctggaatacttgttgataaaaaaactacatacaaatgagtgtgaggtgtcatgaattttattgcagacgggttttcattctggagtgccggccgtaacaaggaattaactactatcctaaaaaaaaactagtgtattatgtgatagcaaagaaggaaaatg

SEQ ID NO: 10075 - protein, 1175 aa, Pichia angusta
MAQVEDYSSLHRLRKNSEILSNANKILVANRGEIPIRIFRSAHELSMQTVAIYSHEDRLSMHRLKADEAYVIGARGQYSPVQAYLQIDEIINIALEHNVSMIHPGYGFLSENSEFARKVEDSGMIWIGPPHNVIDAVGDKVSARNLAGKCNVPVVPGTDGPIDSVEQAQEFVDKYGYPVIIKAAFGGGGRGMRVVREGESIADAFQRATSEAKTAFGNGTCFIERFLDKPKHIEVQLLADNYGNVIHLFERDCSVQRRHQKVVEIAPAKTLPVEVRDAILTDAVKLAKAANYRNAGTAEFLVDNQNRHYFIEINPRIQVEHTITEEVTGVDIVAAQIQIAAGASLQQLGLLQDKITTRGFAIQCRITTEDPAKNFQPDTGKIEVYRSSGGNGVRLDGGNGFAGAIISPHYDSMLVKCSTSGSNYEIARRKMIRALVEFRIRGVKTNIPFLLALLTHPTFVSGDCWTTFIDDTPSLFEMVQSKNRAQKLLSYLADLCVNGSSIKGQIGLPKLTRDADIPVIHDINGWDIDIKNTPPPESFRQYLLDYGPEQFANQIRAFDGCLIMDTTWRDAHQSLLATRVRTIDLLNIAPATAHAFRYAFALECWGGATFDVAMRFLHEDPWDRLRKLRKAVPNIPFQMLLRGANGVAYSSLPDNAIDHFVKQAKDAGVDIFRVFDALNDLEQLKVGVDAVKKAGGVVEATVCYSGDMLKPGKKYNLKYYLETVDKIMEMGTHLLGIKDMAGTLKPAAAKLLISSIRKKYPSVPIHVHTHDSAGTGVITYVACALAGADVVDCAVNSMSGLTSQPSMSAFIAALDNEINTGITEQNAREIDAYWSEMRLLYSCFEADLKGPDPEVYNHEIPGGQLTNLLFQAQQVGLGEKWLETKKAYEEANMLLGDIVKVTPTSKVVGDLAQFMVSNKLSPKDVERLASELDFPDSVLDFFEGLMGTPYGGFPEPLRTNILAGKRRKLTRRPGLELEPFDLKKIKEELQSRFGNSITECDVASYNMYPKVFESFKKIQEKYGDLSVLPTRFFLAPPKLNEEISVEIEQGKTFVIKVMAIGDLSPQTGTREVYFEFNGEMRKVTVEDKLAAVETVTRPKADAHNPNEVGAPMAGVVIEVRVHPGVEVKKGDPLCVLSAMKMEMVISSPVSGRVGEVIVHENDSVDAGDLICKITK

SEQ ID NO: 10076 - DNA, 3570 bp, Pichia pastoris
  CDS (1)..(3570)
atggccgaagaagactacctccccgtgtaccagctgagacgtgactcgtcgcttttgggcacaatgaacaagattttggttgccaacagaggcgaaattccaattcgtatcttcagaacggcccatgagctctcaatgaacacagtggccatctactctcacgaggaccgtttgtccatgcacagactgaaggctgatgaagcctatgttatcggtgagcgtggccagtactctccagtccaggcctatcttgcaattgacgagatcatcaagattgcggtgaagcataacgtcaacatgatccacccaggttacggattttgctctgaaaattctgagtttgctagaaaagttgaggagaacggtattttgtgggtcggaccatccgataccgtcatcgacgctgttggagacaaagtttccgccagaaacttggcctacgctgccaacgttccaaccgtccccggtacaccaggtccaattgaagacgtcgctcaagccacagcttttgtcgaagaatacggttacccagttatcattaaggcagcctttggtggtggtggaagaggtatgcgtgtggttcgcgaaggagatgacatagaagatgctttcctgagagcttctagtgaggccaagactgcgttcggtaacggtaccgtcttcattgaacgtttcctggacaaaccaaagcacattgaagtccaactgttggctgataactacggtaatgttattcatttgttcgagagagattgttccgttcaaagaagacaccaaaaagttgctcgaaattgctccgcaaagacactcccagtcgaggtccgtaatgcaatcttgaacgacgctgtcaaattagccaagactgccaattatagaaacgctggtaccgccgagtttttggtggacagccagaacagacactactttatcgagattaaccctcgtattcaagttgagcacaccattaccgaggaaattactggtgtagatatagttgctgcccagattcaaattgctgctggtgcttcgttagagcaactcggcttattgcaagaaaaaattaccacccgtgggtttgccattcaatgtcgtatcaccactgaagaccccactaagaactttcaaccagacacgggaaagatcgaagtttatagatcctctggtggtaacggagtcagacttgacggtggtaacgggtttgctggtgccgtcatctcgccccattatgattcgatgttggtgaagtgttccacttctggctctaactacgagattcgtcgtcgtaagatgatcagagcgttagttgaattcagaattagaggtgttaaaactaacattcctttcttgttggctttattgactcaccctgttttcatgacctccgaatgttggactacatttattgatgatactccagaattgttcaagattttgacttcccagaacagagcccagaagctgctggcttacttaggtgatctggctgttaatggttcctcaatcaagggacaaataggtctgcctaaactacacaaggaggctgatattccttcaatcactgatataaatggagatgttattgatgtctctattcctcctcctgatggatggagacagtttttgttggagaagggtcctgagcaatttgctcagcaagtgcgtgctttccctgggttgatgattatggacactacctggagagatgctcaccagtctttgcttgcaactcgggttagaacccatgacttgctaaatattgcaccagctacgtcttatgccctacatcacgcttttgcactggaatgttggggaggtgccacttttgacgtctccatgcgtttcttgcacgaggacccatggcaaagactgcgcaaactgcgtaaagctgtaccaaatatcccattctccatgttattgagaggtggtaacggtgttgcttactattctcttccagataatgcaattgaccactttcttaagcaggccaaagatactggtgtcgatgtcttccgtgttttcgatgctttaaacgatattgagcaattgaaggtcggagttgacgccgtcaagaaggctgggggtgttgtcgaagctactatgtgttattccggagacatgttgaagccaggtaaaaagtataacttggaatactacatcaatctggcaactgaaattgttgagatgggtacccacatattagctgttaaggatatggctggtacattaaaacctaccgctgccaaacagttgatctctgctttgaggagaaagttcccttcgttgccaatccacgttcatactcacgactctgccggtacaggtgttgcctccatggtggcctgtgctagagctggtgctgatgttgtgactgtgcgtgttaactctatgtctggtatgacttctcaaccctcaatgtctgctttcattgcgtctttagatggagaaattgagactggtattcctgaagctaatgccagagagattgatgcttactgggctgagatgagacttttgtactcatgtttcgaagctgatctaaagggacctgacccagaagtttatcagcatgagattccaggtggtcaactgactaacttactgttccaagctcaacaggttggtctgggagaaaaatgggttgaaactaagaaagcatatgaggctgctaacagattgcttggtgacattgtgaaggtcacaccaacctctaaggtcgttggtgacttggctcaattcatggtatctaataagttgtcatccgaagatgtcgagagactggcatctgagttagatttcccagattctgttcttgacttttttgagggcttgatgggtactccatatggaggtttccctgagccattgagaactaatgtcatctcaggaaaaagacgaaagctaactagcagacctggtttgactttggagccatacaacattcctgccattagagaggatcttgaggctcgtttcagtaaggtcactgagaatgacgttgcctcttacaacatgtatcctaaagtttacgaggcttataagaagcagcaagaattatatggagacttgtctgtgcttccaaccagaaacttcctgtctcctcctaaaattgacgaagagagacatgtgaccattgtgaccattgaaacaaggaaaacactaatcatcaagtgtatggctgaaggtgagctatctcaatcatccggtactagagaagtgtactttgaattgaacggtgagatgagaaaggtcacagttgaggacaagaatggcgctgttgaaactatcaccagacctaaggctgatgctcacaaccctaacgagattggtgctccaatggctggtgtcgttgttgaggttagagtccacgaaaatggtgaagttaagaagggtgatccaattgcagttttatctgcgatgaagatggagatggttatctcctcccctgttgctggtcgtattggacagattgcagtcaaggagaacgattctgttgatgccagcgacctgatcccaaaatcgtcaaggctgagtaaactattgatgtttattattcttattatattatactaa

SEQ ID NO: 10077 - protein, 1189 aa, Pichia pastoris
MAEEDYLPVYQLRRDSSLLGTMNKILVANRGEIPIRIFRTAHELSMNTVAIYSHEDRLSMHRLKADEAYVIGERGQYSPVQAYLAIDEIIKIAVKHNVNMIHPGYGFCSENSEFARKVEENGILWVGPSDTVIDAVGDKVSARNLAYAANVPTVPGTPGPIEDVAQATAFVEEYGYPVIIKAAFGGGGRGMRVVREGDDIEDAFLRASSEAKTAFGNGTVFIERFLDKPKHIEVQLLADNYGNVIHLFERDCSVQRRHQKVARNCSAKTLPVEVRNAILNDAVKLAKTANYRNAGTAEFLVDSQNRHYFIEINPRIQVEHTITEEITGVDIVAAQIQIAAGASLEQLGLLQEKITTRGFAIQCRITTEDPTKNFQPDTGKIEVYRSSGGNGVRLDGGNGFAGAVISPHYDSMLVKCSTSGSNYEIRRRKMIRALVEFRIRGVKTNIPFLLALLTHPVFMTSECWTTFIDDTPELFKILTSQNRAQKLLAYLGDLAVNGSSIKGQIGLPKLHKEADIPSITDINGDVIDVSIPPPDGWRQFLLEKGPEQFAQQVRAFPGLMIMDTTWRDAHQSLLATRVRTHDLLNIAPATSYALHHAFALECWGGATFDVSMRFLHEDPWQRLRKLRKAVPNIPFSMLLRGGNGVAYYSLPDNAIDHFLKQAKDTGVDVFRVFDALNDIEQLKVGVDAVKKAGGVVEATMCYSGDMLKPGKKYNLEYYINLATEIVEMGTHILAVKDMAGTLKPTAAKQLISALRRKFPSLPIHVHTHDSAGTGVASMVACARAGADVVTVRVNSMSGMTSQPSMSAFIASLDGEIETGIPEANAREIDAYWAEMRLLYSCFEADLKGPDPEVYQHEIPGGQLTNLLFQAQQVGLGEKWVETKKAYEAANRLLGDIVKVTPTSKVVGDLAQFMVSNKLSSEDVERLASELDFPDSVLDFFEGLMGTPYGGFPEPLRTNVISGKRRKLTSRPGLTLEPYNIPAIREDLEARFSKVTENDVASYNMYPKVYEAYKKQQELYGDLSVLPTRNFLSPPKIDEERHVTIVTIETRKTLIIKCMAEGELSQSSGTREVYFELNGEMRKVTVEDKNGAVETITRPKADAHNPNEIGAPMAGVVVEVRVHENGEVKKGDPIAVLSAMKMEMVISSPVAGRIGQIAVKENDSVDASDLIPKSSRLSKLLMFIILIILY

SEQ ID NO: 10078 - DNA, 3558 bp, Schizosaccharomyces pombe
  CDS (1)..(3558)
atgacttctaaatatgatgcgttgttgcacaatcaaagtaccaacacaaaccctttcagcaagttgcaggatcgttcctccttgttaggagagaagtttaccaaggtgttggtagctaatcgatctgaaattgctattcgtgtcttccgaactgctcatgaactttcgatgcacactgtcgccatttactcgtatgaagacagactgtcgatgcatcgtcaaaaggccgacgaatcctatccaattggcaaggtcggtcagtacagtccagtaggagcttatctggctattgacgaaatcgtcagcatcgccaaacgcaccggtgccaacttggttcatccaggatacggtttcctttccgaaaacgccgaatttgccagaaaggtaaacgaagctggcatgcaatttgtaggcccctcccccgaagtcattgactctcttggtgacaaaacgaaagctcgtgcaatcgccattcgctgtggtgtcccagtcgttcctggtactccaggtcccgtcgaacactatgaagaagctgaggcttttgttaaggaatatggcctccccgttatcatcaaggctgccatgggtggtggtggccgtggtatgcgtgtcgttcgttctgccgataccttgaaggagtcatttgagcgtgctcgttctgaggcccttgcttcatttggtgatggcactgtgttcattgaacgctttttggataaacccaagcatattgagattcaacttatggctgataaggctggaaatgtcattcatttacatgagcgtgattgttccgtacaacgtcgtcatcaaaaggtcgtggagattgctccggccaaagatttggatcctaagatccgtcaagcactttatgacgatgccatcaagattgccaaggaagtgaagtattgcaacgccggtactgcagaattcttgctcgatcaaaaaggacgtcactattttattgagattaatcctcgtattcaggttgaacatacgattactgaggaaattaccggtgtcgatattgtatcggctcagttgcacgttgctgctggttttacccttccagaaattggtttgacccaagataaaattagcactcgcggctttgctattcaatgccgtgttaccactgaggatcctaacaatggctttgctcccgacattggtaagattgaagtttatcgttccgctggtggaaatggtgtccgtttggatggtgctaacggtttcgcgggttctgtcattactcctcattatgactctatgctcgtcaagtgtacatgccatgatgctacatatgaatatacccgtcgtaagatgattcgttcattaatcgagttccgtgtccgtggtgtcaaaaccaacattccttttgttttgcgtttattgatgcacgatacttttatccaaggaaactgttggacaacttttattgatgacactcctgaattgtttcaactttatcgttcccgtaatcgcgctcaaaaacttctggcctacctcggtgatcttgctgtcaacggcagctctattaagggccaaaatggtgagccagctcttaagtcggagattgtcatgcccgttttgttagacagtacaggaaatcaaattgatgtttctcatccatctgaaaaaggttggcgtaaattattgttagacaacggtcctgctgcctttgccaaggctgtgagaaatcacaagcgtggtcttatcatggacaccacttggcgcgatgcccatcaatccttattggctacccgtgttcgtaccattgatctggtaaatattgctccatatacgagccatgcccttgcttccgcttattctttggagatgtggggaggtgccacctttgacgtctctatgcgattccttcatgaatgtccatgggatcgtttgcgtagactccgtaagttggttcctaacattcctttccaaatgcttttacgtggtgccaatggtttatgctattcaagtttgccggataacgttatttactttttctgtgaacaagccaaaaagaacggtatcgatatcttccgtgttttcgatgccttgaacgatgttaataacctttctcttggaattgatgctgccaagcgcgccggcggtgttgttgaggccactatgtgttactctggcgatatgttaaatcccaagaagaagtataaccttgattactatgttaaccttgttgataaaatggttgaaatgggtattcacattttaggtatcaaggatatggctggcgttatgaaacctaaagctgctcgtcttcttatttctgccattcgggagaaacatccagagttacctattcatgttcacacccacgattctgccggtactgctgttgcttccatggctgcggctttggaggcaggagctgacgttgttgatgttgcaactgatagcatgtctggtcttacatcccaacctagctttggcgccgttttggcctctgtcgatggtactgataagcaattggagtttgataacaatcaattacgcgaaattgatagttattgggctcaaatgcgtttgctttactctccgtttgaatctgaaatcaagggtactgactcagatgtgtataaccacgaaattcccggtggtcaattaaccaaccttaaattccaagctacctcccttggattgggcactcaatgggctgaaactaagaaagcgtacattgaagccaataaattgcttggagatattattaaggtcactcccacttcaaaggtggttggtgatttagcccaatttatggttcaaaataaacttagtgctgaggatgttgagaatcgtgcgaccactttggacttccctgcttcagtactcgatttcttccaaggcttaatgggtcaaccatatggcggttttccagagcctttgcgtactaatgtacttaaaggtcgtcgtcaacctttgactgatcgtccaggtaaattccttcctgctgctgatttcgatgctatccgcaaattattgtcagagaagtttggtgtttcttcagattgtgatatcgctgcctacacccaatttcctggtgtctttgaggaatatcgtcaatttgtcgatcgctatggtgatttgaccactgttcctactaaattcttcttatctagacctgaaatgaacgaagaaatgcacgttgaaattgatcaaggtaagactttaatcgttaaatttgtcgctcttggaccattgaaccctcgtactggacaacgtgaagtttatttcgagttgaacggtgagaaccgccatgttactgttgaagataagaaagcagctatagaaactgttaccagacctcgtgctgatcctggtaatcctggacacgttgcagcccccatgagtggaacaattgtcgaaattcgtgttaaggaaggtgcgaaggttaagaagggagatattattgctgttttaagtgctatgaagatggaaattgttattagtgctcctcacagtggtgtgctcaagtctttggccgttgttcagggtgattctgtgaatggtggtgatttgtgtgctgttcttgaacacgagtaa

SEQ ID NO: 10079 - protein, 1185 aa, Schizosaccharomyces pombe
MTSKYDALLHNQSTNTNPFSKLQDRSSLLGEKFTKVLVANRSEIAIRVFRTAHELSMHTVAIYSYEDRLSMHRQKADESYPIGKVGQYSPVGAYLAIDEIVSIAKRTGANLVHPGYGFLSENAEFARKVNEAGMQFVGPSPEVIDSLGDKTKARAIAIRCGVPVVPGTPGPVEHYEEAEAFVKEYGLPVIIKAAMGGGGRGMRVVRSADTLKESFERARSEALASFGDGTVFIERFLDKPKHIEIQLMADKAGNVIHLHERDCSVQRRHQKVVEIAPAKDLDPKIRQALYDDAIKIAKEVKYCNAGTAEFLLDQKGRHYFIEINPRIQVEHTITEEITGVDIVSAQLHVAAGFTLPEIGLTQDKISTRGFAIQCRVTTEDPNNGFAPDIGKIEVYRSAGGNGVRLDGANGFAGSVITPHYDSMLVKCTCHDATYEYTRRKMIRSLIEFRVRGVKTNIPFVLRLLMHDTFIQGNCWTTFIDDTPELFQLYRSRNRAQKLLAYLGDLAVNGSSIKGQNGEPALKSEIVMPVLLDSTGNQIDVSHPSEKGWRKLLLDNGPAAFAKAVRNHKRGLIMDTTWRDAHQSLLATRVRTIDLVNIAPYTSHALASAYSLEMWGGATFDVSMRFLHECPWDRLRRLRKLVPNIPFQMLLRGANGLCYSSLPDNVIYFFCEQAKKNGIDIFRVFDALNDVNNLSLGIDAAKRAGGVVEATMCYSGDMLNPKKKYNLDYYVNLVDKMVEMGIHILGIKDMAGVMKPKAARLLISAIREKHPELPIHVHTHDSAGTAVASMAAALEAGADVVDVATDSMSGLTSQPSFGAVLASVDGTDKQLEFDNNQLREIDSYWAQMRLLYSPFESEIKGTDSDVYNHEIPGGQLTNLKFQATSLGLGTQWAETKKAYIEANKLLGDIIKVTPTSKVVGDLAQFMVQNKLSAEDVENRATTLDFPASVLDFFQGLMGQPYGGFPEPLRTNVLKGRRQPLTDRPGKFLPAADFDAIRKLLSEKFGVSSDCDIAAYTQFPGVFEEYRQFVDRYGDLTTVPTKFFLSRPEMNEEMHVEIDQGKTLIVKFVALGPLNPRTGQREVYFELNGENRHVTVEDKKAAIETVTRPRADPGNPGHVAAPMSGTIVEIRVKEGAKVKKGDIIAVLSAMKMEIVISAPHSGVLKSLAVVQGDSVNGGDLCAVLEHE

SEQ ID NO: 10080 - DNA, 2025 bp, Oryza sativa
  CDS (1)..(2025)
atggcctcccgcctcctcctcctcccccgccgccgcagccgccatggcggcgccagcctcctcctcgcgcggctcctctcctcatcctcctccgaggctggcggtggtggggcggtggagaaggtgcttgtggcgaacaggggggagatcgcgtgcagggtgatgaggacggcgcggaggctcgggatccccaccgtcgcggtctacagcgacgccgaccggggggccctccacgtgcgcgccgccgacgaggccgtccgcctcggcccgccgcccgccagggagagctacctcaacgcctccgccatcgtcgacgccgcgctccgcaccggcgccaaggctatccacccaggatatggttttctttcggagagcgcagatttcgcgcagctctgtaaagccgaggggcttacattcattggaccaccaccatctgctatccgagacatgggcgacaagagtgcttctaagaggatcatgggtgctgctggtgtaccgctcgtcccaggttaccatggggctgaacaagacattgagctgttaaaacttgaagccaataagattgggtatccagttttgatcaagcccacacatggtggagggggcaaggggatgagaatagttcaaaggcctgaggactttgtggattctgtattgagtgctcaacgagaagccgcagcatcatttggcataaacacgctgctggttgagaagtatattacccaacccagacatatagaagtccagatatttggagatcaacatggaaatgtgattcacctttatgagagagattgtagtctacaaagaaggcaccaaaagattatcgaggaagctccagctccaaatgtgacagctcagtttcggtctcatattggtgaagctgctgtatcagctgcaaaggcagttggttactacagtgctggaacagtggagtttatcgtggatactctttccggagaattctatttcatggaaatgaatactcggctccaggttgaacacccagtgaccgagatgatcgttggccaagatcttgttgagtggcaaatacgaattgcaaatggagagtgcctaccattatctcaggagcaggttccgttaaatggacatgcgtttgaagcccgaatatacgcagaaaatgtgccaaggggatttcttcctgctacaggaaccttacaccactacaggccagttccctctaccgcaacagtaagagttgaaactggagttgaagaaggagatactgtcagcatgcattatgatcccatgatagccaaacttgtggtttggggtgaaagtcgcaatgctgcgctagtcaagctaaagaacagcctgtcaaactttcagattgcaggtttgccgaccaatgttggtttcctccaagaactcgcaggtcatagtgcctttgaaaaaggcctagtcgatacacatttcattgaacgctatcaaaatgatcttctgagtacttctactcaagccttgagtggatcacatgaagcagaagagcttggtgcaattttggctgctgcctgcatttgcaagaaggatcatgtttcctctgaagtgtcacttcatgataagaaactttctatgtggtacgcccatccacctttcaggatgcatcattttgccaagcgtctaatggaatttgagttggatagagaacttggtggatcaagtgatgatcttcttaaactgtcggtaacatatagatctgacggaacctacttcgttgagactgaagatggttcttctcctggattggatgtcaaagtagatagcagaggtgaccatgatttccgggttgatgttggtgggctgcaaacagacgtaactctagcattttattcaaaggtaaatttgatacttcactatggtggtagtgagcatattcatcagttacttctgactgtaataccctccttaaatttctttcctctgcttctttcaggacaattgcaaccatatacacatctggcatgggaagcatcatcatcattacaggcagacgttgagagctga

SEQ ID NO: 10081 - protein, 674 aa, Oryza sativa
MASRLLLLPRRRSRHGGASLLLARLLSSSSSEAGGGGAVEKVLVANRGEIACRVMRTARRLGIPTVAVYSDADRGALHVRAADEAVRLGPPPARESYLNASAIVDAALRTGAKAIHPGYGFLSESADFAQLCKAEGLTFIGPPPSAIRDMGDKSASKRIMGAAGVPLVPGYHGAEQDIELLKLEANKIGYPVLIKPTHGGGGKGMRIVQRPEDFVDSVLSAQREAAASFGINTLLVEKYITQPRHIEVQIFGDQHGNVIHLYERDCSLQRRHQKIIEEAPAPNVTAQFRSHIGEAAVSAAKAVGYYSAGTVEFIVDTLSGEFYFMEMNTRLQVEHPVTEMIVGQDLVEWQIRIANGECLPLSQEQVPLNGHAFEARIYAENVPRGFLPATGTLHHYRPVPSTATVRVETGVEEGDTVSMHYDPMIAKLVVWGESRNAALVKLKNSLSNFQIAGLPTNVGFLQELAGHSAFEKGLVDTHFIERYQNDLLSTSTQALSGSHEAEELGAILAAACICKKDHVSSEVSLHDKKLSMWYAHPPFRMHHFAKRLMEFELDRELGGSSDDLLKLSVTYRSDGTYFVETEDGSSPGLDVKVDSRGDHDFRVDVGGLQTDVTLAFYSKVNLILHYGGSEHIHQLLLTVIPSLNFFPLLLSGQLQPYTHLAWEASSSLQADVES

SEQ ID NO: 10082 - DNA, 1611 bp, Brassica napus
  CDS (1)..(1611)
atggacgcctcaatgattactaattgcaaatccactgcctcccttccctctttgttcctggggaggtcgggaggtagcattagaagttcccagtgtaatgtcatgatggggaaagccattaccttcccgagccaaaagactcagactttgaaggttagccggaagaacgtgaataggaggtgtggtggtggtgcgcttggtgctacttgcagtactggggataagattcttgtggctaacagaggtgaaattgctgtccgtgtgatccgaactgctcatgaaatggggattccttgtgttgctgtttactcaaccattgacaaggatgcattgcatgtcaaattggctgatgaggctgtttgtattggtgaagctcctagcaaccagtcgtatttggtgataccgaatgttctgtcagctgcaattagccgaggatgcacaatgcttcatcctggatatggattcctttcagagaacgctctttttgttgagatgtgcagagagcacaggatcaactttattggaccaaatcctgatagcatccgtgtcatgggtgacaaatcaactgccagggagacgatgaagaatgcaggtgtcccaactgtaccagggagtgatggactattaaagagcacagaagaaggagtcaagctcgccaatgagattgggttccctgtgatgatcaaggcaacagctggtggtggtggacgtggaatgcgtcttgctaatgaaccgtcagagtttgtgaaactgctgcaggcagcaaagagtgaggccgcggctgcttttggaaatgatggagtttatctggagaagtacgtccaaaatccccgccatattgagttccagattcttgcagataaatttggaaatgttgtgcacttcggcgagcgtgactgcagcatccagagacggaaccaaaagttgctggaagaagcaccttctcctgcactgacccctgagttgcgaaaagccatgggtgatgcagctgttgcagcagcagcgtcgattggctacgttggtgttggtaccgtggagttccttttggatgagagaggttccttctatttcatggaaatgaacactagaatccaggtggagcatcctgtgacagagatgatttactctgttgatttgattgaagaacagattcgtgttgcaatgggagagaaactgcgttatacacaggatgagattgtgcttagaggacactctattgaatgtcgtatcaatgcagaggacccattcaaaggattcagacctggacctggaagaataacatcatatctgccatctggaggtccttttgttagaatggatagtcatgtgtatcccgactatgttgttcctccaagctatgactctcttcttggaaagcttattgtatgggctccaacgagggaaagggcaattgagcggatgaaacgtgcacttaatgacactattattacaggggttcccaccaccattgagtaccacaagcttatccttgaagttgaggatttcaaaaacggaaaagttgatacagctttcatccccaagcatgaagaggaattagcagagcctcatgaaattgtaccagtgaaagatttgacaaatgtagctgcttag

SEQ ID NO: 10083 - protein, 536 aa, Brassica napus
MDASMITNCKSTASLPSLFLGRSGGSIRSSQCNVMMGKAITFPSQKTQTLKVSRKNVNRRCGGGALGATCSTGDKILVANRGEIAVRVIRTAHEMGIPCVAVYSTIDKDALHVKLADEAVCIGEAPSNQSYLVIPNVLSAAISRGCTMLHPGYGFLSENALFVEMCREHRINFIGPNPDSIRVMGDKSTARETMKNAGVPTVPGSDGLLKSTEEGVKLANEIGFPVMIKATAGGGGRGMRLANEPSEFVKLLQAAKSEAAAAFGNDGVYLEKYVQNPRHIEFQILADKFGNVVHFGERDCSIQRRNQKLLEEAPSPALTPELRKAMGDAAVAAAASIGYVGVGTVEFLLDERGSFYFMEMNTRIQVEHPVTEMIYSVDLIEEQIRVAMGEKLRYTQDEIVLRGHSIECRINAEDPFKGFRPGPGRITSYLPSGGPFVRMDSHVYPDYVVPPSYDSLLGKLIVWAPTRERAIERMKRALNDTIITGVPTTIEYHKLILEVEDFKNGKVDTAFIPKHEEELAEPHEIVPVKDLTNVAA

SEQ ID NO: 10084 - DNA, 1608 bp, Brassica napus
  CDS (1)..(1608)
atggacgcctcaatgattactaattgcaaatccactgcctcccttccctctttgttcctggggagatcgggaggtagtcttagaagctcccagtgtaatgtcatgatggggaaaaccattaccttcccgagccaaaagactcagactttgaaggttagccggaagaacgtgaataggaggtgtggtggtggtgcgcttggtgctacctgcagtggggataagattcttgtggctaacagaggtgaaattgctgtccgtgtgatccgaactgctcatgagatggggattccttgtgttgctgtttactcaaccatcgacaaggatgcattgcatgtcaaattggctgatgaggctgtttgtattggtgaagctcctagcaaccagtcgtatttggtgataccgaatgttctgtcagctgcaatcagccgaggatgcacaatgcttcatcctggatatggattcctttcagagaacgctctttttgttgagatgtgcagagagcacaggatcaactttattggaccaaatcctgatagcatccgtgtcatgggtgacaaatcaactgccagggagacgatgaagaatgcaggtgtcccaactgtaccagggagtgatggactattaaagagcacagaagaaggagtcaagctcgccaatgagattgggttccctgtgatgatcaaggcaacagctggtggtggtggacgtggaatgcgtcttgctaatgaaccgtcagagtttgtgaaactgctgcaggcagcaaagagtgaggccgcggctgcttttggaaatgatggagtttatctggagaagtacgtccaaaatccccgccatattgagttccagattcttgcagataaatttggaaatgttgtgcacttcggcgagcgtgactgcagcatccagagacggaaccaaaagttgctggaagaagcaccttctcctgcactgacccctgagttgcgaaaagccatgggtgatgcagctgttgcagcagcagcgtcgattgggtacgttggtgttggtaccgtggagttccttttggatgagagaggttccttctatttcatggaaatgaacactagaatccaggtggagcatcctgtgacagagatgatttactctgttgatttgattgaagaacagattcgtgttgctatgggagagaaactgcgttatacacaggatgagattgtgcttagaggacactctattgaatgtcgtatcaatgcagaggacccatttaaaggattcagacctggacccggaagaataacatcatatctgccatctggaggtccctttgtcagaatggatagtcatgtgtatcccgactatgttgttcctccaagctatgactctcttcttggaaagcttattgtatgggctccaacgagggaaagggcaattgagcggatgaaacgtgcacttaatgacactattattacaggggttcccaccaccattgagtaccacaaacttatccttgaagttgaggatttcaagaacggaaaagttgacactgctttcatccccaagcatgaggaggaattagcagagcctcatgaaattgtgctagtgaaagatttgacaaacgcagctgcttag

SEQ ID NO: 10085 - protein, 535 aa, Brassica napus
MDASMITNCKSTASLPSLFLGRSGGSLRSSQCNVMMGKTITFPSQKTQTLKVSRKNVNRRCGGGALGATCSGDKILVANRGEIAVRVIRTAHEMGIPCVAVYSTIDKDALHVKLADEAVCIGEAPSNQSYLVIPNVLSAAISRGCTMLHPGYGFLSENALFVEMCREHRINFIGPNPDSIRVMGDKSTARETMKNAGVPTVPGSDGLLKSTEEGVKLANEIGFPVMIKATAGGGGRGMRLANEPSEFVKLLQAAKSEAAAAFGNDGVYLEKYVQNPRHIEFQILADKFGNVVHFGERDCSIQRRNQKLLEEAPSPALTPELRKAMGDAAVAAAASIGYVGVGTVEFLLDERGSFYFMEMNTRIQVEHPVTEMIYSVDLIEEQIRVAMGEKLRYTQDEIVLRGHSIECRINAEDPFKGFRPGPGRITSYLPSGGPFVRMDSHVYPDYVVPPSYDSLLGKLIVWAPTRERAIERMKRALNDTIITGVPTTIEYHKLILEVEDFKNGKVDTAFIPKHEEELAEPHEIVLVKDLTNAAA

SEQ ID NO: 10086 - DNA, 2205 bp, Glycine max
  CDS (1)..(2205)
atggcttctctggcgttgctccgcagaaagcttatcatcaccagaaccacactctcccactcgcacgtgcgcgcacgagccttctccgagggaaagagcagcaacaaacaccgcatcgagaagattctagtagccaaccgcggcgaaatcgcttgcaggatcacgcggaccgcgcggaggctcggcattcaaaccgtcgccgtttacagcgacgccgacagggattcgctccacgtggcaaccgccgacgaggccattcgaatcggaccgccgccggcgcggctcagttacttgaacggagcctccatcgtcgacgccgcaattcgctccggcgcgcaggctattcaccctgggtatggattcttgtcggagagtgctgacttcgccaagctctgtgaggagagtggtctcacttttatagggcctcctgcgtctgctattcgagatatgggtgacaagagtgcatccaagagaataatgggagctgcaggtgtgcctcttgtacctggatatcacggagatgatcaagatattgaaaaaatgaagttggaagctgatagaattggatatccagtcctgattaagccaactcatggtggcggtggaaagggaatgaggattgtacacgctccagatgagtttgttgaatccttcttagcagcacaacgggaagcagctgcttcttttggcgtcaacacaatattgttggagaagtatattacacggccaagacacatagaagtccagatatttggggataagcatgggaatgttctgcatttgtatgagcgagattgcagtgtgcagagaagacaccaaaaaataattgaagaagctccagctccaaacatttctgctgactttcgtgcacaattgggtgtagccgctgtttcagctgcaaaggcagttaattattacaatgctgggactgtggagtttatagttgatacagtctctgatgaattttactttatggagatgaatacacgtcttcaggttgagcatcctgttacagaaatgattgttggtcaggatcttgttgaatggcaaatccttgttgccaatggagaagctcttccattgagtcaatcacaagtacccttatcaggtcatgcttttgaagctcgaatctatgctgaaaatgttcaaaaagggtttcttccagcaactggagttctacaccattatcatgttccagtctcatctgcagtccgagtggagactggagtaaaagaaggagacaaagttagcatgcactatgatcctatgattgctaagcttgtggtgtggggagaaaatcgtgctgctgccttggtcaaactcaaggatagtctgtcaaagtttcaggttgcaggtctgccaaccaatgtcaactttcttcaaaagcttgctaatcacagggcatttgcaaatggcaatgtggagactcattttattgataactacaaagaagacctctttgttgatgctaacaattcagtgtctgtgaaagaagcatatgaagctgctagacttaatgcatccctggtggccgcatgcctcattgaaaaagagcatttcatattggctagaaatccacctggcttgctccctatatggtattcttctccacctttcagaatccatcatcaagctaagcgtagaatggaacttgagtgggataatgaatatggtagcggtagctcaaagatcatgaagcttaccatcacttatcagcctgatgggagatacctaattgagacaggagaaaatggatctcctgttttagaagtgaaagcaacatatgtaaaagataactattttagagttgaagctgctggtgtaatcaatgatgttaatgtagctgtttactcaaaggatcaaataaggcatattcatatttggcaagggtcctgtcatcattatttcagagagaaactaggcctggagctgtctgaggatgaagaatcccaacataaacccaaagttgaaacatcagccaaccctcaagggacagttgtagcacccatggcaggcttggtagttaaggttctagtggagaacaagacaagagtggaggaaggacaacctgtgttagtattggaagcaatgaagatggagcatgttgtaaaggcaccttcttctggctatgtgcatgggcttcaacttatggtgggtgaacaggtttcagatggcagtgttcttttcagtgtaaaggatcaataa

SEQ ID NO: 10087 - protein, 734 aa, Glycine max
MASLALLRRKLIITRTTLSHSHVRARAFSEGKSSNKHRIEKILVANRGEIACRITRTARRLGIQTVAVYSDADRDSLHVATADEAIRIGPPPARLSYLNGASIVDAAIRSGAQAIHPGYGFLSESADFAKLCEESGLTFIGPPASAIRDMGDKSASKRIMGAAGVPLVPGYHGDDQDIEKMKLEADRIGYPVLIKPTHGGGGKGMRIVHAPDEFVESFLAAQREAAASFGVNTILLEKYITRPRHIEVQIFGDKHGNVLHLYERDCSVQRRHQKIIEEAPAPNISADFRAQLGVAAVSAAKAVNYYNAGTVEFIVDTVSDEFYFMEMNTRLQVEHPVTEMIVGQDLVEWQILVANGEALPLSQSQVPLSGHAFEARIYAENVQKGFLPATGVLHHYHVPVSSAVRVETGVKEGDKVSMHYDPMIAKLVVWGENRAAALVKLKDSLSKFQVAGLPTNVNFLQKLANHRAFANGNVETHFIDNYKEDLFVDANNSVSVKEAYEAARLNASLVAACLIEKEHFILARNPPGLLPIWYSSPPFRIHHQAKRRMELEWDNEYGSGSSKIMKLTITYQPDGRYLIETGENGSPVLEVKATYVKDNYFRVEAAGVINDVNVAVYSKDQIRHIHIWQGSCHHYFREKLGLELSEDEESQHKPKVETSANPQGTVVAPMAGLVVKVLVENKTRVEEGQPVLVLEAMKMEHVVKAPSSGYVHGLQLMVGEQVSDGSVLFSVKDQ

SEQ ID NO: 10088 - DNA, 2199 bp, Glycine max
  CDS (1)..(2199)
atggcttctctggcgttgctccgcagaaagcttatcatcaccagaaccacactctcctactcgcacgtgcgcgcacgagccttctccgcgggaaacaacaaacaccgcatcgagaagattctagtagccaaccgcggcgaaatcgcttgcaggatcacgcggaccgcgcggaggctcggcattcaaaccgtcgccgtttacagcgacgccgacagggattcgctccacgtggcaaccgccgacgaggccattcgaatcggaccgccgccggcgcggctcagttacttgaacggagcctccatcgtcgacgccgcaattcgctccggcgcgcaggctattcaccctgggtatggattcttgtcggagagtgctgacttcgccaagctctgtgaggagagtggtctcacttttatagggcctcctgcgtctgctattcgagatatgggtgacaagagtgcatcgaagagaataatgggagctgcaggtgtgcctcttgtacctggatatcacggatatgatcaagatattgaaaaaatgaagttggaagctgatagaattggatatccagtcctaattaagccaactcatggtggaggtggaaagggtatgaggattgtacacactccagatgagtttgttgaatccttcttagctgcacaacgggaagcagctgcttcttttggcgtcaacacaatattgttggagaagtatattacacggccaagacacatagaagtccagatatttggcgataagcatgggaatgttctgcatttgtatgagcgagattgcagtgttcagagaagacaccaaaaaataattgaagaagctccagctccaaacatttctgctgactttcgtgcacaattgggtgtagccgctgtttcagctgcaaaggcagttaattattacaatgctgggactgtggagtttatagttgatacagtctctgatgaattttactttatggagatgaatacacgtcttcaggttgagcatcctgttacagaaatgattgttggtcaggatcttgttgaatggcaaatccttgttgccaatggagaagctcttccattgagtcaatcacaagtacccttatcaggtcatgcttttgaagctcgaatctatgctgaaaatgttcaaaaagggtttcttccagcaactggagttctacaccattatcatgttccagtctcatctgcagtccgagtggagactggagttaaagaaggagacaaagttagcatgcactatgatcctatgattgctaagcttgtggtgtggggagaaaatcgtgctgctgccttggtcaaactcaaggatagtctgtcaaagtttcaggttgcaggtctgccaaccaatgtcaactttcttcaaaagcttgctaatcacagggcatttgcaaatggcaatgtggagactcattttattgataactacaaagaagacctctttgttgatgctaacaattcagtgtctgtgaaagaagcatatgaagctgctagacttaatgcatccctggtggccgcatgcctcattgaaaaagagcatttcatattggctagaaatccacctggcttgctccctatatggtattcttctccacctttcagaatccatcatcaagctaagcgtagaatggaacttgagtgggataatgaatatggtagtggtagctcaaagatcatgaagcttaccatcacttatcagcctgatgggagatacctaattgagacaggacaaaatggatctcctgttttagaagtgaaatcaacatatgtaaaagataactattttagagttgaagctgctggtgtaatcaatgatgttaatgtagctgtttattcaaaggatcaaataaggcatattcatatttggcaagggtcctgtcatcattatttcagagagaaactaggcctggagctgtctgaggatgaagaatcccaacataaacccaaagttgaaacatcagccaaccctcaagggacagttgtagcacccatggcaggcttggtagttaaggttctagtggagaacaagacaagagtggaggaaggacaacctgtgttagtattggaagcaatgaagatggagcatgttgtaaaggcaccttcttctggctatgtgcatgggcttcaacttatggtgggtgaacaggtttcagatggcagtgttcttttcagtgtaaaggatcaataa

SEQ ID NO: 10089 - protein, 732 aa, Glycine max
MASLALLRRKLIITRTTLSYSHVRARAFSAGNNKHRIEKILVANRGEIACRITRTARRLGIQTVAVYSDADRDSLHVATADEAIRIGPPPARLSYLNGASIVDAAIRSGAQAIHPGYGFLSESADFAKLCEESGLTFIGPPASAIRDMGDKSASKRIMGAAGVPLVPGYHGYDQDIEKMKLEADRIGYPVLIKPTHGGGGKGMRIVHTPDEFVESFLAAQREAAASFGVNTILLEKYITRPRHIEVQIFGDKHGNVLHLYERDCSVQRRHQKIIEEAPAPNISADFRAQLGVAAVSAAKAVNYYNAGTVEFIVDTVSDEFYFMEMNTRLQVEHPVTEMIVGQDLVEWQILVANGEALPLSQSQVPLSGHAFEARIYAENVQKGFLPATGVLHHYHVPVSSAVRVETGVKEGDKVSMHYDPMIAKLVVWGENRAAALVKLKDSLSKFQVAGLPTNVNFLQKLANHRAFANGNVETHFIDNYKEDLFVDANNSVSVKEAYEAARLNASLVAACLIEKEHFILARNPPGLLPIWYSSPPFRIHHQAKRRMELEWDNEYGSGSSKIMKLTITYQPDGRYLIETGQNGSPVLEVKSTYVKDNYFRVEAAGVINDVNVAVYSKDQIRHIHIWQGSCHHYFREKLGLELSEDEESQHKPKVETSANPQGTVVAPMAGLVVKVLVENKTRVEEGQPVLVLEAMKMEHVVKAPSSGYVHGLQLMVGEQVSDGSVLFSVKDQ

SEQ ID NO: 10090 - DNA, 2256 bp, Zea mays
  CDS (1)..(2256)
atggcctcccgcctcctcctccacctccacctgcgccgccgcgggcgcgggatcccgggctgccccgtgcccgcgctacccctccacgccgcgcggctcctctcctcctccccaccaaccgcagctgcggcctcgtcgtcggcggcgggcggcgggggcatcgagaaggtgctggtggcgaaccggggcgagatcgcgtgccgggtcatgcgcaccgcgcgccgcctcggggtcgccaccgtggccgtgtacagcgacgccgaccgcggggcgctgcacgtgcgcgccgccgacgaggccgtcaggatcggcccgccgcccgcgcgggagagctacctcaacgccagggccatcatcgaggccgccctccgcaccggcgcccaggctatccacccgggatacggtttcctttcagagagtgctgatttcgcgcagctctgtgaagccgaggggctcaaattcattggaccaccagcatctgcaatccgagacatgggcgataagagtgcatccaagaggatcatgggtgctgctggcgtgccgctggttccagggtaccatggggctgaccaggacgttgagctgttgaaactcgaagcggataaaatcggttatcctgttttaatcaaacccacccatggtggagggggcaaggggatgagaatagtcgaaaggcctgatgaatttgtggattctgtactgagcgctcaacgggaagctgcagcatcgtttggtgtaaacacactattgattgagaagtatattactcaaccaagacacgtagaagtccaggtatttggcgaccaacatggaaatgcgatatacctttatgagagagactgcagtctacagagaaggcatcagaagatcatcgaggaagctccagctccaaatgtgccagctgagtttcggtctcatattggtggagctgctgtatctgcagcaaaggcagttggttactacaatgctggaacagtggagtttattgtggacactctttctggagagttctacttcatggagatgaatactcgactccaggttgaacacccagtgacagagatgattgttggtcaagatcttgtggagtggcaaatacgtgttgcgaatggagaacgactaccattatctcaggagcaggttccattaaatggacatgcatttgaagcacggatatatgctgaaaatgttccaagagggtttctccctgcaacaggaaccttacatcactaccgaccagtcccttctgacccaactgtaagagttgaaactggagtcgaagaaggagataccgtcagcatgcattatgatccaatgatagccaaacttgtagtatggggtgaaagtcgcacggctgcactagtcaagctaaagaagtgtttatcaacctttcagattgcaggtttgccaaccaatgttgatttcctccaagaactcgcaagccacagtgcctttgaaaaaggcctagttgacactcacttcattgaacgttataaagatgaccttttgagtatttctacaaagtcctcaaaagaatctcatggtgtagctgagcttggtgcaattttggctgctgcatgcatttgcaagaaggaacacattacatctaaagaatcactacgagccaacaagtcactatctgtatggtacaataatccacctttcaggatgcatcactttgctaggcatcccctggatcttgagttggaagagaatgatggattcagtgagaaacttcttaaactgttcattactcataagtttgatggaagctacttcatcgagacagaagatggcacttctggtttagatgtcaaagttgatcacaagggtgaccacgattttcgtgtggatgtttctggtctgcaaactgatgtgactctagcatcttattcaaagggaaacagcaaacacatacatgtctggcatgggaatcatcaccaccattacagacagactgtaagagctgagcatgcagttgaagatagctcccaacctagtcatgcttctgaagggaagtcgcatccaaaagggagtgttctggcaccgatggctggcttggttgtgaaagttttgcttgaagacggggctcaggtggacgcagggcagcctgtcatggttatggaagcaatgaagatggagcatgttgtgaaggcgcctcgtgccggatacgtgagtggcctgaaggttactgcaggccaacaagtttttgactccagtgtccttttcacaatcaaggacagctctgcaaactga

SEQ ID NO: 10091 - protein, 751 aa, Zea mays
MASRLLLHLHLRRRGRGIPGCPVPALPLHAARLLSSSPPTAAAASSSAAGGGGIEKVLVANRGEIACRVMRTARRLGVATVAVYSDADRGALHVRAADEAVRIGPPPARESYLNARAIIEAALRTGAQAIHPGYGFLSESADFAQLCEAEGLKFIGPPASAIRDMGDKSASKRIMGAAGVPLVPGYHGADQDVELLKLEADKIGYPVLIKPTHGGGGKGMRIVERPDEFVDSVLSAQREAAASFGVNTLLIEKYITQPRHVEVQVFGDQHGNAIYLYERDCSLQRRHQKIIEEAPAPNVPAEFRSHIGGAAVSAAKAVGYYNAGTVEFIVDTLSGEFYFMEMNTRLQVEHPVTEMIVGQDLVEWQIRVANGERLPLSQEQVPLNGHAFEARIYAENVPRGFLPATGTLHHYRPVPSDPTVRVETGVEEGDTVSMHYDPMIAKLVVWGESRTAALVKLKKCLSTFQIAGLPTNVDFLQELASHSAFEKGLVDTHFIERYKDDLLSISTKSSKESHGVAELGAILAAACICKKEHITSKESLRANKSLSVWYNNPPFRMHHFARHPLDLELEENDGFSEKLLKLFITHKFDGSYFIETEDGTSGLDVKVDHKGDHDFRVDVSGLQTDVTLASYSKGNSKHIHVWHGNHHHHYRQTVRAEHAVEDSSQPSHASEGKSHPKGSVLAPMAGLVVKVLLEDGAQVDAGQPVMVMEAMKMEHVVKAPRAGYVSGLKVTAGQQVFDSSVLFTIKDSSAN

SEQ ID NO: 10092 - DNA, 24 bp, Artificial sequence
  primer
atgctggataaaattgttattgcc

SEQ ID NO: 10093 - DNA, 26 bp, Artificial sequence
  primer
ttatttttcctgaagaccgagttttt

SEQ ID NO: 10094 - protein, 568 aa, Artificial sequence
  consensus sequence
  Variant (2)..(2): Xaa in position 2 is any amino acid
  Variant (5)..(5): Xaa in position 5 is any amino acid
  Variant (11)..(11): Xaa in position 11 is any amino acid
  Variant (13)..(14): Xaa in position 13 to 14 is any amino acid
  Variant (16)..(24): Xaa in position 16 to 24 is any amino acid
  Variant (25)..(35): Xaa in position 25 to 35 is any or no amino acid
  Variant (38)..(39): Xaa in position 38 to 39 is any amino acid
  Variant (41)..(42): Xaa in position 41 to 42 is any amino acid
  Variant (44)..(47): Xaa in position 44 to 47 is any amino acid
  Variant (49)..(51): Xaa in position 49 to 51 is any amino acid
  Variant (54)..(58): Xaa in position 54 to 58 is any amino acid
  Variant (60)..(63): Xaa in position 60 to 63 is any amino acid
  Variant (64)..(73): Xaa in position 64 to 73 is any or no amino acid
  Variant (76)..(83): Xaa in position 76 to 83 is any amino acid
  Variant (85)..(89): Xaa in position 85 to 89 is any amino acid
  Variant (90)..(92): Xaa in position 90 to 92 is any or no amino acid
  Variant (94)..(94): Xaa in position 94 is any amino acid
  Variant (105)..(106): Xaa in position 105 to 106 is any amino acid
  Variant (108)..(117): Xaa in position 108 to 117 is any amino acid
  Variant (118)..(119): Xaa in position 118 to 119 is any or no amino acid
  Variant (121)..(121): Xaa in position 121 is any amino acid
  Variant (124)..(131): Xaa in position 124 to 131 is any amino acid
  Variant (133)..(133): Xaa in position 133 is any amino acid
  Variant (135)..(144): Xaa in position 135 to 144 is any amino acid
  Variant (148)..(149): Xaa in position 148 to 149 is any amino acid
  Variant (152)..(154): Xaa in position 152 to 154 is any amino acid
  Variant (155)..(193): Xaa in position 155 to 193 is any or no amino acid
  Variant (195)..(195): Xaa in position 195 is any amino acid
  Variant (197)..(199): Xaa in position 197 to 199 is any amino acid
  Variant (202)..(203): Xaa in position 202 to 203 is any amino acid
  Variant (208)..(208): Xaa in position 208 is any amino acid
  Variant (210)..(212): Xaa in position 210 to 212 is any amino acid
  Variant (213)..(228): Xaa in position 213 to 228 is any or no amino acid
  Variant (231)..(231): Xaa in position 231 is any amino acid
  Variant (232)..(233): Xaa in position 232 to 233 is any or no amino acid
  Variant (235)..(238): Xaa in position 235 to 238 is any amino acid
  Variant (239)..(243): Xaa in position 239 to 243 is any or no amino acid
  Variant (245)..(250): Xaa in position 245 to 250 is any amino acid
  Variant (251)..(251): Xaa in position 251 is any or no amino acid
  Variant (254)..(254): Xaa in position 254 is any amino acid
  Variant (256)..(256): Xaa in position 256 is any amino acid
  Variant (258)..(260): Xaa in position 258 to 260 is any amino acid
  Variant (262)..(262): Xaa in position 262 is any amino acid
  Variant (263)..(263): Xaa in position 263 is any or no amino acid
  Variant (265)..(268): Xaa in position 265 to 268 is any amino acid
  Variant (270)..(270): Xaa in position 270 is any amino acid
  Variant (276)..(276): Xaa in position 276 is any amino acid
  Variant (280)..(280): Xaa in position 280 is any amino acid
  Variant (283)..(284): Xaa in position 283 to 284 is any amino acid
  Variant (287)..(287): Xaa in position 287 is any amino acid
  Variant (289)..(289): Xaa in position 289 is any amino acid
  Variant (290)..(300): Xaa in position 290 to 300 is any or no amino acid
  Variant (302)..(304): Xaa in position 302 to 304 is any amino acid
  Variant (305)..(316): Xaa in position 305 to 316 is any or no amino acid
  Variant (318)..(319): Xaa in position 318 to 319 is any amino acid
  Variant (323)..(323): Xaa in position 323 is any amino acid
  Variant (326)..(332): Xaa in position 326 to 332 is any amino acid
  Variant (333)..(345): Xaa in position 333 to 345 is any or no amino acid
  Variant (348)..(348): Xaa in position 348 is any amino acid
  Variant (350)..(350): Xaa in position 350 is any amino acid
  Variant (352)..(352): Xaa in position 352 is any amino acid
  Variant (354)..(354): Xaa in position 354 is any amino acid
  Variant (363)..(365): Xaa in position 363 to 365 is any amino acid
  Variant (367)..(367): Xaa in position 367 is any amino acid
  Variant (369)..(372): Xaa in position 369 to 372 is any amino acid
  Variant (374)..(376): Xaa in position 374 to 376 is any amino acid
  Variant (378)..(378): Xaa in position 378 is any amino acid
  Variant (380)..(381): Xaa in position 380 to 381 is any amino acid
  Variant (383)..(384): Xaa in position 383 to 384 is any amino acid
  Variant (385)..(408): Xaa in position 385 to 408 is any or no amino acid
  Variant (410)..(417): Xaa in position 410 to 417 is any amino acid
  Variant (418)..(428): Xaa in position 418 to 428 is any or no amino acid
  Variant (430)..(430): Xaa in position 430 is any amino acid
  Variant (433)..(433): Xaa in position 433 is any amino acid
  Variant (438)..(438): Xaa in position 438 is any amino acid
  Variant (439)..(441): Xaa in position 439 to 441 is any or no amino acid
  Variant (443)..(443): Xaa in position 443 is any amino acid
  Variant (445)..(446): Xaa in position 445 to 446 is any amino acid
  Variant (448)..(448): Xaa in position 448 is any amino acid
  Variant (449)..(485): Xaa in position 449 to 485 is any or no amino acid
  Variant (487)..(487): Xaa in position 487 is any amino acid
  Variant (489)..(493): Xaa in position 489 to 493 is any amino acid
  Variant (494)..(494): Xaa in position 494 is any or no amino acid
  Variant (496)..(501): Xaa in position 496 to 501 is any amino acid
  Variant (502)..(504): Xaa in position 502 to 504 is any or no amino acid
  Variant (507)..(510): Xaa in position 507 to 510 is any amino acid
  Variant (511)..(521): Xaa in position 511 to 521 is any or no amino acid
  Variant (523)..(529): Xaa in position 523 to 529 is any amino acid
  Variant (531)..(532): Xaa in position 531 to 532 is any amino acid
  Variant (534)..(539): Xaa in position 534 to 539 is any amino acid
  Variant (542)..(547): Xaa in position 542 to 547 is any amino acid
  Variant (549)..(550): Xaa in position 549 to 550 is any amino acid
  Variant (551)..(552): Xaa in position 551 to 552 is any or no amino acid
  Variant (554)..(566): Xaa in position 554 to 566 is any amino acid
  Variant (567)..(567): Xaa in position 567 is any or no amino acid
LXANXRGEIAXRXXRXXXXXXXXXXXXXXXXXXXXVAXXSXXDXXXXHXXXADXXXXXGXXXXXXXXXXXXXXYLXXXXXXXXAXXXXXXXXAXHPGYGFLSENXXFXXXXXXXXXXXXFXGPXXXXXXXXGXKXXXXXXXXXXGVPXXPGXXXXXXXXXXXXXXXXXXXXXXXXXXXXXXXXXXXXXXXXXXGXPXXXKAXXGGGGXGXXXXXXXXXXXXXXXXXXXEAXXXFXXXXXXXXXEXXXXXXXRHXEXQXXXDXXGXXXXLXERDCSXQRRXQKXXEEXPXXXXXXXXXXXXRXXXXXXXXXXXXXXXYXXAGTXEFXXXXXXXXXXXXXXXXXXXXYFXEXNXRXQVEHPVTEXXXGXDXXXXQXXXAXGXXLXXXXXXXXXXXXXXXXXXXXXXXXXXQXXXXXXXXXXXXXXXXXXXEXRIXAEDPXXXXFXPXXGXXXXXXXXXXXXXXXXXXXXXXXXXXXXXXXXXXXXXXRXDXXXXXXGXXXXXXXXXYDXXXXXXXXXXXXXXXKXXXXXXXRXXAXXXXXXALXXXXXXGXXXXTXXXXXXXXXXXXXXF

SEQ ID NO: 10095 - protein, 18 aa, Artificial sequence
  protein pattern
  Variant (2)..(2): Xaa in position 2 is Ile, Leu or Met
  Variant (4)..(4): Xaa in position 4 is Leu, Met or Val
  Variant (6)..(6): Xaa in position 6 is Pro or Thr
  Variant (8)..(8): Xaa in position 8 is Ile, Leu or Val
  Variant (13)..(14): Xaa in position 13 to 14 is any or no amino acid
  Variant (16)..(17): Xaa in position 16 to 17 is any or no amino acid
FXEXNXRXQVEHXXTXXE

SEQ ID NO: 10096 - protein, 20 aa, Artificial sequence
  protein pattern
  Variant (2)..(2): Xaa in position 2 is any amino acid
  Variant (3)..(3): Xaa in position 3 is Ala, Asp, Glu, Gly, Ser or Thr
  Variant (5)..(5): Xaa in position 5 is Asp or Glu
  Variant (8)..(8): Xaa in position 8 is any amino acid
  Variant (11)..(12): Xaa in position 11 to 12 is any amino acid
  Variant (15)..(15): Xaa in position 15 is Ile, Leu or Val
  Variant (16)..(16): Xaa in position 16 is any amino acid
  Variant (18)..(18): Xaa in position 18 is any amino acid
  Variant (19)..(19): Xaa in position 19 is Ala, Cys, Gly, Ser, Thr or Val
LXXRXCSXQRXXQKXXEXXP

SEQ ID NO: 10097 - protein, 24 aa, Artificial sequence
  protein pattern
  Variant (2)..(2): Xaa in position 2 is Ile, Leu or Val
  Variant (5)..(8): Xaa in position 5 to 8 is any amino acid
  Variant (9)..(9): Xaa in position 9 is Ile, Leu or Met
  Variant (10)..(11): Xaa in position 10 to 11 is any amino acid
  Variant (12)..(12): Xaa in position 12 is Phe, Ile, Leu, Met or Val
  Variant (14)..(14): Xaa in position 14 is any amino acid
  Variant (16)..(17): Xaa in position 16 to 17 is any amino acid
  Variant (18)..(23): Xaa in position 18 to 23 is any or no amino acid
FXGPXXXXXXXXGXKXXXXXXXXA

SEQ ID NO: 10098 - protein, 24 aa, Artificial sequence
  protein pattern
  Variant (4)..(4): Xaa in position 4 is any or no amino acid
  Variant (8)..(8): Xaa in position 8 is any amino acid
  Variant (10)..(10): Xaa in position 10 is Ile or Val
  Variant (11)..(12): Xaa in position 11 to 12 is any amino acid
  Variant (13)..(13): Xaa in position 13 is Ala or Thr
  Variant (14)..(17): Xaa in position 14 to 17 is any amino acid
  Variant (18)..(18): Xaa in position 18 is Ala, Asp, Gly, Asn or Ser
  Variant (19)..(20): Xaa in position 19 to 20 is any amino acid
  Variant (21)..(21): Xaa in position 21 is Ala, Cys, Ser, Thr or Val
  Variant (22)..(23): Xaa in position 22 to 23 is any amino acid
  Variant (24)..(24): Xaa in position 24 is Ala, Ile, Leu or Val
ANRXEIAXRXXXXXXXXXXXXXXX

SEQ ID NO: 10099 - protein, 13 aa, Artificial sequence
  protein pattern
  Variant (8)..(8): Xaa in position 8 is Ala or Ser
  Variant (10)..(10): Xaa in position 10 is Asn, Arg or Ser
  Variant (11)..(12): Xaa in position 11 to 12 is any amino acid
HPGYGFLXEXXXF

SEQ ID NO: 10100 - protein, 17 aa, Artificial sequence
  protein pattern
  Variant (2)..(2): Xaa in position 2 is any amino acid
  Variant (4)..(4): Xaa in position 4 is Ala, Ile or Val
  Variant (5)..(5): Xaa in position 5 is any amino acid
  Variant (6)..(6): Xaa in position 6 is Ile, Leu or Val
  Variant (9)..(9): Xaa in position 9 is Ala, Ser, Thr or Val
  Variant (10)..(10): Xaa in position 10 is any amino acid
  Variant (15)..(15): Xaa in position 15 is any amino acid
  Variant (17)..(17): Xaa in position 17 is Ile, Leu or Met
GXPXXXKAXXGGGGXGX

SEQ ID NO: 10101 - protein, 19 aa, Artificial sequence
  protein pattern
  Variant (3)..(3): Xaa in position 3 is Pro or Ser
  Variant (4)..(4): Xaa in position 4 is Leu or Met
  Variant (5)..(5): Xaa in position 5 is Ile, Leu or Val
  Variant (6)..(6): Xaa in position 6 is Ala, Gly, Ser or Val
  Variant (8)..(14): Xaa in position 8 to 14 is any amino acid
  Variant (15)..(18): Xaa in position 15 to 18 is any or no amino acid
YDXXXXKXXXXXXXXXXXR

SEQ ID NO: 10102 - protein, 20 aa, Artificial sequence
  protein pattern
  Variant (2)..(2): Xaa in position 2 is Lys or Arg
  Variant (3)..(7): Xaa in position 3 to 7 is any amino acid
  Variant (8)..(8): Xaa in position 8 is Lys or Arg
  Variant (10)..(10): Xaa in position 10 is Ile, Leu or Val
  Variant (12)..(12): Xaa in position 12 is any amino acid
  Variant (14)..(14): Xaa in position 14 is any amino acid
  Variant (15)..(15): Xaa in position 15 is Phe, Ile, Leu, Met or Val
  Variant (16)..(16): Xaa in position 16 is Ala, Cys, Gly or Ser
  Variant (18)..(19): Xaa in position 18 to 19 is any amino acid
EXXXXXXXHXEXQXXXDXXG

SEQ ID NO: 10103 - protein, 17 aa, Artificial sequence
  protein pattern
  Variant (2)..(4): Xaa in position 2 to 4 is any amino acid
  Variant (5)..(7): Xaa in position 5 to 7 is any or no amino acid
  Variant (9)..(9): Xaa in position 9 is any amino acid
  Variant (10)..(10): Xaa in position 10 is Gly, Asn or Ser
  Variant (11)..(11): Xaa in position 11 is Ala or Val
  Variant (14)..(14): Xaa in position 14 is any amino acid
  Variant (17)..(17): Xaa in position 17 is Ile, Leu, Met or Val
AXXXXXXYXXXGTXEFX

SEQ ID NO: 10104 - DNA, 735 bp, Escherichia coli
  CDS (1)..(735): transl_table=11
atgttttttttcatgtccaggtcgcttttaaccaacgaaaccagtgagttggatttactggatcaacgtcctttcgaccagaccgattttgatattctgaaatcctacgaagcggtggtggacgggttagcgatgcttattggctcccactgtgaaatcgttttgcactctttgcaggatctaaaatgttcagccattcgcattgctaacggtgaacatacaggccggaagattggttcgccaattactgacctggcgctacgtatgctgcacgatatgacgggagcggatagcagcgtttctaaatgctactttactcgcgccaaaagcggcgtattaatgaagtccctgactatcgcgattcgtaaccgcgaacagcgtgtaattggtctgctgtgcatcaatatgaatcttgatgttcccttctcgcagattatgagcacctttgtgccgccagaaaccccggatgtcggttcaagcgtcaactttgcctcttctgttgaagatctggttacccaaacgctggagttcaccatcgaagaagtgaatgccgatcgcaatgtttctaataacgccaaaaatcgtcagatcgtgctgaatctctacgagaaagggatcttcgatattaaagatgcgatcaaccaggttgctgaccgcctgaacatctccaaacacactgtctatctctacatccgccagttcaagagcggtgatttccaggggcaagataagtaa

SEQ ID NO: 10105 - protein, 244 aa, Escherichia coli
MFFFMSRSLLTNETSELDLLDQRPFDQTDFDILKSYEAVVDGLAMLIGSHCEIVLHSLQDLKCSAIRIANGEHTGRKIGSPITDLALRMLHDMTGADSSVSKCYFTRAKSGVLMKSLTIAIRNREQRVIGLLCINMNLDVPFSQIMSTFVPPETPDVGSSVNFASSVEDLVTQTLEFTIEEVNADRNVSNNAKNRQIVLNLYEKGIFDIKDAINQVADRLNISKHTVYLYIRQFKSGDFQGQDK

SEQ ID NO: 10106 - DNA, 723 bp, Vibrio cholerae O1 biovar eltor str. N16961
  CDS (1)..(723): transl_table=11
gtgacaatgacagaaaccatgaatgtcgatttactgcttgagatggaatcggtgcacgtaaagccgtttacggagcacgataaagtgattctgcgctcttacgaggcggtagttgatggtatcgcgagcctgattggcccattttgtgaaatcgttctgcactcgcttgaagatctcaatacatcggcgatcaagattgccaatggtgaaaacacaggccgtcaagtgggatcgccaattaccgatatggccttgaaaatgctgcgtgatatagaaggatctgagcgtaacttctcccgctcttatttcacgcgcgccaaaggtggcgtattgatgaaatcgatcacagttgcgatccgtaacggtgagaatcgagtgattggtctactctgtatcaacgtcaacctcgatgcgcctttctcacaagtactgaaatcgtttatgccaactcaagaagcgcaagaggcggcctcttcggttaactttgccagtgatgtggaagagctggtggatcaaaccgttgaacgtaccatcgaagaaatcaacggtgataagtcagtctcgaacaataccaaaaatcgtcaaatcgtgatggcgttgttcgataaggggattttcgacattaaagatgcgatcaaccgagtcgccgatcggctgaatatctctaaacatactgtgtatctctatattcgtcagcgtaaaactgaggatgatgagaagtga

SEQ ID NO: 10107 - protein, 240 aa, Vibrio cholerae O1 biovar eltor str. N16961
MTMTETMNVDLLLEMESVHVKPFTEHDKVILRSYEAVVDGIASLIGPFCEIVLHSLEDLNTSAIKIANGENTGRQVGSPITDMALKMLRDIEGSERNFSRSYFTRAKGGVLMKSITVAIRNGENRVIGLLCINVNLDAPFSQVLKSFMPTQEAQEAASSVNFASDVEELVDQTVERTIEEINGDKSVSNNTKNRQIVMALFDKGIFDIKDAINRVADRLNISKHTVYLYIRQRKTEDDEK

SEQ ID NO: 10108 - DNA, 672 bp, Pasteurella multocida subsp. multocida str. Pm70
  CDS (1)..(672): transl_table=11
atgttaacggataaacaaccttttacagaggaagacaaaacgattttacactcttatcgagcggtagtagatggtgtcagcgcgttaattggacgtcattgtgaaattgtattgcactctttagaagatttagaacattcaactatctgtattgcaaatgggcataataccaatcggcaaattggctctccgctaacggatcttgcactgaaatctttacataatatgcaaacggatagcgtgtcaaaaccttattttacacgtgccaaaaatcagggattaatgaaatcggtcacgattgctatccgcaataagcgtcaacgtattattggtctattatgtattaatatcaatttggatgtccctgtctctgaatttatgcaagcctttatgccaacgcaggcagaagcggaagcatctagtgtcaattttgcgagttctgttgaagagttagttgcacaaactgttgagaaaacgattgaagaagtcacagcggatcgtttagtggcaaacaataataaaaatcgtcaaattgtcatctcattatatgagaagggcatttttgatattaaagatgcgatcaatttggtggcggaacggttagatatttcgcgtcatacggtgtatttatacattcgtcagttaaaacaagattcggatgaagcaaaataa

SEQ ID NO: 10109 - protein, 223 aa, Pasteurella multocida subsp. multocida str. Pm70
MLTDKQPFTEEDKTILHSYRAVVDGVSALIGRHCEIVLHSLEDLEHSTICIANGHNTNRQIGSPLTDLALKSLHNMQTDSVSKPYFTRAKNQGLMKSVTIAIRNKRQRIIGLLCININLDVPVSEFMQAFMPTQAEAEASSVNFASSVEELVAQTVEKTIEEVTADRLVANNNKNRQIVISLYEKGIFDIKDAINLVAERLDISRHTVYLYIRQLKQDSDEAK

SEQ ID NO: 10110 - DNA, 723 bp, Salmonella typhimurium LT2
  CDS (1)..(723): transl_table=11
atgtccaggtcgcttttaaccaacgaaaccagtgaacttgatttgctggatcagcgtcccttcgagcaaaccgacttcgatattctgaaatcctacgaagcggtagtggacgggttagcgatgcttataggttcccattgtgaaatcgtattgcactctttgcaggatctaaaatgttcagccattcgtattgccaatggcgaacatacgggccgtaaaattggctcgccgattaccgacctggcgttgcgtatgttgcacgacatgacaggggcggacagtagcgtgtcgaaatgctatttcacgcgcgcgaaaagcggtgtcttgatgaagtcgttgacgattgccattcgcaaccgcgagcagcgcgtcattggtctactgtgcatcaacatgaatctcgatgtgccattttcacagattatgaatacctttattccgccggaaacgccggaagtcggctcagcggttaattttgcctcctcagtcgaagatttagtcacccagacgctggagttcacgatcgaagaagtgaatgccgatcgtaatgtttctaacaatgcgaaaaatcgtcagatcgtccttaacctgtacgaaaaaggcattttcgatattaaagacgccattaaccaggtagccgatcgtctgaatatctcaaaacacacggtttacctctatattcgccagttcaaaagcggcgactttcaggggcaggataaataa

SEQ ID NO: 10111 - protein, 240 aa, Salmonella typhimurium LT2
MSRSLLTNETSELDLLDQRPFEQTDFDILKSYEAVVDGLAMLIGSHCEIVLHSLQDLKCSAIRIANGEHTGRKIGSPITDLALRMLHDMTGADSSVSKCYFTRAKSGVLMKSLTIAIRNREQRVIGLLCINMNLDVPFSQIMNTFIPPETPEVGSAVNFASSVEDLVTQTLEFTIEEVNADRNVSNNAKNRQIVLNLYEKGIFDIKDAINQVADRLNISKHTVYLYIRQFKSGDFQGQDK

SEQ ID NO: 10112 - DNA, 690 bp, Fusobacterium nucleatum subsp. nucleatum ATCC 25586
  CDS (1)..(690): transl_table=11
atgaaaaacgaattactaaatcaatataaaatattagtaaattttttaggaaaaaccttaggtccatcttttgaaatagttttacatgaaataaagagtgaagaggtaaaaatgattgccatagccaatggtgagataagtaatagaacattagagaattcaatttcaagtgaaactttagatattttaaaaaataaatcttatcataatgaagaaagtatggtaaatcatactgtattattaaagaatgggaagaaagttcgctcttctagtatgtttattaaagaaaatcaaaaaattattgggatgttgtgtataaactttgatgacagtaaatttcatgatataaactgtcaaattttaagaataatccatcctgatatgtttgttaaaaattatttgtcagatatttcatataatattttagttgatgaaaataaggaccaaagtaatgaagaaaattcaactgacaatatagaagcatttatggaaaaaatatttcaagatgttaatttaaaatttaattatcctttggaaagattgactaagcaggaaagagaaaaaattgtgaaagcactatatgaaaaaggtatttttaatttaaaagatgcaattaattttgtggctaaaaaattatcttgttctcctacaactgtatatagatatgtggggaagattgagaaaggataa

SEQ ID NO: 10113 - protein, 229 aa, Fusobacterium nucleatum subsp. nucleatum ATCC 25586
MKNELLNQYKILVNFLGKTLGPSFEIVLHEIKSEEVKMIAIANGEISNRTLENSISSETLDILKNKSYHNEESMVNHTVLLKNGKKVRSSSMFIKENQKIIGMLCINFDDSKFHDINCQILRIIHPDMFVKNYLSDISYNILVDENKDQSNEENSTDNIEAFMEKIFQDVNLKFNYPLERLTKQEREKIVKALYEKGIFNLKDAINFVAKKLSCSPTTVYRYVGKIEKG

SEQ ID NO: 10114 - DNA, 735 bp, Yersinia pestis KIM
  CDS (1)..(735): transl_table=11
atggtgtcttcgatgtctaattcgcttctctgtagcgaaaccagtgaactggatttactggatgaacgtccgttcagtcagacggaccatgaaatactaaagtcatacgaagttgtcgtggatggcttggcaatgcttattggtgggcactgtgaaattgttttgcactcactggaggatttgaaaaattctgcggtgagaattgctaacggcgaacacacggggcggcagattggctcacctataaccgatttggcactacgcatgctccatgatatggcaggtgctgacagtagtgtttcaaaagcttatttcacgcgggccaaaagcggtgtcctgatgaaatcagtgacaatcgctattcgtaaccgtgaccagcgggtgattggtttgttgtgcattaacatgaatctggatgttcctttctcacaaatcattcagacttttatgccaccagaaacacaagaagtgccttcctccgtcaactttgcttcatctgtcgatgatctggttgcgcaaacgctggagttcactattgaagaagtgaatgcggatcgtaacgtttctaacaacgccaagaatcgccaggttgtactcaatctttatgaaaaaggtatttttgatataaaagatgccataaaccaagttgcagaacgcctcaatatctcaaagcacacggtatatctttacattcgtcagttcaaaagtggcgatctcgtcgggcacgaacgttaa

SEQ ID NO: 10115 - protein, 244 aa, Yersinia pestis KIM
MVSSMSNSLLCSETSELDLLDERPFSQTDHEILKSYEVVVDGLAMLIGGHCEIVLHSLEDLKNSAVRIANGEHTGRQIGSPITDLALRMLHDMAGADSSVSKAYFTRAKSGVLMKSVTIAIRNRDQRVIGLLCINMNLDVPFSQIIQTFMPPETQEVPSSVNFASSVDDLVAQTLEFTIEEVNADRNVSNNAKNRQVVLNLYEKGIFDIKDAINQVAERLNISKHTVYLYIRQFKSGDLVGHER

SEQ ID NO: 10116 - DNA, 693 bp, Vibrio vulnificus CMCP6
  CDS (1)..(693): transl_table=11
atgttgctcgaaatggagtccgttcatgtgaagccatttactgagcacgacaaaatcattcttcgttcttatgaagccgtggttgacgggattgccagcctgattgggccattttgtgagatcgttttacactcgctggaagatttaaatacctctgcgatcaaaatcgcgaacggtgagaacacaggccgtcaggtcggctccccaattaccgatttggcgctcaaaatgttgcgtgatatcgaagggtctgagcgtaacttctcacgttcgtactttactcgcgccaagggcggggtattgatgaaatcgatcaccgtcgcaatccgtaacggagacaatcgtgtcattggcttgttgtgtatcaacgtcaatttggatgcaccattctcgcaagtgttgcaatctttcatgccaacggaagaagcgaagcaagcggcttcctctgttaacttcgcaagcgatgtggaagagttggtggatcaaacggttgagcgcaccattgaagaaatcaatgccgacaaatccgtctccaacaacactaagaaccgtcaaattgtcatggaactgtttgataaaggcatttttgatattaaagatgccatcaaccgagtggctgaccgactgaatatttccaaacacacggtttacctctacatccgtcagcgtaaaactgaggaagatgagaagtga

SEQ ID NO: 10117 - protein, 230 aa, Vibrio vulnificus CMCP6
MLLEMESVHVKPFTEHDKIILRSYEAVVDGIASLIGPFCEIVLHSLEDLNTSAIKIANGENTGRQVGSPITDLALKMLRDIEGSERNFSRSYFTRAKGGVLMKSITVAIRNGDNRVIGLLCINVNLDAPFSQVLQSFMPTEEAKQAASSVNFASDVEELVDQTVERTIEEINADKSVSNNTKNRQIVMELFDKGIFDIKDAINRVADRLNISKHTVYLYIRQRKTEEDEK

SEQ ID NO: 10118 - DNA, 759 bp, Vibrio parahaemolyticus RIMD 2210633
  CDS (1)..(759): transl_table=11
atgttggctcaatggttcgtttcggtatgccgtatactgacaaatctattatcgatattatgtcggcctaacctccagtttttgctaagggaagtaacattgctactaaagaaactcaccaagagtgatctcgatattttgaactctatgaaaaacgtcgtggatggcattgcacgtatgtatggtgaacacactgaagtggttctccacagcttagatgccgaagcgccggaaatcatcaaaatcgcaaacgggcacgtgacggaacgcagtgaaggtgccccaattaccaacttagcgagaatgaagttaagagagggcaaggacgtttctgattcgtatctgacgaaaacgtcgaacggaaagaccttgcactccattacgacaattgtcagaaatccaaaaaacaaaccgattggtttgctgtgtatcaacgtggatatggatgcaccgatgcaggcatttttaaaggcaatgctgcctcagcaacacaccgagtgttgtgttggtggtgctcgctcaccagaaacgtttgcgcgtaatattgatgaaaccatcatcagtacgatagaaaccgtgcaaacagaagtgtgggaaaatgaagccattgcgccttctaaacgcaaccgtgaactggtgacgcgactgcatggcctaggcatttttaaatacaaagacgctgttttaatggttgcaaaccatcttggtatatcgcgcgataccatctacttgtatttgcgagagcttggtaacgactaa

SEQ ID NO: 10119 - protein, 252 aa, Vibrio parahaemolyticus RIMD 2210633
MLAQWFVSVCRILTNLLSILCRPNLQFLLREVTLLLKKLTKSDLDILNSMKNVVDGIARMYGEHTEVVLHSLDAEAPEIIKIANGHVTERSEGAPITNLARMKLREGKDVSDSYLTKTSNGKTLHSITTIVRNPKNKPIGLLCINVDMDAPMQAFLKAMLPQQHTECCVGGARSPETFARNIDETIISTIETVQTEVWENEAIAPSKRNRELVTRLHGLGIFKYKDAVLMVANHLGISRDTIYLYLRELGND

SEQ ID NO: 10120 - DNA, 717 bp, Vibrio parahaemolyticus RIMD 2210633
  CDS (1)..(717): transl_table=11
atgacaactacagaaacaataaatgcggagatgttgctcgaaatggaatcggttaacgtgatgccatttactgagcacgacaaaatcatcttgagatcttacgaagcggtcgtggacggtatcgcgagcctgatcggtccgttttgtgaaatcgttcttcactctctggaagacttaaatacctctgcaatcaaaatcgccaatggcgaaaacaccggccgtcaagtaggttcgcctattactgacttagcgctaaaaatgctgaaagacattgaaggctctgagcgtaatttctcacgttcttacttcacacgtgccaaaggcggcgtactaatgaagtcaatcactgttgcgatccgcaacggtgaaaatcgcgtaattggtttgctgtgtatcaacgtcaaccttgatgcgccattctcgcaagtgttgcaatctttcatgccaacgcaagaagcgaaagaagccgcttcttcggtgaacttcgcgagtgacgtagaagagctggtggaccaaaccgttgaacgtacgattgaagaaatcaatgcagataaatcggtatcgaacaacaccaagaatcgtcagatcgtgatggagttgtacgacaaaggcatcttcgacatcaaagacgccatcaaccgtgttgccgatcgtcttaacatttcaaaacacaccgtgtacttatacattcgtcaacgtaaaaccgaggacgaataa

SEQ ID NO: 10121 - protein, 238 aa, Vibrio parahaemolyticus RIMD 2210633
MTTTETINAEMLLEMESVNVMPFTEHDKIILRSYEAVVDGIASLIGPFCEIVLHSLEDLNTSAIKIANGENTGRQVGSPITDLALKMLKDIEGSERNFSRSYFTRAKGGVLMKSITVAIRNGENRVIGLLCINVNLDAPFSQVLQSFMPTQEAKEAASSVNFASDVEELVDQTVERTIEEINADKSVSNNTKNRQIVMELYDKGIFDIKDAINRVADRLNISKHTVYLYIRQRKTEDE

SEQ ID NO: 10122 - DNA, 648 bp, Salmonella enterica subsp. enterica serovar Typhi Ty2
  CDS (1)..(648): transl_table=11
atgaaaaacacttgtcttgaaccctatgaatttttgatcgatttcctggccgattattttggcgaaaacacggaagttgttctgcacaatctttctgatcttgagtcttctatacataaaatcagaaatggacatatcagcggtcgctctgtcggagatcccatcaccgatctggtagtccgtgccatgaagaacaatgacagtgaggtacattaccagtgtaattatctcagcaagacacgcgatggcagacggcttaagtgtgccactttttttatccggaataagcagggagaaattgttggtgcactatgtctgaataccgtcgtcgaagatttaattgccctgaatgataaacttagtcattttttaagcatttttgtcgggcagactgacaataataacggcactcagcttgatgaacatattggactgaccattcctgaaatggttgatctcaaaattaataatgtaatcaatattgaaaatattaatccagagtcactgaatgctgaaaataaaagccatattatttcattactaaatgatgaaggcgtatttctgcttaaaggggcagtaacgaaagtagccaaaaaacttaacatatctgaacccactgtttataaatacatacaaaaattaaaataa

SEQ ID NO: 10123 - protein, 215 aa, Salmonella enterica subsp. enterica serovar Typhi Ty2
MKNTCLEPYEFLIDFLADYFGENTEVVLHNLSDLESSIHKIRNGHISGRSVGDPITDLVVRAMKNNDSEVHYQCNYLSKTRDGRRLKCATFFIRNKQGEIVGALCLNTVVEDLIALNDKLSHFLSIFVGQTDNNNGTQLDEHIGLTIPEMVDLKINNVINIENINPESLNAENKSHIISLLNDEGVFLLKGAVTKVAKKLNISEPTVYKYIQKLK

SEQ ID NO: 10124 - DNA, 681 bp, Enterococcus faecalis V583
  CDS (1)..(681): transl_table=11
ttggagtcatatttacgtttaagtgaagtagataaacaaatcttacattcacatgccttaatgcttgatggattagggaacttctttggtagtacccatgaagtcattcttcatagtttagaaaatttggaaagttcggctatcaaagtcatcaatggccatttcagtaaccgcaaggaaggtgcccccattactgatatggcgttaaaaatgttaagtcaagtagagtcggaacatgattacgctgtgaaaccctactacaataaaaatcaaaaaggggttattttaaaatcttccaccattccagttatcggtgaaaatgatcgtattattggattgatctgtatcaatatgcatttagaaatgccattaattgattacttgcaagacttattaccttcaggacaacaaaatgatatgtcccaagagcttaaaaattctgaacatttttctgacaatattgacgaattaatcactacttcactgacaaaagtaaaacaagcagtagaaagcgatccaaatgtatcacatttgaatcaaaataaagaaattgttattcgtttatatgatcaaggaatttttaatctcaaagattctgtcataaagattgccgatcgattaggtatttcaaaaaataccatctatttacatatccgcaatcataaaaaagaagaagcttaa

SEQ ID NO: 10125 - protein, 226 aa, Enterococcus faecalis V583
MESYLRLSEVDKQILHSHALMLDGLGNFFGSTHEVILHSLENLESSAIKVINGHFSNRKEGAPITDMALKMLSQVESEHDYAVKPYYNKNQKGVILKSSTIPVIGENDRIIGLICINMHLEMPLIDYLQDLLPSGQQNDMSQELKNSEHFSDNIDELITTSLTKVKQAVESDPNVSHLNQNKEIVIRLYDQGIFNLKDSVIKIADRLGISKNTIYLHIRNHKKEEA

SEQ ID NO: 10126 - DNA, 663 bp, Haemophilus ducreyi 35000HP
  CDS (1)..(663): transl_table=11
atgaaaaaatttcaaacctttagcgaagaagaccacgctattcttgcctcctatttcccgattgtagatggcatagctgcactgattggtgaacattgtgagattgtactacattcactagaattccttgaaaactctgcaatttatatcgctaatggccataacactgaccgaaaaattggttcaccattaaccgataaagcactaaaatcattacatcaaatgcaaaccgatagcgtttcaaaaccctattttacccgcttaaaagggggtattttgatgaaatcaatcaccatcgctattcgcaatagcaaacaacatgtcatcggattcatttgcatcaatattaatttagatgtaccaacagcacaattcttaacttcttttattccacgcacacaagatgacgaaaataacagcgtaaactttgctagttcagtagatgaattagttgcacaaaccattgacaaaaccattgaggaaacagtggtagatcggcaaatatcaaataacaacaaaaatcgccacattgtgatttcactctatgaaaaaggcatttttgatattaaagacgcgattaatcaagttgctacgcgcttaaatatctctcgtcataccgtttacctttacattcgacaaataaaacaggatagtaacaattaa

SEQ ID NO: 10127 - protein, 220 aa, Haemophilus ducreyi 35000HP
MKKFQTFSEEDHAILASYFPIVDGIAALIGEHCEIVLHSLEFLENSAIYIANGHNTDRKIGSPLTDKALKSLHQMQTDSVSKPYFTRLKGGILMKSITIAIRNSKQHVIGFICININLDVPTAQFLTSFIPRTQDDENNSVNFASSVDELVAQTIDKTIEETVVDRQISNNNKNRHIVISLYEKGIFDIKDAINQVATRLNISRHTVYLYIRQIKQDSNN

SEQ ID NO: 10128 - DNA, 735 bp, Photorhabdus luminescens subsp. laumondii TTO1
  CDS (1)..(735): transl_table=11
atggtgtatttaatgtctaacccgttattatctggtgatatcagtgatgtcgatttactggaaaaccaaccgtttactgaaacggatcacgaaattttaaagtcttatgaagccgcagttgatggcttggctatgctaattggtgggcattgcgagattgtccttcattcattggaagatcttaaatgttcagctgtcagaatagccaacggagaacatacaggtcgtaagataggttcacctatcactgatcttgcattgcgtatgttacatgacattacagacgaagactgtagtgcatccaaagcctattttacccgagcgaaaagcggttcattgatgaagtcagtcacaattgcgatccgcaaccggaaccgccgagtgatcggcctcttgtgcattaatatgaatctcgatgtccctttctctgaaattattcagacatttattccagaggaaacacatgatgtcgctccaaatgtaaattttgcctcatctgtggatgatttggttgcgcaaacgcttgaatatactatcgaagaagtcaatattgatcgcagtgtatccaataatgccaagaacagacaggtggttctaaatctctatgagaaaggcatttttgatattaaagatgcaatcaatcaggttgctgagcgtttaaatatttctaagcatactgtttacctctatattcgccagtttaaaaatggtgaatgtttagggcctgagcggtaa

SEQ ID NO: 10129 - protein, 244 aa, Photorhabdus luminescens subsp. laumondii TTO1
MVYLMSNPLLSGDISDVDLLENQPFTETDHEILKSYEAAVDGLAMLIGGHCEIVLHSLEDLKCSAVRIANGEHTGRKIGSPITDLALRMLHDITDEDCSASKAYFTRAKSGSLMKSVTIAIRNRNRRVIGLLCINMNLDVPFSEIIQTFIPEETHDVAPNVNFASSVDDLVAQTLEYTIEEVNIDRSVSNNAKNRQVVLNLYEKGIFDIKDAINQVAERLNISKHTVYLYIRQFKNGECLGPER

SEQ ID NO: 10130 - DNA, 669 bp, Vibrio vulnificus YJ016
  CDS (1)..(669): transl_table=11
atgatgagtgtaaaacaagtacgatttactaacgaagacagagaagcgctgaaaagctactaccgtcttgcggacaccattgcggatctcataggtcctcactgtgaagtggttattcattcttttgaaagtcttgaaaactcagtggttaaaatcgtcaatggtcatcatacaggacgaaaaatcggctcaccaattaccgaccttgggcttcgtatgtggagtcgttttgaaaaaacgggagaagtgtcaccgaagagttatttcaccaactcggcggatggctcgttactaaaatcgacaacatgtgtgcttgatggacccaataaaaaacctattggtatgttatgtatcaatatgaatctctcttttccgtttcctgagatcatcaaaaccttacttcctcaatgtacgtcgaccaattccttggttcatgaaaatttcagtaataacgcgaatgacgttattcaacaagcactcgcgtcagcaataagtgaaatagagaacaacacatcaattacgacaaaaggtcgtaataaagccattgttcgcaatctttttgaaaatggtatttttgaattaaaagagacgacgacacagatatcagaaagcttggggatcagtcgccaagctatttataaatttattcgagaatttaaatcagaatag

SEQ ID NO: 10131 - protein, 222 aa, Vibrio vulnificus YJ016
MMSVKQVRFTNEDREALKSYYRLADTIADLIGPHCEVVIHSFESLENSVVKIVNGHHTGRKIGSPITDLGLRMWSRFEKTGEVSPKSYFTNSADGSLLKSTTCVLDGPNKKPIGMLCINMNLSFPFPEIIKTLLPQCTSTNSLVHENFSNNANDVIQQALASAISEIENNTSITTKGRNKAIVRNLFENGIFELKETTTQISESLGISRQAIYKFIREFKSE

SEQ ID NO: 10132 - DNA, 723 bp, Vibrio vulnificus YJ016
  CDS (1)..(723): transl_table=11
gtgacaacgacagaaacactaactgcagatatgttgctcgaaatggagtccgttcatgtgaagccatttactgagcacgacaaaatcattcttcgttcttatgaagccgtggttgacgggattgccagcctgattgggccattttgcgagatcgttttacactcgctggaagatttaaatacctctgcgatcaaaatcgcgaacggtgagaacacaggccgtcaggtcggctccccaattaccgatttggcgctcaaaatgttgcgtgatatcgaagggtctgagcgtaacttctcacgttcgtactttactcgcgccaagggcggggtattgatgaaatcgatcaccgtcgcaatccgtaacggagacaatcgtgtcattggcttgttgtgtatcaacgtcaatttggatgcaccattctcgcaagtgttgcaatctttcatgccaacggaagaagcgaagcaagcggcttcctctgttaactttgcaagcgatgtggaagagttggtggatcaaacggttgagcgcaccattgaagaaatcaatgccgacaaatccgtctccaataacactaagaaccgtcaaatcgtcatggaactgtttgataaaggcatttttgatattaaagatgccatcaaccgagtggctgaccgactgaatatttccaaacacacggtttatctctacatccgtcagcgtaaaactgaggaagatgagaagtga

SEQ ID NO: 10133 - protein, 240 aa, Vibrio vulnificus YJ016
MTTTETLTADMLLEMESVHVKPFTEHDKIILRSYEAVVDGIASLIGPFCEIVLHSLEDLNTSAIKIANGENTGRQVGSPITDLALKMLRDIEGSERNFSRSYFTRAKGGVLMKSITVAIRNGDNRVIGLLCINVNLDAPFSQVLQSFMPTEEAKQAASSVNFASDVEELVDQTVERTIEEINADKSVSNNTKNRQIVMELFDKGIFDIKDAINRVADRLNISKHTVYLYIRQRKTEEDEK

SEQ ID NO: 10134 - DNA, 672 bp, Desulfovibrio vulgaris subsp. vulgaris str. Hildenborough
  CDS (1)..(672): transl_table=11
gtggcagacaagacgacctcatgcaccatcgagcggtatgtgccgcttgtggattttctgggcgcgtttctgggtgaggactgtgaagtggtgctgcacgatgtcagaaaccctgacaattcggtgctggccattgccaacaatcatatcagcggacgccgcaagggggcaccgctcaccgacctcgccctgcggcttctcaaggagggggcatggaaggaacggcccttcgtcatggattacaagacgcagagtcgtgacggacgccccctgcattcggcgacctatttcattctcagcgatgacggtgaactggcggggatgttgtgcctgaacatggacacctcgtccctcgtggaggcgcacggccttcttgagagattcatcgaacgcgggcggctcatgcccagacgtcccgaacctgatgtgccgcatacgctcgagaccttcgccgagtccatcgaagacctcaccgacagcatcatccggcaggtggtcaacggtgcggccatcgcacccgaacgcatgacgccggacgagaagatggccatcgtgcgcaccctcaacgagaagggcgtgttcctgctgaaggggacagtggcagttgtggcaaggcatcttgccgcctcagaggcaaccatctaccgctatctgcaacgggtgaatggctga

SEQ ID NO: 10135 - protein, 223 aa, Desulfovibrio vulgaris subsp. vulgaris str. Hildenborough
MADKTTSCTIERYVPLVDFLGAFLGEDCEVVLHDVRNPDNSVLAIANNHISGRRKGAPLTDLALRLLKEGAWKERPFVMDYKTQSRDGRPLHSATYFILSDDGELAGMLCLNMDTSSLVEAHGLLERFIERGRLMPRRPEPDVPHTLETFAESIEDLTDSIIRQVVNGAAIAPERMTPDEKMAIVRTLNEKGVFLLKGTVAVVARHLAASEATIYRYLQRVNG

SEQ ID NO: 10136 - DNA, 723 bp, Erwinia carotovora subsp. atroseptica SCRI1043
  CDS (1)..(723): transl_table=11
atgtctaattcgcttgtatctggcgaatcttatgagcttgatttgctggatgaacggccgttcagtcaaacggactatgagatcctgaaatcgtatgaagcagtggttgatggcttggccatgttgattggcgagcactgtgagattgtattgcattcgcttgaggatcttaaatgttccgccgtgcgtattgcgaatggagaacataccggcaggaaaattggctcgccgattacggatcttgcattgcgcatgctgcatgatatggcaggcgaagatagcagcgtgtcgaaggcctattttacccgcgcaaaaagcggcgtgttgatgaagtcagtgacgattgcgatccgtaatcgcgatcagcgcgtggttgggttgttgtgtatcaacatgaatttggatgtacctttctcccagatcgtgcagacctttattccacctgaaacgcatgacgccgcgtcttctgttaacttcgcatcatccgttgacgatctggtggcacaaacgctggaattctctattgaggaagtcaatgcggatcgcaatgtctccaataatgcgaaaaatcgccaaatcgtactgagcctgtacgagaagggcatctttgatattaaagacgccattaaccaggtcgccgaacgccttaatatctccaaacacactgtttatctttatattcgtcaattcaaaagcggcgatttcagtgggcacgaacgttga

SEQ ID NO: 10137 - protein, 240 aa, Erwinia carotovora subsp. atroseptica SCRI1043
MSNSLVSGESYELDLLDERPFSQTDYEILKSYEAVVDGLAMLIGEHCEIVLHSLEDLKCSAVRIANGEHTGRKIGSPITDLALRMLHDMAGEDSSVSKAYFTRAKSGVLMKSVTIAIRNRDQRVVGLLCINMNLDVPFSQIVQTFIPPETHDAASSVNFASSVDDLVAQTLEFSIEEVNADRNVSNNAKNRQIVLSLYEKGIFDIKDAINQVAERLNISKHTVYLYIRQFKSGDFSGHER

SEQ ID NO: 10138 - DNA, 666 bp, Bacillus licheniformis ATCC 14580
  CDS (1)..(666): transl_table=11
ttgactgaagcaaaacaggttttaaaaagttacataccatttgcaaaaacgataggggaaatgtttggtccaaattgtgaggttgtcattcatgatttgacaacccccgagtcttccgtcattttcacaatcaacaatcatgtaacaggaagagaggttggccaatcctttgaccatttggtgaaaaaagttcttttatccaatgaatttaaagaggattacttagctggatatgaaatccaagcagatgatgggagaacaataaaatcatcgactaccctcattagagatggccagcagcaggtgattggggctttttgcatcaattacgacatgaatgtaatgattcaaatgaaagaaatgttagatgcatttatgcctggtgttgaaaagaaaaatcaaatacaaacttcgaatacggcggagcaggaagcttcgattcagaatgtagaagagatcacgaaccagttaattgaacaaattgtagcgaaccgcaaacactctatgatgaaacgccgggaaaaaatcgagctgatcaggtttatggatgaaaaggggatattcctcatgaaaggtgcggttgataaagtggcagaacaattaggcatttcaaaggtaactgtctacagctatttagatgaagtaaaaaaaagacaatcggagtga

SEQ ID NO: 10139 - protein, 221 aa, Bacillus licheniformis ATCC 14580
MTEAKQVLKSYIPFAKTIGEMFGPNCEVVIHDLTTPESSVIFTINNHVTGREVGQSFDHLVKKVLLSNEFKEDYLAGYEIQADDGRTIKSSTTLIRDGQQQVIGAFCINYDMNVMIQMKEMLDAFMPGVEKKNQIQTSNTAEQEASIQNVEEITNQLIEQIVANRKHSMMKRREKIELIRFMDEKGIFLMKGAVDKVAEQLGISKVTVYSYLDEVKKRQSE

SEQ ID NO: 10140 - DNA, 714 bp, Mannheimia succiniciproducens MBEL55E
  CDS (1)..(714): transl_table=11
ttggttattagacgaaagtgcggttccttttttgcgggtaatataatgctaagtataaaacgacctttcactgatgaagaccgtgcgattttaaattcctacaaagccgtggttgaaggcgtaagcgctttactcggtagccattgcgaaatcctcttgcattctttggaagatttggataataccgccgtttacattgccaacggacataataccaatcggcaagcgggtacgacgctgagcgaagcggatttacaatctctgcaagctatggaaaacggcatggttttaaagccgtattttacgcgtcataagggcaataacgggctaatgaagtcgacgagtatcgccattcgtaacggtaagcggcagattatcggtttattgtgtattaatcttaatttggaagtaccggtttcccagtttatccaagcctttattccgactcaagactatccggtcaccacggcgggcaatttcgccagttctgtagaggagttggtattgcaaacggtggaaaccaccattgaagaaattacggcggatcgtcttgtggcaaataacaataaaaaccgtcaaatcgttaccacgctttttgagaaaggtatttttgatattaaagatgcaattaatctggtggcggaaagattaaatatttcccgccataccgtttatctttatattcgccaaataaaacaggacgaccaaaaataa

SEQ ID NO: 10141 - protein, 237 aa, Mannheimia succiniciproducens MBEL55E
MVIRRKCGSFFAGNIMLSIKRPFTDEDRAILNSYKAVVEGVSALLGSHCEILLHSLEDLDNTAVYIANGHNTNRQAGTTLSEADLQSLQAMENGMVLKPYFTRHKGNNGLMKSTSIAIRNGKRQIIGLLCINLNLEVPVSQFIQAFIPTQDYPVTTAGNFASSVEELVLQTVETTIEEITADRLVANNNKNRQIVTTLFEKGIFDIKDAINLVAERLNISRHTVYLYIRQIKQDDQK

SEQ ID NO: 10142 - DNA, 666 bp, Haemophilus influenzae 86-028NP
  CDS (1)..(666): transl_table=11
atgacattaaacgataaatatcctttcactgatgaagatcaagctatcataaattcctacaaagcagtcgttgatggtgtcagcgcactgattggcgagcactgcgaaatagtgcttcattctctggaaaatattgaacattctgctatttgtattgccaacggacataacactaatcgacaagttggttcgccaattactgatcttgccttacgttcgctacgaaatatgcaaagcgaaagtgtttcaaaaccttattttacacgagcaaaaggcagcgtactgatgaaatcagttactatcgctattcgtaataaaactcaacgtattattggtttgctttgcatcaatatcaatttagatgtacccatgtctcaatttttgcaatgctttatgccaacggagcatacgaatgaaacatcttcagtgaactttgcgaattcagtggaagacttggttgcgcagactattgaaaaaacaatagaagaagtcaatgcggatcgcgctgttgccaataatactaaaaaccgacaaatcgtcctttctctttacgaaaaaggtatttttgatattaaagatgcgattaatttagtcgctgaacgtttagatatttcccgacatacggtttacctgtacatccgtcaaatcaaacaagagcaagaataa

SEQ ID NO: 10143 - protein, 221 aa, Haemophilus influenzae 86-028NP
MTLNDKYPFTDEDQAIINSYKAVVDGVSALIGEHCEIVLHSLENIEHSAICIANGHNTNRQVGSPITDLALRSLRNMQSESVSKPYFTRAKGSVLMKSVTIAIRNKTQRIIGLLCININLDVPMSQFLQCFMPTEHTNETSSVNFANSVEDLVAQTIEKTIEEVNADRAVANNTKNRQIVLSLYEKGIFDIKDAINLVAERLDISRHTVYLYIRQIKQEQE

SEQ ID NO: 10144 - DNA, 696 bp, Pseudomonas fluorescens Pf-5
  CDS (1)..(696): transl_table=11
atgaaccgatcttgcgcttccctgcttgccgaacgtcagctggtgctgcaggtgctgcacagcactttgcagatgctgggcagcgtggtgggccggcatgtggagattgtcctgcatgaccttgaccgtcccgagtgctcgatcgtcgccatcgccaatggtcatgtcaccgggcgccgggtaggcgacccggtgctggtcgggccgcgccaggacctgggttttgccgcggtgcgacgcgccctgcaagaccgctccgcggcgaccccgctggtgctggaaaactacccgaccctggcccccgacggccgcgagctgcgcagttccacggtgatctttcgcgacagcagcgggcagcccttcgccagcctgtgcagcaacagcgacctgagcggtatcgccgccgctcatgcctgcctggggcagttgctgggcctgggcagcgcgcctgcgccgcgccgcgacgaagcccccgacatggaacagttgctggcccagatcatccagggcgcctgcccgggaaacggggcgcgcatgagcaagcaacacaagctcgacgccgtgcgccagatgcaggagcgcggggtgttcatcgtcaagggcgggatcgaaaaggccgccgcggccctgggggtgacccgctacaccatctacaactacctggaacagatccgcgcccaaggcgccgaggaatga

SEQ ID NO: 10145 - protein, 231 aa, Pseudomonas fluorescens Pf-5
MNRSCASLLAERQLVLQVLHSTLQMLGSVVGRHVEIVLHDLDRPECSIVAIANGHVTGRRVGDPVLVGPRQDLGFAAVRRALQDRSAATPLVLENYPTLAPDGRELRSSTVIFRDSSGQPFASLCSNSDLSGIAAAHACLGQLLGLGSAPAPRRDEAPDMEQLLAQIIQGACPGNGARMSKQHKLDAVRQMQERGVFIVKGGIEKAAAALGVTRYTIYNYLEQIRAQGAEE

SEQ ID NO: 10146 - DNA, 663 bp, Desulfitobacterium hafniense Y51
  CDS (1)..(663)
atggaggaaccgatgaataacaagcagattctagaatcatatatacccttagttcagttttttggtaaagtatgcggaggtaattatgaaatcgttctccatgatgcctcaaaccctgatgagtccattattgcaattgccaacgagcatattagtggaaggaaattaggcggacctatgactgaccttgctctgaagcttattaagggagaatattataaagaacaagattacattgtaaatcacggccgtaccaaggataataaaattctagtctcttccactttttttataaaaggaaaaaatcatgatttaattggattactgtgcatcaacaacaatgttaccgagttaatggcttttaaaaattatctgtcaacggttttgagctgttttaataccgatgaacaagatgatcatcacaaaaaaaatcatgaaaatatcgatatttcaatggaggatctaatcaaaaatacaattgacagtgttcttgccgatataaatatctcccccgagaggatgtctccggaagaaaaaatacaaatcgtgcaaagtttgagcgaacaagggttatttttattaaaaggagccgtatcagaggttgcgaagcggttgaaaacatcggagcctacgatatataggtatctcaacaaaaaaggataa

SEQ ID NO: 10147 - protein, 220 aa, Desulfitobacterium hafniense Y51
MEEPMNNKQILESYIPLVQFFGKVCGGNYEIVLHDASNPDESIIAIANEHISGRKLGGPMTDLALKLIKGEYYKEQDYIVNHGRTKDNKILVSSTFFIKGKNHDLIGLLCINNNVTELMAFKNYLSTVLSCFNTDEQDDHHKKNHENIDISMEDLIKNTIDSVLADINISPERMSPEEKIQIVQSLSEQGLFLLKGAVSEVAKRLKTSEPTIYRYLNKKG

SEQ ID NO: 10148 - DNA, 669 bp, Haemophilus somnus 129PT
  CDS (1)..(669): transl_table=11
atgttatcggatagacgcccttttacaaatgaagatcatactattctcaattcttatatcgctgtggttgaggggattagtgcattaattggtgagcactgtgaaattgttttacactctttggaagaccttgagcattcggctatttgtattgccaatggacataataccaatcgccaagtgggctcgccgattacaaattttgcattaacgtctttgcacaatatgcaaaccgagagtgtgtctaaaccttattttactcgatctaaaagtaagggattgatgaaatcggtgacgattgcaattcgtaacggtaatcaacgcattataggcttgctttgcattaatattaatttggatattcccatgtctcaatttattcaggcattgatgcccgcacctgaacaagtggaaatgtcagcagttaatttcgccagttcagtagaggagcttgttgttcaaactatagaacaaactatcgaagaaattacagcggatcgtcttgttgcaaatcataacaaaaatcgtcaaattgtcctgtccttatatgaaaaaggtatttttgatattaaagatgcgattaatttagtagcggaacgcttaaatatctctcgacataccgtttatctctatatccgtcaactcaaacaagagcaaggaatagaataa

SEQ ID NO: 10149 - protein, 222 aa, Haemophilus somnus 129PT
MLSDRRPFTNEDHTILNSYIAVVEGISALIGEHCEIVLHSLEDLEHSAICIANGHNTNRQVGSPITNFALTSLHNMQTESVSKPYFTRSKSKGLMKSVTIAIRNGNQRIIGLLCININLDIPMSQFIQALMPAPEQVEMSAVNFASSVEELVVQTIEQTIEEITADRLVANHNKNRQIVLSLYEKGIFDIKDAINLVAERLNISRHTVYLYIRQLKQEQGIE

SEQ ID NO: 10150 - DNA, 681 bp, Shewanella sp. MR-7
  CDS (1)..(681): transl_table=11
gtgaaattgcaagacttaactcaaagcgatctggatatactcaagtccatcgaaaatatcgtcgatgggattgctgccatgtatggccaacacactgaagtggtgctgcacagtttggatgctaagcacccttcggtgatcaaaattgccaatggccatgttactggccgcgaggtcggtgcgcccattaccaaccttgccttgctcaagcttaaaacgggtcaggatatttccaactcttacctgactaagtgcaccaacggtaaaactttacgttcgatcaccacagtgatccgtaatcctaaaaacctgccgattgggttgctgtgcattaatagcgatatggatgcaccgctgcaatctgtgctgcgcactatgatgccggagcaactccttggcagcgaactgaccagttcgcccgaggtgtttgcgcgcaatattgatgaggcgctgcacagcactatcgatagtgttaaccacgaggtacgtgcgaatcccgcgatttccccttcacaaaagagtcgcgaaattgtcaatcaactccatgagttagggattttcgaactcaaggatagcgcccaagtggccgccgctcgtttggggatatcagtgcattcgatctatcgctatctgcgtgaaatcaaagccaatcaaaccgaaagcgagaaaagcctcgcttaa

SEQ ID NO: 10151 - protein, 226 aa, Shewanella sp. MR-7
MKLQDLTQSDLDILKSIENIVDGIAAMYGQHTEVVLHSLDAKHPSVIKIANGHVTGREVGAPITNLALLKLKTGQDISNSYLTKCTNGKTLRSITTVIRNPKNLPIGLLCINSDMDAPLQSVLRTMMPEQLLGSELTSSPEVFARNIDEALHSTIDSVNHEVRANPAISPSQKSREIVNQLHELGIFELKDSAQVAAARLGISVHSIYRYLREIKANQTESEKSLA

SEQ ID NO: 10152 - DNA, 681 bp, Shewanella sp. ANA-3
  CDS (1)..(681): transl_table=11
gtgaaattgcaagacttaacccaaagcgatctggatatactcaagtccatcgaaaatatcgtcgatgggattgccgccatgtacggccaacatacagaggtcgtgctgcacagcttagatgctaagcacccttcggtgatcaaaattgccaatggtcatgtcactggccgtgaggtcggtgcgcccatcactaacttggccttgcttaagctcaaaacgggtcaagatatttctaactcttatcttaccaagtgcgccaacggtaagaccttacgttcgataaccacagttatccgtaatcctaaaaacctgccgattgggttactgtgcatcaataccgatatggatgcgccgctgcaatctgtgctgcgcactatgatgccggagcagctccttggcagtgaattgaccagttcgcccgaggtgtttgcgcgcaatattgatgaggcgctgcacagcactatcgatagtgttaaccacgaggtgcgtgccaatcctgcgatttccccttcacaaaagagccgcgaaattgtcaatcaactccatgagttagggattttcgaactcaaggatagcgcccaagtggccgccactcgattagggatttcagtgcattccatttaccgctatttgcgtgaaattaaagccaatcaggcggaaagcgacaaaagcctcgcttaa

SEQ ID NO: 10153 - protein, 226 aa, Shewanella sp. ANA-3
MKLQDLTQSDLDILKSIENIVDGIAAMYGQHTEVVLHSLDAKHPSVIKIANGHVTGREVGAPITNLALLKLKTGQDISNSYLTKCANGKTLRSITTVIRNPKNLPIGLLCINTDMDAPLQSVLRTMMPEQLLGSELTSSPEVFARNIDEALHSTIDSVNHEVRANPAISPSQKSREIVNQLHELGIFELKDSAQVAATRLGISVHSIYRYLREIKANQAESDKSLA

SEQ ID NO: 10154 - DNA, 660 bp, Actinobacillus pleuropneumoniae serovar 1 str. 4074
  CDS (1)..(660): transl_table=11
atgaaaaaatttcaaacttttagcgaagaagatcatgctattctcgcttcctactttccgattgtggacggaattgccgctcttatcggtgatcactgcgaaatcgttttgcactctttagagtttcttgaaaactcggctatttatatcgcaaacggccataataccgaccgaaagatcgggtcgcctctgaccgataaagcgttaaaatcgttacatcaaatgaaaaccgatagcgtgtcaaagccctatttcactcgttcaaaaggcggtgttttaatgaaatccgtgacgattgccattcgaaacagcaagcagcacgttatcgggtttatctgcatcaatatcaatttggatgtaccggtatcgcaatttctcagtacttttattgcgccgttacaagaagatgaagatacttcggtaaactttgccagttccgttgaagaattggttatccaaacgattgaaaatacaattgaagaaaccatggcggatcgtaacgtcgcaaataacaataaaaatcgccatattgtcgtatcgttatatgagaaaggcatttttgatattaaagatgcgatcaaccaagtggcggatcgtcttaatatttctcgtcacaccgtttatctttatatccgacagattaaacaggataacgaataa

SEQ ID NO: 10155 - protein, 219 aa, Actinobacillus pleuropneumoniae serovar 1 str. 4074
MKKFQTFSEEDHAILASYFPIVDGIAALIGDHCEIVLHSLEFLENSAIYIANGHNTDRKIGSPLTDKALKSLHQMKTDSVSKPYFTRSKGGVLMKSVTIAIRNSKQHVIGFICININLDVPVSQFLSTFIAPLQEDEDTSVNFASSVEELVIQTIENTIEETMADRNVANNNKNRHIVVSLYEKGIFDIKDAINQVADRLNISRHTVYLYIRQIKQDNE

SEQ ID NO: 10156 - DNA, 666 bp, Haemophilus influenzae R2866
  CDS (1)..(666): transl_table=11
atgacattaaacgataaatatcctttcactgatgaagatcaggctatcataaattcctacaaagcagtcgttgatggtgtcagcgcactgattggcgagcactgcgaaatcgtgcttcattctctggaaaatattgaacattctgctatttgtattgccaacggacataacactaatcgacaagttggttcgccaattactgatcttgccttacgttcgctacgaaatatgcaaagcgaaagtgtttcaaagccttattttacacgagcaaaagatagcgtactgatgaaatcagtcactattgccattcgtaataaaactcaacgtattattggtttgctttgtatcaatatcaatttagatgtacccgtgtctcaatttttacaatgctttgtgccaacggagcatacgaatgaaacatcttcggttaattttgccagttcagtggaagacttggttgcgcagactattgaaaaaacaatagaagaagtcaatgcagatcgcgctgttgccaataatactaaaaaccgacaaatcgtcctttctctttacgaaaaaggtatttttgatattaaagatgcgattaatttagtcgcagaacgtttagatatttcccgacatacggtttacctgtacatccgccaaatcaaacaagagcaagaataa

SEQ ID NO: 10157 - protein, 221 aa, Haemophilus influenzae R2866
MTLNDKYPFTDEDQAIINSYKAVVDGVSALIGEHCEIVLHSLENIEHSAICIANGHNTNRQVGSPITDLALRSLRNMQSESVSKPYFTRAKDSVLMKSVTIAIRNKTQRIIGLLCININLDVPVSQFLQCFVPTEHTNETSSVNFASSVEDLVAQTIEKTIEEVNADRAVANNTKNRQIVLSLYEKGIFDIKDAINLVAERLDISRHTVYLYIRQIKQEQE

SEQ ID NO: 10158 - DNA, 723 bp, Photobacterium sp. SKA34
  CDS (1)..(723): transl_table=11
gtgttttcaactgataactttgattcagaggtgatggtcgacagtgatatcgtcgatagccgaatcttctctgagcatgattatattattcttcgctcttatgaagctgttgttgatggtttagctgcgttaattggtcccttttgtgaaatcgttctccattcattagccgatctcaacacttctgcgattaagattgctaacggagaaaatacaggtcgtaaagttggctcgccaatcaccgatcttgcattacgcatgctacgtgatattgaaggttctgaacgtaatttttctcgtgcttatttcacccgtgcaaaaggtggtgacttaatgaagtcaatcacaattgccattcgtaacggtgaaaataatatcattggccttttatgtataaacgttaatttagatgcgcctttctctcaaattctgcagtcgtttatgcctactgatgaagctaaacaagcagcatcaaccgttaactttgcaagcgatgttgatgaactcgttgatcaaacggttgaacgtactatcgaagaaattaatgcggataagaacgtatcaaataatgccaaaaatcgccaaatcgtgatggagctgttcgataaaggtattttcgatattaaagatgcgattaatcgtgttgcagatcgtttaaatatatctaaacacaccgtgtatctgtatatccgccagagaaaaaccgaggatggtgagaagtga

SEQ ID NO: 10159 - protein, 240 aa, Photobacterium sp. SKA34
MFSTDNFDSEVMVDSDIVDSRIFSEHDYIILRSYEAVVDGLAALIGPFCEIVLHSLADLNTSAIKIANGENTGRKVGSPITDLALRMLRDIEGSERNFSRAYFTRAKGGDLMKSITIAIRNGENNIIGLLCINVNLDAPFSQILQSFMPTDEAKQAASTVNFASDVDELVDQTVERTIEEINADKNVSNNAKNRQIVMELFDKGIFDIKDAINRVADRLNISKHTVYLYIRQRKTEDGEK

SEQ ID NO: 10160 - DNA, 660 bp, Photobacterium sp. SKA34
  CDS (1)..(660): transl_table=11
gtgcaagagttaactgaaagtgattacgatatccttcacgcaatggagaatatcgtggatggtattgcggcaatgtggggagagcacactgaagtggcgcttcattgtttagataacaacaacccatcaataatgaaaattgcgaatggtcatattacagggcgagaagtcggtgcacctatcaccaattttgctttagtaaaattgaacgaaggtaaagatgtttctgattcctatattaccaagtgtccagatggtaagactttacgttctatttctacgattattcgaaataaaaataataaagcgattggtatgttatgtgtgaattcgaatttagatgcaccatttcaatcaatgatgcagaacttgcttcccaatattcactcacactttgatcatggtgttacggcagagacctttgctcgaaacaatgatgaaatgatgcacagttcgattgagaatgtgcgtgagcaagtgacgaataatagtaatattccgctttccaaaaaaagccgtgagattgttactcgtttaaacgacttgggtatttttgatttaaaagacagtgcgcaaattgcagcgaaagggttagatatatcgattcatactatctatcgctatttacgtgaaatacgtgcgcacgctgaggcggtataa

SEQ ID NO: 10161 - protein, 219 aa, Photobacterium sp. SKA34
MQELTESDYDILHAMENIVDGIAAMWGEHTEVALHCLDNNNPSIMKIANGHITGREVGAPITNFALVKLNEGKDVSDSYITKCPDGKTLRSISTIIRNKNNKAIGMLCVNSNLDAPFQSMMQNLLPNIHSHFDHGVTAETFARNNDEMMHSSIENVREQVTNNSNIPLSKKSREIVTRLNDLGIFDLKDSAQIAAKGLDISIHTIYRYLREIRAHAEAV

SEQ ID NO: 10162 - DNA, 612 bp, Vibrio sp. Ex25
  CDS (1)..(612): transl_table=11
atgaaaaacgtcgtggatggcattgcacgtatgtatggtgaacacactgaagtggttctccacagcttagatgccgaagcgccggaaatcatcaaaatcgcaaatgggcacgtgacggaacgcagtgaaggtgccccaattaccaacttagcgagaatgaagttaagagagggcaaggacgtttctgattcgtacttgacgaaaacgtcgaacggaaagaccttgcactccattacgaccattgtcagaaatccaaaaaacaaaccgattggtttgctgtgtatcaacgtggatatggatgcaccgatgcaggcatttttaaaggcaatgctgcctcagcaacacaccgagtgttgtgttggtggcgctcgatcaccagaaacgtttgcgcgtaatatcgatgaaaccatcatcagtacgatagaaaccgtgcaaacagaagtgtgggaaaatgaagccattgcgccttctaaacgtaaccgtgaactggtgacgcgactgcacggcttaggcatttttaaatacaaagatgctgttttaatggttgcaaaccatcttggcatttcgcgcgataccatctacttgtacttacgagagcttggtaacgactaa

SEQ ID NO: 10163 - protein, 203 aa, Vibrio sp. Ex25
MKNVVDGIARMYGEHTEVVLHSLDAEAPEIIKIANGHVTERSEGAPITNLARMKLREGKDVSDSYLTKTSNGKTLHSITTIVRNPKNKPIGLLCINVDMDAPMQAFLKAMLPQQHTECCVGGARSPETFARNIDETIISTIETVQTEVWENEAIAPSKRNRELVTRLHGLGIFKYKDAVLMVANHLGISRDTIYLYLRELGND

SEQ ID NO: 10164 - DNA, 735 bp, Escherichia coli O6
  CDS (13)..(735): transl_table=11
gtgttttttttcatgtccaggtcgcttttaaccaacgaaaccagtgagttggatttactggatcaacgtcctttcgaccagaccgattttgatattctgaaatcctacgaagcggtggtggacgggttagcgatgcttattggctcccactgtgaaatcgttttgcactctttgcaggatctaaaatgttcagccattcgcattgctaacggtgaacatacaggccggaagattggttcgccaattactgacctggcgctacgtatgctgcacgatatgacgggagcggatagcagcgtttctaaatgctactttactcgcgccaaaagcggcgtattaatgaagtccctgactatcgcgattcgtaaccgcgaacagcgtgtaattggtctgctgtgcatcaatatgaatcttgatgttcccttctcgcagattatgagcacctttgtgccgccagaaaccccggatgtcggttcaagcgtcaactttgcctcttctgttgaagatctggttacccaaacgctggagttcaccatcgaagaagtgaatgccgatcgcaatgtttctaataacgccaaaaatcgtcagatcgtgctgaatctctacgagaaagggatcttcgatattaaagatgcgatcaaccaggttgctgaccgcctgaacatctccaaacacactgtctatctctacatccgccagttcaagagcggtgatttccaggggcaagataagtaa

SEQ ID NO: 10165 - protein, 240 aa, Escherichia coli O6
MSRSLLTNETSELDLLDQRPFDQTDFDILKSYEAVVDGLAMLIGSHCEIVLHSLQDLKCSAIRIANGEHTGRKIGSPITDLALRMLHDMTGADSSVSKCYFTRAKSGVLMKSLTIAIRNREQRVIGLLCINMNLDVPFSQIMSTFVPPETPDVGSSVNFASSVEDLVTQTLEFTIEEVNADRNVSNNAKNRQIVLNLYEKGIFDIKDAINQVADRLNISKHTVYLYIRQFKSGDFQGQDK

SEQ ID NO: 10166 - DNA, 25 bp, Artificial sequence
  primer
atgttttttttcatgtccaggtcgc

SEQ ID NO: 10167 - DNA, 24 bp, Artificial sequence
  primer
ttacttatcttgcccctggaaatc

SEQ ID NO: 10168 - protein, 230 aa, Artificial sequence
  consensus sequence
  Variant (2)..(2): Xaa in position 2 is any amino acid
  Variant (4)..(7): Xaa in position 4 to 7 is any amino acid
  Variant (10)..(15): Xaa in position 10 to 15 is any amino acid
  Variant (17)..(19): Xaa in position 17 to 19 is any amino acid
  Variant (21)..(21): Xaa in position 21 is any amino acid
  Variant (25)..(25): Xaa in position 25 is any amino acid
  Variant (27)..(31): Xaa in position 27 to 31 is any amino acid
  Variant (33)..(35): Xaa in position 33 to 35 is any amino acid
  Variant (40)..(41): Xaa in position 40 to 41 is any amino acid
  Variant (43)..(43): Xaa in position 43 is any amino acid
  Variant (45)..(46): Xaa in position 45 to 46 is any amino acid
  Variant (48)..(48): Xaa in position 48 is any amino acid
  Variant (50)..(50): Xaa in position 50 is any amino acid
  Variant (52)..(53): Xaa in position 52 to 53 is any amino acid
  Variant (54)..(62): Xaa in position 54 to 62 is any or no amino acid
  Variant (65)..(66): Xaa in position 65 to 66 is any amino acid
  Variant (68)..(76): Xaa in position 68 to 76 is any amino acid
  Variant (77)..(80): Xaa in position 77 to 80 is any or no amino acid
  Variant (82)..(82): Xaa in position 82 is any amino acid
  Variant (84)..(86): Xaa in position 84 to 86 is any amino acid
  Variant (87)..(88): Xaa in position 87 to 88 is any or no amino acid
  Variant (90)..(93): Xaa in position 90 to 93 is any amino acid
  Variant (95)..(95): Xaa in position 95 is any amino acid
  Variant (97)..(98): Xaa in position 97 to 98 is any amino acid
  Variant (101)..(105): Xaa in position 101 to 105 is any amino acid
  Variant (106)..(106): Xaa in position 106 is any or no amino acid
  Variant (109)..(109): Xaa in position 109 is any amino acid
  Variant (114)..(118): Xaa in position 114 to 118 is any amino acid
  Variant (119)..(130): Xaa in position 119 to 130 is any or no amino acid
  Variant (132)..(140): Xaa in position 132 to 140 is any amino acid
  Variant (142)..(151): Xaa in position 142 to 151 is any amino acid
  Variant (152)..(160): Xaa in position 152 to 160 is any or no amino acid
  Variant (163)..(191): Xaa in position 163 to 191 is any amino acid
  Variant (192)..(194): Xaa in position 192 to 194 is any or no amino acid
  Variant (197)..(198): Xaa in position 197 to 198 is any amino acid
  Variant (200)..(202): Xaa in position 200 to 202 is any amino acid
  Variant (206)..(207): Xaa in position 206 to 207 is any amino acid
  Variant (210)..(213): Xaa in position 210 to 213 is any amino acid
  Variant (216)..(217): Xaa in position 216 to 217 is any amino acid
  Variant (219)..(219): Xaa in position 219 is any amino acid
  Variant (222)..(223): Xaa in position 222 to 223 is any amino acid
  Variant (225)..(225): Xaa in position 225 is any amino acid
  Variant (227)..(227): Xaa in position 227 is any amino acid
  Variant (229)..(229): Xaa in position 229 is any amino acid
LXSXXXXVDXXXXXXGXXXEXVLHXLXXXXXSXXXIANGXXTXRXXGXPXTXXXXXXXXXXXALXXLXXXXXXXXXXXXXYXTXXXXXGXXXXSXTXXIRXXXXXXIGXLCINXXXXXXXXXXXXXXXXXPXXXXXXXXXPXXXXXXXXXXXXXXXXXXXFAXXXXXXXXXXXXXXXXXXXXXXXXXXXXXXXXIVXXLXXXGIFXXKDXXXXVAXXLXISXXTXYXYXR

SEQ ID NO: 10169 - protein, 44 aa, Artificial sequence
  protein pattern
  Variant (2)..(2): Xaa in position 2 is Asp, Glu, Asn or Gln
  Variant (3)..(3): Xaa in position 3 is any amino acid
  Variant (4)..(4): Xaa in position 4 is Phe, Ile, Leu or Val
  Variant (5)..(5): Xaa in position 5 is Ala, Gly or Ser
  Variant (6)..(8): Xaa in position 6 to 8 is any amino acid
  Variant (10)..(12): Xaa in position 10 to 12 is any amino acid
  Variant (14)..(14): Xaa in position 14 is any or no amino acid
  Variant (16)..(16): Xaa in position 16 is any or no amino acid
  Variant (19)..(19): Xaa in position 19 is any amino acid
  Variant (20)..(20): Xaa in position 20 is Ala, Ile, Leu or Val
  Variant (21)..(27): Xaa in position 21 to 27 is any amino acid
  Variant (28)..(28): Xaa in position 28 is Ile, Leu, Met or Val
  Variant (29)..(29): Xaa in position 29 is any amino acid
  Variant (33)..(33): Xaa in position 33 is Glu, Gly or Asn
  Variant (34)..(34): Xaa in position 34 is Glu or His
  Variant (35)..(35): Xaa in position 35 is any amino acid
  Variant (36)..(36): Xaa in position 36 is Ser or Thr
  Variant (37)..(37): Xaa in position 37 is Asp, Glu, Gly or Asn
  Variant (39)..(40): Xaa in position 39 to 40 is any amino acid
  Variant (41)..(41): Xaa in position 41 is Glu or Gly
  Variant (42)..(42): Xaa in position 42 is Ala, Gly, Asn or Ser
  Variant (43)..(43): Xaa in position 43 is Pro or Ser
  Variant (44)..(44): Xaa in position 44 is Ile, Leu or Met
VXXXXXXXGXXXEXVXLHXXXXXXXXXXXIANXXXXXRXXXXXX

SEQ ID NO: 10170 - protein, 39 aa, Artificial sequence
  protein pattern
  Variant (2)..(5): Xaa in position 2 to 5 is any amino acid
  Variant (6)..(10): Xaa in position 6 to 10 is any or no amino acid
  Variant (14)..(15): Xaa in position 14 to 15 is any amino acid
  Variant (17)..(17): Xaa in position 17 is Asp or Gly
  Variant (18)..(18): Xaa in position 18 is Ala or Ser
  Variant (19)..(19): Xaa in position 19 is Ala, Ile or Val
  Variant (20)..(21): Xaa in position 20 to 21 is any amino acid
  Variant (22)..(22): Xaa in position 22 is Ala, Ile or Val
  Variant (24)..(25): Xaa in position 24 to 25 is any amino acid
  Variant (27)..(27): Xaa in position 27 is Asp, Gly or Asn
  Variant (30)..(31): Xaa in position 30 to 31 is any amino acid
  Variant (32)..(32): Xaa in position 32 is Ser or Thr
  Variant (33)..(33): Xaa in position 33 is Ile or Val
  Variant (35)..(35): Xaa in position 35 is any amino acid
  Variant (36)..(36): Xaa in position 36 is His or Tyr
  Variant (37)..(37): Xaa in position 37 is Ile or Leu
  Variant (38)..(38): Xaa in position 38 is Asp or Arg
  Variant (39)..(39): Xaa in position 39 is Glu, Asn or Gln
RXXXXXXXXXGIFXXKXXXXXXAXXLXISXXXXYXXXXX

SEQ ID NO: 10171 - protein, 11 aa, Artificial sequence
  protein pattern
  Variant (3)..(3): Xaa in position 3 is Phe, Leu or Met
  Variant (4)..(4): Xaa in position 4 is Ile or Leu
  Variant (8)..(10): Xaa in position 8 to 10 is any amino acid
  Variant (11)..(11): Xaa in position 11 is Asp, Glu, Ser or Thr
IGXXCINXXXX

SEQ ID NO: 10172 - DNA, 1254 bp, Escherichia coli
  CDS (1)..(1254): transl_table=11
atgacattctccctttttggtgacaaatttacccgccactccggcattacgctgttgatggaagatctgaacgacggtttacgcacgcctggcgcgattatgctcggcggcggtaatccggcgcagatcccggaaatgcaggactacttccagacgctactgaccgacatgctggaaagtggcaaagcgactgatgcactgtgtaactacgacggtccacaggggaaaacggagctactcacactgcttgccggaatgctgcgcgagaagttgggttgggatatcgaaccacagaatattgcactaacaaacggcagccagagcgcgtttttctacttatttaacctgtttgccggacgccgtgccgatggtcgggtcaaaaaagtgctgttcccgcttgcaccggaatacattggctatgctgacgccggactggaagaagatctgtttgtctctgcgcgtccgaatattgaactgctgccggaaggccagtttaaataccacgtcgattttgagcatctgcatattggcgaagaaaccgggatgatttgcgtctcccggccgacgaatccaacaggcaatgtgattactgacgaagagttgctgaagcttgacgcgctgggcaatcaacacggcattccgctggtgattgataacgcttatggcgtcccgttcccgggtatcatcttcagtgaagcgcgcccgctatggaatccgaatatcgtgctgtgcatgagtctttccaagctgggtctacctggctcccgctgcggcattatcatcgccaatgaaaaaatcatcaccgccatcaccaatatgaacggcattatcagcctggcacctggcggtattggtccggcgatgatgtgtgaaatgattaagcgtaacgatctgctgcgcctgtctgaaacagtcatcaaaccgttttactaccagcgtgttcaggaaactatcgccatcattcgccgctatttaccggaaaatcgctgcctgattcataaaccggaaggagccattttcctctggctatggtttaaggatttgcccattacgaccaagcagctctatcagcgcctgaaagcacgcggcgtgctgatggtgccggggcacaacttcttcccagggctggataaaccgtggccgcatacgcatcaatgtatgcgcatgaactacgtaccagagccggagaaaattgaggcgggggtgaagattctggcggaagagatagaaagagcctgggctgaaagtcactaa

SEQ ID NO: 10173 - protein, 417 aa, Escherichia coli
MTFSLFGDKFTRHSGITLLMEDLNDGLRTPGAIMLGGGNPAQIPEMQDYFQTLLTDMLESGKATDALCNYDGPQGKTELLTLLAGMLREKLGWDIEPQNIALTNGSQSAFFYLFNLFAGRRADGRVKKVLFPLAPEYIGYADAGLEEDLFVSARPNIELLPEGQFKYHVDFEHLHIGEETGMICVSRPTNPTGNVITDEELLKLDALGNQHGIPLVIDNAYGVPFPGIIFSEARPLWNPNIVLCMSLSKLGLPGSRCGIIIANEKIITAITNMNGIISLAPGGIGPAMMCEMIKRNDLLRLSETVIKPFYYQRVQETIAIIRRYLPENRCLIHKPEGAIFLWLWFKDLPITTKQLYQRLKARGVLMVPGHNFFPGLDKPWPHTHQCMRMNYVPEPEKIEAGVKILAEEIERAWAESH

SEQ ID NO: 10174 - DNA, 1257 bp, Vibrio cholerae
  CDS (1)..(1257): transl_table=11
atgcagtattcctcttttggcgaaaagtttaatcgctactccggtattacccagttaatggatgatttgaacgatggtctgcgcactccaggcgcgatcatgcttggtggcggtaatcctgctgccatccctgccatgctcgattatttccataacaccagcgccgaaatgttggccgatggttcactgctcaatgccatgaccaattacgatggtccacagggcaaagatgtgtttgtaaaatcgctcgctacactgctgcgtgagacgtatggctggaatatcagcgaaaagaacatcaccttgaccaacggcagccagagtggctttttctacctgtttaacttgtttgccggtaaacagcccgatggtgcacacaaaaaaatcctcctacccctcgcgcccgaatacattggctacggtgatgctggcattgatgacgatatttttgtctcctaccgtccggagattgagctgctcgatcaaggactgttcaaataccatgtggacttttctgagctgaaagtcgatgaatcggtggccgcgatctgtgtgtctcgccccaccaacccaaccggtaacgtgttaaccgaagaggaaatccacaaactcgaccaactggcacgtgataacggtgtgccgttaattatcgacaatgcttacggcgtgccattcccgaatatcatttttgaagacattgaaccgttttggaatgacaacaccatcttgtgcatgagcctatccaaactgggcttgcccggtctgcgctgcggcattgtgatcgccaatgaagcggtaactcaagcgctgaccaacatgaatggcatcattagcttagcacccggcagtatgggacccgcactggtgcaacgcatgatagaaaaaggcgatctgctgagacttagcgagcaggtgatcaagccgttttatcgccaaaaagcgcaacatgcggtagagctgctgcaaagtgcgattacggatccgcgttttcgcatccataaacccgaaggggcgatcttcctctggctgtggtttgatgaactgccgatcaccacaatggagctttaccaacgtttgaaagcgcgtggggtattgattgtaccgggcgaatatttctttatcggccagccgcaagaatggccacacgctcatgagtgcttgcgtatgaactatgtgcagaacgagcaagcgatggaacaaggcattgccatcatcgccgaagaagtacaaaaagcgtatcaacaagccaacgtctaa

SEQ ID NO: 10175 - protein, 418 aa, Vibrio cholerae
MQYSSFGEKFNRYSGITQLMDDLNDGLRTPGAIMLGGGNPAAIPAMLDYFHNTSAEMLADGSLLNAMTNYDGPQGKDVFVKSLATLLRETYGWNISEKNITLTNGSQSGFFYLFNLFAGKQPDGAHKKILLPLAPEYIGYGDAGIDDDIFVSYRPEIELLDQGLFKYHVDFSELKVDESVAAICVSRPTNPTGNVLTEEEIHKLDQLARDNGVPLIIDNAYGVPFPNIIFEDIEPFWNDNTILCMSLSKLGLPGLRCGIVIANEAVTQALTNMNGIISLAPGSMGPALVQRMIEKGDLLRLSEQVIKPFYRQKAQHAVELLQSAITDPRFRIHKPEGAIFLWLWFDELPITTMELYQRLKARGVLIVPGEYFFIGQPQEWPHAHECLRMNYVQNEQAMEQGIAIIAEEVQKAYQQANV

SEQ ID NO: 10176 - DNA, 1293 bp, Neisseria meningitidis Z2491
  CDS (1)..(1293): transl_table=11
atgcagttttcagcattcggcgaaaaattcacgcaacacagcggcatcctccaactgatggacgacctcggcgacgcgctcaaaagcgacaagcccgtcaacatgctcggcggcggcaacccggcgcgcattccggaaatcgatcgggcgtttgccggcatattctccaaactggcggcagaacacgccgtcgaaaacatcggcaactactccaatccccaaggcgatgccgtgctgattgacgcgctgaccgccttcctcaaccgcgaatacggctggaacctgaccgccgacaatatcgcgctgaccaacggttcgcaaaacgcgtttttctatttattcaacctcttcggcggcaaattcaagctttcagacggcacatccgcagaaaaagccattttgttgccgctcgcgcccgaatacatcggctatgccgacgtgcatatcgaagggcggcactttgtttccgtcaaacccaaaatcgaaaacgtcgaacacgaaggcgaagcaggcttcttcaaataccgcgtggactttgacgcgctggaaagcctgcccgggctgaaagaagaaaaaatcggcgcgatttgctgttcgcgcccgaccaacccgaccggcaatgtgttgaccgacggcgaaatggcgcgcttggatgctttggcgcgtgaacacggcattccgctgattatcgacaacgcctacggaatgccgttccccaacatcatttacagcgacgtaacgctgaattggcacgaaaacatcatcctctgcttcagcctttccaaagtcggcctgccgggcgttcgcaccggcatcattgtcgccgcgccggaagtcgtcaaagccgtcagcagcctgaacgcgattgtgaaccttgcccccacgcgcttcggcgcggccatcgccgccccgctgctggaaagcggcgagatgaaacggcttgccgaccaagtcatccggccgttttaccgcaatcaggcgcaaaccgccgtctcgctgctcaagcgggagctgggcgcgtacccgatgaaaatccacaaacccgaaggcgcgattttcctgtggctctggtttgaaaacctgcccgttccttcgcaaaccctgtacgaaatgctcaaagccgaaggcacgctgattattccgggcgagcatttcttcatcggcatcgacacgcgggattatccgcacgcgggcgagtgcattcgtatgagcatcgcgcaggatgcggaaacgctggaaaaaggcattgccgccatcggtaagaccgtccgaaaactgtacgacaacgtttaa

SEQ ID NO: 10177 - protein, 430 aa, Neisseria meningitidis Z2491
MQFSAFGEKFTQHSGILQLMDDLGDALKSDKPVNMLGGGNPARIPEIDRAFAGIFSKLAAEHAVENIGNYSNPQGDAVLIDALTAFLNREYGWNLTADNIALTNGSQNAFFYLFNLFGGKFKLSDGTSAEKAILLPLAPEYIGYADVHIEGRHFVSVKPKIENVEHEGEAGFFKYRVDFDALESLPGLKEEKIGAICCSRPTNPTGNVLTDGEMARLDALAREHGIPLIIDNAYGMPFPNIIYSDVTLNWHENIILCFSLSKVGLPGVRTGIIVAAPEVVKAVSSLNAIVNLAPTRFGAAIAAPLLESGEMKRLADQVIRPFYRNQAQTAVSLLKRELGAYPMKIHKPEGAIFLWLWFENLPVPSQTLYEMLKAEGTLIIPGEHFFIGIDTRDYPHAGECIRMSIAQDAETLEKGIAAIGKTVRKLYDNV

SEQ ID NO: 10178 - DNA, 1266 bp, Yersinia pestis CO92
  CDS (1)..(1266): transl_table=11
atgaagttttcacttttcggcgacaaatttacccgttatgcgggtattaccagattgatggatgacctcaacgatggcctgagaacaccgggttctatcatgcttggtggcggaaatccggcacatatccctgagatggatacctacttccaacaactgtgtcaggagatgctaacagaaggcaagttaaccgaggcattgtgtaattacgacgggccgcaaggtaaagacttactgctaaaagcactggcaaaaatgctgcgcgatgagctgggttggcagatagagccacagaatattgcactgacaaatggcagtcagagtgcatttttctacttatttaatttgttcgctggccgttatgccgatggtagccgccgtcgggtgctgttcccactggcgccagagtatctgggctatgcggatgcaggtctggatgaagatttatttgtctccgccaaaccgaatattgagctgttacccgaggggcagtttaaatatcacgtggattttgaacacctcaatattactgatgatattggcttgatatgcgtatcaaggcccacaaaccccaccggtaatgtcattactgacgaagagttaatccgtcttgatgctatcgcgcagcaacgtaatattccgttattgattgataatgcttatggcgtccccttccctggtattatttttaccgacgccacaccgctgtggaacccgaacatcatcttgtgcatgagcctgtcaaaactgggcctaccaggttcacgatgcgggattgtcattgccgatgaaaaagtgatttcggccatcaccaatatgaacggtattatcagcctgtcaccgggcgggatggggcccgcgatcgccgccgaaatgattgagcgtggtgatttattgcgcttatccaacgaggtgatccggccgttttactttgaacgtgtacagcagaccatcgccatcttgcgcaaatacctgcccgctgaacgctgcctgatccacaaacccgaaggcgctattttcctctggctgtggtttaaagatttgccaatcagcaccgaactgctctatcagcgcctgaaaaaacgtggtgttctgatggtaccgggccattacttcttccccggtctgggctatgactggccacatactcaccaatgtatgcgaatgaattatgtgccggctccggaaatgattgaaaaaggtgtcgcgatcttggcggaagagattgaacgagcgtttcaggaagcgaaacaacttactgattaa

SEQ ID NO: 10179 - protein, 421 aa, Yersinia pestis CO92
MKFSLFGDKFTRYAGITRLMDDLNDGLRTPGSIMLGGGNPAHIPEMDTYFQQLCQEMLTEGKLTEALCNYDGPQGKDLLLKALAKMLRDELGWQIEPQNIALTNGSQSAFFYLFNLFAGRYADGSRRRVLFPLAPEYLGYADAGLDEDLFVSAKPNIELLPEGQFKYHVDFEHLNITDDIGLICVSRPTNPTGNVITDEELIRLDAIAQQRNIPLLIDNAYGVPFPGIIFTDATPLWNPNIILCMSLSKLGLPGSRCGIVIADEKVISAITNMNGIISLSPGGMGPAIAAEMIERGDLLRLSNEVIRPFYFERVQQTIAILRKYLPAERCLIHKPEGAIFLWLWFKDLPISTELLYQRLKKRGVLMVPGHYFFPGLGYDWPHTHQCMRMNYVPAPEMIEKGVAILAEEIERAFQEAKQLTD

SEQ ID NO: 10180 - DNA, 1251 bp, Salmonella typhimurium LT2
  CDS (1)..(1251): transl_table=11
atgacattttcacttttcggcgataaatttacccgccattcaggcattacccgcctgatggaggatctcaacgacggcttacgcacgccaggcgccatcatgcttggcggcggtaacccggcacacatccctgcaatgcaggattatttccagacgctactgacagatatggtagaaagcggcaaagccgctgatgcgctttgtaattatgacggtccccagggaaaaacggcgctactgaatgcactggccgtactgctacgtgaaacgctgggatgggatatcgaaccacagaatattgcgctgacaaatggcagtcagagcgcgtttttctacttatttaatctcttcgccggacgtcgcgccgacggcagtacgaaaaaggtactattcccgcttgcgccggaatacatcggctatgcagattccggtctggaagacgacctcttcgtttcggcgcggccgaatattgaactgctgccggaaggccagtttaagtatcacgtcgattttgagcatctgcacatcggcgaagaaacggggatgatttgcgtctcgcgcccaaccaacccaaccggtaacgttatcaccgacgaagagctgatgaagctggacagactggcgaatcagcacaacatcccactggtgattgataacgcttacggtgtaccgtttccgggcattatctttagcgaggcgcgcccgctgtggaaccccaatattatcctatgcatgagcctctcgaagctggggctgcccggttcccgctgcgggattatcatcgccaatgataagacgattaccgccattgccaacatgaacggcatcatcagccttgcgcccgggggcatgggcccggcgatgatgtgcgaaatgattaagcgtaacgatctgctgcggctgtcggaaacggttatcaaacctttctactatcagcgcgttcaacagacgatcgcgatcattcgtcgctatttatccgaagaacgctgcctgattcataaaccagaaggcgcaatatttttgtggctgtggtttaaagatctgccgattaccaccgagttactctatcaacgcttgaaagcgcgcggcgtgctgatggtgccgggccactatttctttcccggactggataaaccctggccgcacacacaccagtgtatgcggatgaactacgtgcctgaaccggacaaaatcgaggcgggcgtaaaaattctggcagaagagatagaacgcgcctggcgtgaaggctga

SEQ ID NO: 10181 - protein, 416 aa, Salmonella typhimurium LT2
MTFSLFGDKFTRHSGITRLMEDLNDGLRTPGAIMLGGGNPAHIPAMQDYFQTLLTDMVESGKAADALCNYDGPQGKTALLNALAVLLRETLGWDIEPQNIALTNGSQSAFFYLFNLFAGRRADGSTKKVLFPLAPEYIGYADSGLEDDLFVSARPNIELLPEGQFKYHVDFEHLHIGEETGMICVSRPTNPTGNVITDEELMKLDRLANQHNIPLVIDNAYGVPFPGIIFSEARPLWNPNIILCMSLSKLGLPGSRCGIIIANDKTITAIANMNGIISLAPGGMGPAMMCEMIKRNDLLRLSETVIKPFYYQRVQQTIAIIRRYLSEERCLIHKPEGAIFLWLWFKDLPITTELLYQRLKARGVLMVPGHYFFPGLDKPWPHTHQCMRMNYVPEPDKIEAGVKILAEEIERAWREG

SEQ ID NO: 10182 - DNA, 1353 bp, Nostoc sp. PCC 7120
  CDS (1)..(1353): transl_table=11
atgatattggtctgctgcactagactcatatttttgtcaacccttcaattatctttactgttaaagcttatgaaccctgccctaactaaaattggcgatcaaatgtccaacctgactggtgtacgagcgattatgaaggacattatcgaaacgttgaagtctggtggagggcaggatttaattaatttgagtgcggggaacccgttgattttgccagaggtagaacagttatggcgggactgcacagcagaactcttagcaagtcaagaatatggtgaagtagtttgtcgctatggttctagtcaaggctatgcgccattaattgaagcggttgtgaaagattttaaccgtcgctatggtctgaatttaaccgatcgcaacatcttaatcactccgggtagtcaaactctgtacttttatgctgctaatgttttcggcggttacaccagtagcggcgacctcaagcaaattgttttacccctgagtcccgattacactggctacggtggtatttgtctagttcccgaagctttagttgcttacaaaccttctctagatattgatgcagcagcacacagctttaaatatcgccccgattttagccaagtgtctatttccgaaagcaccggctgcgtcattttctcccgcccctgtaaccctacaggcaacgtcctcacagatgacgaagtgagaaaaattgccgcccttgccgcaccttataatgtgccagtgctgattgattcggcttacgctcccccattcccggcgttgaacttcacggatatgtcgctgatttttggggaaaatattcttcattgcaccagcttatcgaaagcgggtttaccaggggagagaattggtattgctatcggtaatgaaagattaattcaagtcctagaatctttccagactaatgctagtttacattcctcacgctatgggcaggcgatcgccgctcgtgccattaactctggtgcgttggcacaaatcgcggaacaagttatccgtcccttctacaaaaacaaattcgccatcgtcgagaatgccttagaagcagccatgcccaaagaattaccttggttcctccatcgtggtgaaggtgctatctttagttggctatggttacaagatttgcccatcacagattgggaattataccaagaactcaaaaaagttggggtaattgtcgtccctggtagtacattcttccctggcttaaaagaagaatgggcgcacaaacaccaatgtgtccgcatcagcttgactggtagcgatactgaaatcgcccttggtatgcagcgtctagcaaaagcagtcgaacaaatttaccagcgtacacccattagtgcttaa

SEQ ID NO: 10183 - protein, 450 aa, Nostoc sp. PCC 7120
MILVCCTRLIFLSTLQLSLLLKLMNPALTKIGDQMSNLTGVRAIMKDIIETLKSGGGQDLINLSAGNPLILPEVEQLWRDCTAELLASQEYGEVVCRYGSSQGYAPLIEAVVKDFNRRYGLNLTDRNILITPGSQTLYFYAANVFGGYTSSGDLKQIVLPLSPDYTGYGGICLVPEALVAYKPSLDIDAAAHSFKYRPDFSQVSISESTGCVIFSRPCNPTGNVLTDDEVRKIAALAAPYNVPVLIDSAYAPPFPALNFTDMSLIFGENILHCTSLSKAGLPGERIGIAIGNERLIQVLESFQTNASLHSSRYGQAIAARAINSGALAQIAEQVIRPFYKNKFAIVENALEAAMPKELPWFLHRGEGAIFSWLWLQDLPITDWELYQELKKVGVIVVPGSTFFPGLKEEWAHKHQCVRISLTGSDTEIALGMQRLAKAVEQIYQRTPISA

SEQ ID NO: 10184 - DNA, 1371 bp, Yersinia pestis KIM
  CDS (1)..(1371): transl_table=11
atggcgatattttcacgcagtcagaagaaattcttccgcattgcgtccgcttttatctgcgagtatggtacttgttcacttacagataacaatacattttcatttatgaagttttcacttttcggcgacaaatttacccgttatgcgggtattaccagattgatggatgacctcaacgatggcctgagaacaccgggttctatcatgcttggtggcggaaatccggcacatatccctgagatggatacctacttccaacaactgtgtcaggagatgctaacagaaggcaagttaaccgaggcattgtgtaattacgacgggccgcaaggtaaagacttactgctaaaagcactggcaaaaatgctgcgcgatgagctgggttggcagatagagccacagaatattgcactgacaaatggcagtcagagtgcatttttctacttatttaatttgttcgctggccgttatgccgatggtagccgccgtcgggtgctgttcccactggcgccagagtatctgggctatgcggatgcaggtctggatgaagatttatttgtctccgccaaaccgaatattgagctgttacccgaggggcagtttaaatatcacgtggattttgaacacctcaatattactgatgatattggcttgatatgcgtatcaaggcccacaaaccccaccggtaatgtcattactgacgaagagttaatccgtcttgatgctatcgcgcagcaacgtaatattccgttattgattgataatgcttatggcgtccccttccctggtattatttttaccgacgccacaccgctgtggaacccgaacatcatcttgtgcatgagcctgtcaaaactgggcctaccaggttcacgatgcgggattgtcattgccgatgaaaaagtgatttcggccatcaccaatatgaacggtattatcagcctgtcaccgggcgggatggggcccgcgatcgccgccgaaatgattgagcgtggtgatttattgcgcttatccaacgaggtgatccggccgttttactttgaacgtgtacagcagaccatcgccatcttgcgcaaatacctgcccgctgaacgctgcctgatccacaaacccgaaggcgctattttcctctggctgtggtttaaagatttgccaatcagcaccgaactgctctatcagcgcctgaaaaaacgtggtgttctgatggtaccgggccattacttcttccccggtctgggctatgactggccacatactcaccaatgtatgcgaatgaattatgtgccggctccggaaatgattgaaaaaggtgtcgcgatcttggcggaagagattgaacgagcgtttcaggaagcgaaacaacttactgattaa

SEQ ID NO: 10185 - protein, 456 aa, Yersinia pestis KIM
MAIFSRSQKKFFRIASAFICEYGTCSLTDNNTFSFMKFSLFGDKFTRYAGITRLMDDLNDGLRTPGSIMLGGGNPAHIPEMDTYFQQLCQEMLTEGKLTEALCNYDGPQGKDLLLKALAKMLRDELGWQIEPQNIALTNGSQSAFFYLFNLFAGRYADGSRRRVLFPLAPEYLGYADAGLDEDLFVSAKPNIELLPEGQFKYHVDFEHLNITDDIGLICVSRPTNPTGNVITDEELIRLDAIAQQRNIPLLIDNAYGVPFPGIIFTDATPLWNPNIILCMSLSKLGLPGSRCGIVIADEKVISAITNMNGIISLSPGGMGPAIAAEMIERGDLLRLSNEVIRPFYFERVQQTIAILRKYLPAERCLIHKPEGAIFLWLWFKDLPISTELLYQRLKKRGVLMVPGHYFFPGLGYDWPHTHQCMRMNYVPAPEMIEKGVAILAEEIERAFQEAKQLTD

SEQ ID NO: 10186 - DNA, 1302 bp, Thermosynechococcus elongatus BP-1
  CDS (1)..(1302): transl_table=11
atgaatcctgcactctcccagattggccagcaaatgtcccaactgacgggagttcgggcaatcatgaaggatattatcgagacactgcgcctgaatcgtggccaagacctgattaacctgagtgcaggcaaccccctcattgtccctgaggttgagcaactgtggcgggactgtacccacgagctgctggccagcccagaattcggtcaagtggtctgccgctatggtcccagccaggggtatgaaccgttgattgctgcggtggtggatgactttaatcgccgctatggtctgaacttgacggagcgcaatgtccttgtaacgcccgggagtcaggcgatctacttctttgcagccaatgcctttggtgggctgagttccagtggtgaattaaagaaagtggtgctccccttaagtcccgaatacacggggtatgggggggtcagtctggcgcccaatagcgtcgttgcctatcgtccacgccttgagatttttgaggccgatcacacgtttaagtatcgtccggactttcaacaactgcacattgatgacaccacgggctgtgtcattttctcccgtccctgcaatccaacgggaaatgtactcacagacctagaggtgcggcaaattgctgatctgggggtgccctatggcgtgccggtgttgattgatgctgcctatgggccgccctaccccagtttgaactttaccgagctagcgcccgtttttggcggtaacattgttcactgcctcagcctttcaaaggcaggactgccgggggaacgggtggggattgccattggcgatcgcgagattttgagtgtccttgaagcctttcaaaccaatgcctgcattcatgcctcgcgctacggtcaggcgatcgccgctttagccattgccaacggtgccctagccgaagtgtccgtcaatgtcattcgtcccttctatcaacgcaagttcgccgttctagaggaaaccttacgcgccgccatggccaatgatataccgtggtttttacatcgcggcgaggggggcatttttgcctggctgtggctgcgggatttgccgatgagcgactgggaactctaccaacacttgaagcgagcaggggtcattgtcgttcccggcagttcctttttccccggtctgagcgcgccgtggcggcacaagcaggagtgcttacgcattagtctcactgccagtgacgaggaaattgcccttggcatgcaacgcctcgccgccaccattacacaggtttaccaagaatcccctaactgctcctattctgatgtgttggcgtag

SEQ ID NO: 10187 - protein, 433 aa, Thermosynechococcus elongatus BP-1
MNPALSQIGQQMSQLTGVRAIMKDIIETLRLNRGQDLINLSAGNPLIVPEVEQLWRDCTHELLASPEFGQVVCRYGPSQGYEPLIAAVVDDFNRRYGLNLTERNVLVTPGSQAIYFFAANAFGGLSSSGELKKVVLPLSPEYTGYGGVSLAPNSVVAYRPRLEIFEADHTFKYRPDFQQLHIDDTTGCVIFSRPCNPTGNVLTDLEVRQIADLGVPYGVPVLIDAAYGPPYPSLNFTELAPVFGGNIVHCLSLSKAGLPGERVGIAIGDREILSVLEAFQTNACIHASRYGQAIAALAIANGALAEVSVNVIRPFYQRKFAVLEETLRAAMANDIPWFLHRGEGGIFAWLWLRDLPMSDWELYQHLKRAGVIVVPGSSFFPGLSAPWRHKQECLRISLTASDEEIALGMQRLAATITQVYQESPNCSYSDVLA

SEQ ID NO: 10188 - DNA, 1254 bp, Shigella flexneri 2a str. 301
  CDS (1)..(1254): transl_table=11
atgacattctccctttttggtgacaaatttacccgccactccggcattacgctgctgatggaagatctgaacgacggtttacgcacgcctggcgcgattatgctcggcggcggtaatccggcgcagatcccggaaatgcaggactacttccagacgctactgaccgacatgctggaaagtggcaaagcgactgatgcactgtgtaactacgacggtccacaggggaaaacggagctactcacactgcttgccggaatgctgcgcgagaagttgggttgggatatcgaaccacagaatattgcactaacaaacggcagccagagcgcgtttttctacttatttaacctgtttgccggacgccgtgccgatggtcgggtcaaaaaagtgctgttcccgctggcaccggaatacattggctacgctgacgccggactggaagaagatctgtttgtctctgcgcgtccgaatattgaactgctgccggaaggccagtttaaataccacgtcgattttgagcatctgcatattggcgaagaaaccgggatgatttgcgtctcccggccgacgaatccaacaggtaatgtgattactgacgaagagttgctgaagcttgacgcgctggcgaatcaacacggcattccgctggtgattgataacgcttatggcgtcccgttcccgggtatcatcttcagtgaagggcgcccgctatggaatccgaatatcgtactgtgcatgagtctttccaagctggggctgcctggctcccgctgcggcattatcatcgccaatgaaaaaatcatcactgccatcaccaatatgaacggcattatcagcctggcacctggcggtattggtccggcgatgatgtgtgaaatgattaagcgtaacgatctgctgcgcctgtctgaaacagtcatcaaaccgttttactaccagcgtgttcaggaaactatcgccatcattcgccgctatttaccggaaaatcgctgcctgattcataaaccggaaggagccattttcctctggctatggtttaaggatttgcccattacgaccgagcagctctatcagcgcctgaaagcacgcggcgtgctgatggtgccggggcacaacttcttcccgggactggataaaccgtggccgcatacgcatcaatgtatgcgcatgaactacgtaccagagccggagaaaattgaggcgggggtgaagattctggcggaagagatagaaagagcctgggctgaaagtcactaa

SEQ ID NO: 10189 - protein, 417 aa, Shigella flexneri 2a str. 301
MTFSLFGDKFTRHSGITLLMEDLNDGLRTPGAIMLGGGNPAQIPEMQDYFQTLLTDMLESGKATDALCNYDGPQGKTELLTLLAGMLREKLGWDIEPQNIALTNGSQSAFFYLFNLFAGRRADGRVKKVLFPLAPEYIGYADAGLEEDLFVSARPNIELLPEGQFKYHVDFEHLHIGEETGMICVSRPTNPTGNVITDEELLKLDALANQHGIPLVIDNAYGVPFPGIIFSEGRPLWNPNIVLCMSLSKLGLPGSRCGIIIANEKIITAITNMNGIISLAPGGIGPAMMCEMIKRNDLLRLSETVIKPFYYQRVQETIAIIRRYLPENRCLIHKPEGAIFLWLWFKDLPITTEQLYQRLKARGVLMVPGHNFFPGLDKPWPHTHQCMRMNYVPEPEKIEAGVKILAEEIERAWAESH

SEQ ID NO: 10190 - DNA, 1263 bp, Leptospira interrogans serovar Lai str. 56601
  CDS (1)..(1263): transl_table=11
ttgtacaatatgcaatactcaattttcggtcagaaatttttaaaacaaaccggaatcgggcaattgatggacgatttaagtaatcctcctccgggctcttgtttgttaggtggaggaaatccggcttttattccggaattaatcgaaatttggagagagatcgtatcaaaacaaatcgagtcgggaagtatagataaaattttaggaggttacgaatctccttctggaattttagaacttagagaaacggtcgcttccattttatcggatgaatccggaacaaaaatttctaaagaccaaattgcaattacgaacggaagccagaacgctttctatttcttattaaattttttctctggaaatttcggtaatgaccaaagaaaaaaaatcctttttcctattcttccagaatacatcggttatacggatcaaaccttggagccggattcttttttatcttttgtacctgaaattcgagaaatagaagatcgatattataaatactttatatctttggaaaatttcgattccattccaagttggaaaaaggaggcgggttgtatttgcgtttctcggcccacaaatccaacgggcaatgtgattacggatcaagaacttgagtttttaattgaaagagcaaataacgtaggaattcctttactggtcgacaatgcctacggatttccgtttcccaatgttgtttttggaaaaaattctttcattcatagatctggaatgattcagggttttagtctttctaagttgggtcttcctggagttcggactggctttgtagtgggcgattcggaaacaattactttgctgcatagagccaattcggttatcaatttgacgagcgccaatccgggacaatttattgcattggacctttttcgctctgggcgttggaaagagttgtgtgagaaaataatcttacctttttatctaaaaaaatcgatttttactcaggaggcgatcttaaacaattggagttctcagattgactataaaattcatcaaagtgaaggcgctttttttctttgggtttgggttaggaatttatctctatccgttagcgatctttatccgattttaaaggaagcaggagttatcgtcgttcccggtaaaactttttttccaggaacagactcaaattggtctcatagagaagaatgttttcgattgagttttgccagagaagataaagagatcgaagagggagtcctgaaaattggaaaggtattggaaaaatttttgaaataa

SEQ ID NO: 10191 - protein, 420 aa, Leptospira interrogans serovar Lai str. 56601
MYNMQYSIFGQKFLKQTGIGQLMDDLSNPPPGSCLLGGGNPAFIPELIEIWREIVSKQIESGSIDKILGGYESPSGILELRETVASILSDESGTKISKDQIAITNGSQNAFYFLLNFFSGNFGNDQRKKILFPILPEYIGYTDQTLEPDSFLSFVPEIREIEDRYYKYFISLENFDSIPSWKKEAGCICVSRPTNPTGNVITDQELEFLIERANNVGIPLLVDNAYGFPFPNVVFGKNSFIHRSGMIQGFSLSKLGLPGVRTGFVVGDSETITLLHRANSVINLTSANPGQFIALDLFRSGRWKELCEKIILPFYLKKSIFTQEAILNNWSSQIDYKIHQSEGAFFLWVWVRNLSLSVSDLYPILKEAGVIVVPGKTFFPGTDSNWSHREECFRLSFAREDKEIEEGVLKIGKVLEKFLK

SEQ ID NO: 10192 - DNA, 1200 bp, Vibrio vulnificus CMCP6
  CDS (1)..(1200): transl_table=11
atggacgatttgaatgatggtctgcgcacaccaggtgccatcatgctcggtggaggtaatcctgccgctatcccagccatgctcgaatactttcaccaagccagcgaaaacatgctctctaacggcgaattgcttgcagcactggcaaactacgatggtcctcaaggtaaagatgtctttgttaaagcactggctcgcttactcaaggagacctatggttggaatatcagtgaaaagaacatcagtttgaccaatggcagccaaagcggctttttctacctgtttaatctttttgctggtcaacaacccgacggctcacataaaaaaatcttgctaccgctggcgccagaatacatcggctatgccgatgcggggattgatgaagatatttttgtctcttatcgtcctgagattgagcttctcgataatggcttgttcaaataccacgtggatttcgaacaactcaaactggatgaatctgtcgctgcgatttgtgcctcccgtccaaccaatccaaccggtaacgtgctgacagatgaagaaattcgcaagttggatcagttagccagagacaaccagattcccctcatcattgataacgcctacggtttgccctttccaaatattatctttgaagatgttgaaccattttggaatgaaaacaccattctgtgcatgagtttgtccaaactagggctccctggggttcgctgtggcatcgtcattgcgaatgaagccgtgacccaagccctgaccaatatgaatggcattattagcctcgctccaggcagcgttggccctgctctcggtcactacatgatagaaaaggaagatctactgcacctcagctcagaggtgatcaaaccgttctaccaacaaaaatcgcaacgcgcggttgaactgctccaagccgccatgcccgatgatcgcttccgtatccataaaccggaaggcgcgattttcttatggttgtggtttgatgagcttcctatcaccaccatggaactgtaccaacgcttaaaggctcgaggcgtgctgatcgtgccaggggaatacttctttattggccaagaagataattgggagcatgcccatcagtgtttgcgcatgaactatgtgcaggatgatgagctcatgcagaaaggcattgcgatcattgctgaagaggtcaatcgtgcctattctgaaagagagtcctaa

SEQ ID NO: 10193 - protein, 399 aa, Vibrio vulnificus CMCP6
MDDLNDGLRTPGAIMLGGGNPAAIPAMLEYFHQASENMLSNGELLAALANYDGPQGKDVFVKALARLLKETYGWNISEKNISLTNGSQSGFFYLFNLFAGQQPDGSHKKILLPLAPEYIGYADAGIDEDIFVSYRPEIELLDNGLFKYHVDFEQLKLDESVAAICASRPTNPTGNVLTDEEIRKLDQLARDNQIPLIIDNAYGLPFPNIIFEDVEPFWNENTILCMSLSKLGLPGVRCGIVIANEAVTQALTNMNGIISLAPGSVGPALGHYMIEKEDLLHLSSEVIKPFYQQKSQRAVELLQAAMPDDRFRIHKPEGAIFLWLWFDELPITTMELYQRLKARGVLIVPGEYFFIGQEDNWEHAHQCLRMNYVQDDELMQKGIAIIAEEVNRAYSERES

SEQ ID NO: 10194 - DNA, 1254 bp, Vibrio parahaemolyticus RIMD 2210633
  CDS (1)..(1254): transl_table=11
atgcagttctcaaagtttggtgaaaaatttaatcagtattcaggtattacgcagttaatggacgatttgaatgatggcctacgcacgccaggtgccatcatgctcggtgggggtaacccggccgccattcctgccatgctcgattactttcaccaagccagtgaagaaatgctcgccagtggcgaactcgtcgccgcgctcactaattatgatggccctcagggtaaagacgtgttcgtcaaagcgctcgcacagctgtttcgtgaaacatacggctgggacatcagtgagaagaatattagcctgacgaatggcagccaaagcgggttcttctacctatttaatttgtttgctggtcagcagccagatggttcgcacaaaaaagtcctgttgcctatcgcaccggaatacattggctacggtgatgcaggtatcgatgaagacatttttgtttcgtaccatccagaaatcgagctactcgacaacggcctattcaaatatcacgttgattttgaaaagctcaccgtcgatgactccgtcgcagcaatttgtgcatctcgcccaaccaacccaacaggtaacgtactgactgacgaagaagtgcgtaaactggacaaattggcgcgcgagaacaacatcccactgatcatcgacaatgcgtacggcttgccgttcccgaacatcatttttgaagatgtcgaaccgttctggaatgaaaacaccatcctgtgcatgagcttatctaaacttggcttaccgggtgtgcgatgtgggattgtgattgcgagtgaagaaatcacccaagcactcaccaatatgaatggcatcatcagcttagcgccaggcagtgttggcccagcattggcaaaccacatcatcgctaaaggcgatctactcaaactgagttcagaggtgattaagccgttctacaagcagaaatcacaacgcgcggttgaactgctacaacaggcgattaccgatgagagattccgtatccacaaacctgagggggcgatcttcttgtggttatggtttgatgagttgccaattaccacaatggagttgtaccaacgcttgaaagcgcgtggcgtattgattgttccgggggagtatttctttattggtcagaaagacgagtgggaccatgctcatcagtgcttgcgcatgaactacgttcaagacgatgagatgatgcagaaaggtatcgcgattatcgcggaagaagtcgaaaaggcttaccaacaaggtcagtaa

SEQ ID NO: 10195 - protein, 417 aa, Vibrio parahaemolyticus RIMD 2210633
MQFSKFGEKFNQYSGITQLMDDLNDGLRTPGAIMLGGGNPAAIPAMLDYFHQASEEMLASGELVAALTNYDGPQGKDVFVKALAQLFRETYGWDISEKNISLTNGSQSGFFYLFNLFAGQQPDGSHKKVLLPIAPEYIGYGDAGIDEDIFVSYHPEIELLDNGLFKYHVDFEKLTVDDSVAAICASRPTNPTGNVLTDEEVRKLDKLARENNIPLIIDNAYGLPFPNIIFEDVEPFWNENTILCMSLSKLGLPGVRCGIVIASEEITQALTNMNGIISLAPGSVGPALANHIIAKGDLLKLSSEVIKPFYKQKSQRAVELLQQAITDERFRIHKPEGAIFLWLWFDELPITTMELYQRLKARGVLIVPGEYFFIGQKDEWDHAHQCLRMNYVQDDEMMQKGIAIIAEEVEKAYQQGQ

SEQ ID NO: 10196 - DNA, 1251 bp, Salmonella enterica subsp. enterica serovar Typhi Ty2
  CDS (1)..(1251): transl_table=11
atgacattttcacttttcggcgataaatttacccgccattcaggcattacccgcctgatggaggatctcaacgacggcttacgcacgccaggcgccatcatgcttggcggcggtaacccggcacacatccctgcaatgcaggattatttccagacgctactgacagagatggtagaaagcggcaaagccgctgatgcgctttgtaattatgacggtccccagggaaaaacggcgctactgaatgcactggccgtactgctacgtgaaacgctgggatgggatatcgaaccacagaatattgcgctaacaaatggcagtcagagcgcgtttttctacttatttaatctcttcgccggacgtcgcgccgacggcagtacgaaaaaggtactattcccgcttgcgccggaatacatcggctatgcggattccggtctggaagacgacctcttcgtttcggcgcgcccgaatattgagctgctgccggaaggccagtttaagtatcacgtcgattttgagcatctgcacatcggcgaagaaacggggatgatttgcgtctcgcgcccgaccaacccaaccggtaacgttatcaccgacgaagagctgatgaagctggacagactggcgaatcagcacaacatcccactggtgattgataacgcttacggtgtaccgtttccgggcattatctttagcgaggcgcgcccgctgtggaaccccaatattatcctatgcatgagcctctcaaagctggggctgcccggttcccgctgcgggattatcatcgccaatgataagacgattaccgccattgccaacatgaacggcatcatcagccttgcgcccgggggcatgggcccggcgatgatgtgcgaaatgattaagcgtaacgatctgctgcggctgtcggaaacggttatcaaacctttctactatcagcgcgttcaacagacgatcgcgatcattcgtcgctatttatccgaagaacgctgcctgattcataaaccagaaggcgcaatatttttgtggctgtggtttaaagatctgccgattaccaccgagctactctatcaacgcttgaaagcgcgcggcgtgctgatggtgccgggccactatttctttcccggactggataaaccctggccgcacacacaccagtgtatgcggatgaactacgtgcctgaaccggataaaatcgaggcgggcgtaaaaattctggcagaagagatagaacgcgcctggcgtgaaggctga

SEQ ID NO: 10197 - protein, 416 aa, Salmonella enterica subsp. enterica serovar Typhi Ty2
MTFSLFGDKFTRHSGITRLMEDLNDGLRTPGAIMLGGGNPAHIPAMQDYFQTLLTEMVESGKAADALCNYDGPQGKTALLNALAVLLRETLGWDIEPQNIALTNGSQSAFFYLFNLFAGRRADGSTKKVLFPLAPEYIGYADSGLEDDLFVSARPNIELLPEGQFKYHVDFEHLHIGEETGMICVSRPTNPTGNVITDEELMKLDRLANQHNIPLVIDNAYGVPFPGIIFSEARPLWNPNIILCMSLSKLGLPGSRCGIIIANDKTITAIANMNGIISLAPGGMGPAMMCEMIKRNDLLRLSETVIKPFYYQRVQQTIAIIRRYLSEERCLIHKPEGAIFLWLWFKDLPITTELLYQRLKARGVLMVPGHYFFPGLDKPWPHTHQCMRMNYVPEPDKIEAGVKILAEEIERAWREG

SEQ ID NO: 10198 - DNA, 1254 bp, Photorhabdus luminescens subsp. laumondii TTO1
  CDS (1)..(1254): transl_table=11
atgattttttctcaattcggtaacaagtttacacaagacgcaggtataacccgcctgatgaatgaccttaatcaagggttgcggacacctggtgcaattatgctgggtggtggtaatccggcacatatcccggaaatggatgactattttcagcaattactgacagagatggtcgcaagcggccaactcacggaaacactatgcaactatgatggccctcagggtaaagatacgctaattcgagcattggcagagatgctgcgcgaaaaacttggctgggaaattggtacacaaaatattgccttgaccaatggcagccaaagtgcgttcttttatctatttaacctgctagctgggcgcggagaagatggctctgtccgcaaagtgctgtttccactagcaccggaatatattggttattctgactcagggctggatgaaggcttatttgttgccaataaacccaatattgaattcttgccagaaggccaattcaaatatcatgttgattttgaccatctcaatattaccgaagatattggcctgatctgtgtttctcgcccaaccaacccaacgggtaacgttatcactgatgaagagttacaacggctagattatctggctcaacaacaccagattccattactcattgataatgcttatggcgtgccattcccgggtattatttttagcgaagctacaccattgtggaaccctaatactattctgtgcatgagcctatccaaattagggctgcccggttcacgctgcggaatcattatcgctaacgataaaatcatcaatgccgtcagtaacatgaatggtatcatcagccttgcgccgggcggtgtcggccccgcaatggcattggaaatgatccgtcgcaatgacctgcttcgtttgtcacaggaaattatccgcccgttctatcaacaacgggttcaagacgtgattcagattatccgtcgttatctaccggcggaactttgccttatccataaaccagaaggtgccatttttttgtggctgtggtttaaaaatctgccgataaccacagaaacgctttatcaaagactgaaaaaacgtggtgtgttaatggttccaggtcactatttcttccccggattggaacaagactggccgcatgctcatgaatgcatgcgtatgaattatgttcctgatccggaaagtattgccaaagggattgcgattttggcagaagaaattgagcgggcacatcagcaagcagcctga

SEQ ID NO: 10199 - protein, 417 aa, Photorhabdus luminescens subsp. laumondii TTO1
MIFSQFGNKFTQDAGITRLMNDLNQGLRTPGAIMLGGGNPAHIPEMDDYFQQLLTEMVASGQLTETLCNYDGPQGKDTLIRALAEMLREKLGWEIGTQNIALTNGSQSAFFYLFNLLAGRGEDGSVRKVLFPLAPEYIGYSDSGLDEGLFVANKPNIEFLPEGQFKYHVDFDHLNITEDIGLICVSRPTNPTGNVITDEELQRLDYLAQQHQIPLLIDNAYGVPFPGIIFSEATPLWNPNTILCMSLSKLGLPGSRCGIIIANDKIINAVSNMNGIISLAPGGVGPAMALEMIRRNDLLRLSQEIIRPFYQQRVQDVIQIIRRYLPAELCLIHKPEGAIFLWLWFKNLPITTETLYQRLKKRGVLMVPGHYFFPGLEQDWPHAHECMRMNYVPDPESIAKGIAILAEEIERAHQQAA

SEQ ID NO: 10200 - DNA, 1257 bp, Vibrio vulnificus YJ016
  CDS (1)..(1257): transl_table=11
atgcagttttcaaaatttggcgaaaagtttaatcagtattctggaataacccaattaatggacgatttgaatgatggcctgcgcacaccaggtgccatcatgctcggaggaggcaacccagccgctatcccagccatgctcgaatactttcaccaagccagcgaaaacatgctctctaacggcgaattgcttgcagcactggcaaactatgatggtcctcaaggtaaagatgtctttgttaaagcactggctcgcttactcaaggagacctatggttggaatatcagtgaaaagaacatcagtttgaccaatggcagccaaagcggctttttctacctgtttaatctttttgctggtcaacaacccgacggctcacataaaaaaatcttgctaccgctggcgccagaatacatcggctatgccgatgcggggattgatgaagacatttttgtctcttatcgtcctgagattgagctgctcgataatggcttgttcaaataccacgtggatttcgaacaactcaaagtggatgaatctgtcgctgcgatttgtgcctcccgcccaaccaatccaaccggtaacgtgctgacagatgaagaaattcgcaagctggatcagttggccagagacaaccagattcccctcatcattgataacgcctacggtttacctttcccaaacattatctttgaagaagtcgaaccattttggaatgaaaacaccattctatgcatgagtttgtccaaactggggctccctggggttcgctgtggcatcgtgattgcgaatgaagccgtaacccaagccctgaccaatatgaacggcattattagtctagctcctggcagcgttggccccgctctcggtcactacatgatagagaagaaagatctactgcacctcagttcagaggtgattaaaccgttctaccaacaaaaatcgcaacgcgcggttgaacttctccaagccgccatgcccgatgatcgctttcgtatccataaaccggaaggcgcaattttcttatggttgtggtttgacgcacttcctatcaccaccatggaactgtaccaacgcttaaaggctcgaggcgtgttgatcgtgccaggggaatacttctttattggccaagaagataattgggagcatgcccatcagtgtttgcgcatgaactatgtgcaggatgatgagctcatgcagaaaggcattgcgatcattgctgaagaggtcaatcgtgcctattctgaaagagagtcctaa

SEQ ID NO: 10201 - protein, 418 aa, Vibrio vulnificus YJ016
MQFSKFGEKFNQYSGITQLMDDLNDGLRTPGAIMLGGGNPAAIPAMLEYFHQASENMLSNGELLAALANYDGPQGKDVFVKALARLLKETYGWNISEKNISLTNGSQSGFFYLFNLFAGQQPDGSHKKILLPLAPEYIGYADAGIDEDIFVSYRPEIELLDNGLFKYHVDFEQLKVDESVAAICASRPTNPTGNVLTDEEIRKLDQLARDNQIPLIIDNAYGLPFPNIIFEEVEPFWNENTILCMSLSKLGLPGVRCGIVIANEAVTQALTNMNGIISLAPGSVGPALGHYMIEKKDLLHLSSEVIKPFYQQKSQRAVELLQAAMPDDRFRIHKPEGAIFLWLWFDALPITTMELYQRLKARGVLIVPGEYFFIGQEDNWEHAHQCLRMNYVQDDELMQKGIAIIAEEVNRAYSERES

SEQ ID NO: 10202 - DNA, 1302 bp, Tribolium castaneum
  CDS (1)..(1302)
atggcaagcatcgactacagctattttatctcccctcactcctccagaagaagaccggctctcaccagagaattaaccaagcgcgcttatggagccaaagacacaatctctttggccgaaggcatgcccaacgaggtgacattccctttcgagaaaatgcaaatttcgatgaaagacggctcaacccttaccatccaaggacaacagctgaacgccgccttacagtacatcccgacccagggctaccctccactcctcaaaacgctgaaagagttcacgcaaaaagtccatcagccgccgaattggcaggaccgcgaaatattgattacaaatgggtcccaagatggaatcagcaagtccattgagctctgcgtccaggaaggtcacccggtgctggttcaagaccctctctataccggcgcggagattgtcttgaagccattcaaggctgaactgatcccagttgagcaagatcagttcggaatgagcgcccaaaagctgctacaagtgctcgaggaccggaaagcgaagtatacggaagagggcggagggtgtaaaatgcccaagatcatgtacatcaaccccacggggtcgaatccaacggggacaacaatgtcgttagaaaggaggaaggagatttacgaaatctgttgcaaatacaacattttaattctggaggacgacgcttattgcttcatgcactatttggaggagaacccgcccagcttcctctctctggataccgagggccgtgtgctccgcttcgattccttatcaaaagtattaagttctggtctgcgagtgggatggatcactggaccaaaacaactgatctcaaccatagaattacacattcagagctcctatctacactcaagcaccttatctcaggtcatcgtcgagaacctcttccaggcctggggtttcgacaaattcatggaccatttgagcttcattcgcaagtactacaaggcccgtcgagacctcacaatcgactcgatggagcgccacttgaagggcttgtgcgagtggaacgtacccaccggaggaatgtttgtctggattaaagtccggggggtgtccgacgtgtacgacatgctgatgagcaggggcttgaagaagggtattacttttgtacctgggcacgctttcatggcagatcccaccaaagcgtgcagctacattcgcgcttcctacagcaaagccaatcccaagcagatcgaaaaagcgatgaagcttttggcggagttgataagggaggaacatttgctgttgcgtaggaagctagataattgtacttaa

SEQ ID NO: 10203 - protein, 433 aa, Tribolium castaneum
MASIDYSYFISPHSSRRRPALTRELTKRAYGAKDTISLAEGMPNEVTFPFEKMQISMKDGSTLTIQGQQLNAALQYIPTQGYPPLLKTLKEFTQKVHQPPNWQDREILITNGSQDGISKSIELCVQEGHPVLVQDPLYTGAEIVLKPFKAELIPVEQDQFGMSAQKLLQVLEDRKAKYTEEGGGCKMPKIMYINPTGSNPTGTTMSLERRKEIYEICCKYNILILEDDAYCFMHYLEENPPSFLSLDTEGRVLRFDSLSKVLSSGLRVGWITGPKQLISTIELHIQSSYLHSSTLSQVIVENLFQAWGFDKFMDHLSFIRKYYKARRDLTIDSMERHLKGLCEWNVPTGGMFVWIKVRGVSDVYDMLMSRGLKKGITFVPGHAFMADPTKACSYIRASYSKANPKQIEKAMKLLAELIREEHLLLRRKLDNCT

SEQ ID NO: 10204 - DNA, 1251 bp, Erwinia carotovora subsp. atroseptica SCRI1043
  CDS (1)..(1251): transl_table=11
atgaaattttctcttttcggcaagaaattcacgcgccacgctggcatcactcagttaatggacgacctgaacgaaggactgcgcacgccaggcgcaatcatgctgggcggtggcaatccggcacatattccggagatggacagctacttccaacagttgtgtcaggatatgctggaacaagggaaattaacggaagcgctatgcaactacgacggcccgcaaggcaaggatacgctgctcaatgcgttggccgagctcctgagtaatgaattaggttggcagattggaccacagaacattgcgctaacaaatggcagccagagtgcgtttttctacttatttaacctgtttgctggtcgccacagcgatggcagcctgaaaaaggtactgtttccgctggcaccggaatatatcggctattcagactctgggctggacgaagacatgtttgtttctgttcgtccgcaaatcgaactgttgcccgaaggacaatttaaatatcacgtcgatttcgatcatctgtcgattaccgatgatattggactagtttgcgtatcacgcccgaccaatccgaccggtaacgtgctgaccgacgacgagctgatgcgtctggatattctggcacagcagcacaatatccccctgctgattgataacgcctatggtgtgcctttccccggcatcatcttcagcgatgccacaccgctgtggaacccgaatatcatcctgtgcatgagcctatccaaactgggcctgcccggctcgcgctgcggtatcgtgattgcggatgaaaaggtgatttcggctatcggcaatatgaacggcatcattagcctgtctccaggcgcggttggcccagcactggcgtatgagatgattcaacgcggcgatctgctgcgcttatctaacgacgtcatacgccccttctatcagcagcgcgtgacggaaactatcgcgattattcgccgctatctttctcccgagcagtgcttgattcataaaccggagggcgcgatcttcctgtggctgtggtttaaggatctgcctatcacgacagaaatcctgtaccagcgcctgaaaaaacgcggtgtcctcatggtgccgggtcactatttcttccccggtctggagcaggaatggcaacacgctcatcaatgcatgcgcatgaactatgtgccggagccggaaaaaatcgaacgcggtattgcgattctggcggaagaagtcgaaaaggcgatacaggaaggctaa

SEQ ID NO: 10205 - protein, 416 aa, Erwinia carotovora subsp. atroseptica SCRI1043
MKFSLFGKKFTRHAGITQLMDDLNEGLRTPGAIMLGGGNPAHIPEMDSYFQQLCQDMLEQGKLTEALCNYDGPQGKDTLLNALAELLSNELGWQIGPQNIALTNGSQSAFFYLFNLFAGRHSDGSLKKVLFPLAPEYIGYSDSGLDEDMFVSVRPQIELLPEGQFKYHVDFDHLSITDDIGLVCVSRPTNPTGNVLTDDELMRLDILAQQHNIPLLIDNAYGVPFPGIIFSDATPLWNPNIILCMSLSKLGLPGSRCGIVIADEKVISAIGNMNGIISLSPGAVGPALAYEMIQRGDLLRLSNDVIRPFYQQRVTETIAIIRRYLSPEQCLIHKPEGAIFLWLWFKDLPITTEILYQRLKKRGVLMVPGHYFFPGLEQEWQHAHQCMRMNYVPEPEKIERGIAILAEEVEKAIQEG

SEQ ID NO: 10206 - DNA, 1278 bp, Bacillus licheniformis ATCC 14580
  CDS (1)..(1278): transl_table=11
gtgaagccgccattaagcaaaatcggagagaaaatgattgagaaaacaggggtcagggctgtgatgagcgatattcaggaagtcctggccggcggtgaacggtcatacattaatttaagtgcgggcaatccgatgattttgcccggcgtgtcagccatgtggaagtcggctcttgccgatctccttgacgatgacaggttttcttcggtgatcggccaatacggatcgagctatggaaccgatgaactgattgcaagtgttgtccgcttcttttcagagcggtatagcgccggcattcgaaaagagaacgtgttgattacagccggaagccagcagctgttttttctggcgatcaattcgttttgcggaatgggaagcggatctgtgatgaaaaaagccttgatcccgatgctgcctgactattcgggatacagcggggcggcactggagcgggagatgattgaggggatccctccgctcatatcgaaattggatgatcatacgtttcgatatgagctcgaccgtaaggggtttttagagaggatgcgcatcggtgctgtcttgctatcgcgcccgaacaatccttgcggaaacatcttgcctaaagaagatgtagcattcatttcagacgcatgccgagaagcgaatgttccgctgttcattgattccgcatatgctccgccttttccggcgattcactttatcgacatggaaccgattttcaacgagcagatcattcactgtatgagcctttcaaaagccggcctgcctggcgaaaggatcggaatcgccatcgggccgtcccggtatattcaggcaatggaagcttttcagtcgaatgcggcgatccattcttcaaggctggggcagtatatggctgcatcagtattgaatgacgggcgcctcgccgacgtgtcgctgaatgaagtcaggccatattaccgcaataaattcatgctgctcaaggaaacgcttttatgcaagatgcctgaagacatcaaatggtatctgcatcaaggggaaggatcgcttttcggatggctgtggtttgaagacctgccggtgaccgatgcagcgctgtatgagtatatgaaagcggatggagtcattatcgttcccggatcatctttctttcaccgtcaatcccggcgcctggcgcattcacaccagtgtatacgaatcagcctaaccgcggcggatgaagatattataaggggaatcgatgttttagctaaaattgcgaagggtgtatatgagaaacaggttgaatacttataa

SEQ ID NO: 10207 - protein, 425 aa, Bacillus licheniformis ATCC 14580
MKPPLSKIGEKMIEKTGVRAVMSDIQEVLAGGERSYINLSAGNPMILPGVSAMWKSALADLLDDDRFSSVIGQYGSSYGTDELIASVVRFFSERYSAGIRKENVLITAGSQQLFFLAINSFCGMGSGSVMKKALIPMLPDYSGYSGAALEREMIEGIPPLISKLDDHTFRYELDRKGFLERMRIGAVLLSRPNNPCGNILPKEDVAFISDACREANVPLFIDSAYAPPFPAIHFIDMEPIFNEQIIHCMSLSKAGLPGERIGIAIGPSRYIQAMEAFQSNAAIHSSRLGQYMAASVLNDGRLADVSLNEVRPYYRNKFMLLKETLLCKMPEDIKWYLHQGEGSLFGWLWFEDLPVTDAALYEYMKADGVIIVPGSSFFHRQSRRLAHSHQCIRISLTAADEDIIRGIDVLAKIAKGVYEKQVEYL

SEQ ID NO: 10208 - DNA, 1293 bp, Neisseria gonorrhoeae FA 1090
  CDS (1)..(1293): transl_table=11
atgcagttctcggcattcggcgaaaaattcacgcaacacagcggcatcctgcaactgatggacgacctcggcgacgcgctcaaaagcgacaagcccgtcaatatgctcggcggcggcaacccggcgcgcattcccgaaatcgatcgggcgttcgccgacatattttccaagctggcggcggaacacgccgtcgagaacatcggcaactactccaatccccaaggcgatgccgcgctgattgacgcgctgaccgccttccccaaccgcgaatacggctggaacctgaccgtcggcaatatcgcgctgaccaacggttcgcaaaacgcgtttttctatttattcaacctcttcggcggcaaattcaagctttcagacggcacatccgcagaaaaagccattttgttgccgctcgcgcccgaatacatcggctatgccgacgtgcatgtcgaagggcggcacttcgtttccgtcaaacccaaaatcgaaaacgtcgaacacgaaggcgaagcaggcttcttcaaataccgcgtggactttgacgcactggaaaacctgcccgaactcaaagcgggcaaaatcggcgcgatttgctgttcgcgcccgaccaacccgaccggcaacgtgttgaccgacggcgaaatggcgcgtttggacgctttggcgcgtgaacacggcattccgccgattatcgacaacgcctacggaatgccgttccccaacattattgacagcggcgtaacgctgaattggcacgaaaacatcatcctctgcttcagcctttccaaagtcggcctgccgggcgttcgcaccggcatcatcgtcgccgcgcccgaagccgtcaaagccgtcagcagcctaaacgcgattgtgaaccttgcccccacgcgcttcggcgcggccatcgccgccccgctgctggaaagcggcgagatgaaacggcttgccgaccaagtcatccggccgttttaccgcaatcaggcgcaaaccgccgtttcgctgctcaagcgcgagctgggcgcgtacccgatgaaaatccacaaacccgaaggcgcgattttcctgtggctctggtttgaaaacctgcccgtttcgtcgcaaaccctgtacgaaatgctcaaagccgaaggtacgctgattattccgggcgaacatttcttcgtcggcatcgacacgcaagactacccgcacgcgggcgagtgcatccgtatgagtatcgcacaggacgctcaaacgctggaaaaaggcatcgccgccatcggcaaaaccgtccgaaaaccgtacgacaacgtttaa

SEQ ID NO: 10209 - protein, 430 aa, Neisseria gonorrhoeae FA 1090
MQFSAFGEKFTQHSGILQLMDDLGDALKSDKPVNMLGGGNPARIPEIDRAFADIFSKLAAEHAVENIGNYSNPQGDAALIDALTAFPNREYGWNLTVGNIALTNGSQNAFFYLFNLFGGKFKLSDGTSAEKAILLPLAPEYIGYADVHVEGRHFVSVKPKIENVEHEGEAGFFKYRVDFDALENLPELKAGKIGAICCSRPTNPTGNVLTDGEMARLDALAREHGIPPIIDNAYGMPFPNIIDSGVTLNWHENIILCFSLSKVGLPGVRTGIIVAAPEAVKAVSSLNAIVNLAPTRFGAAIAAPLLESGEMKRLADQVIRPFYRNQAQTAVSLLKRELGAYPMKIHKPEGAIFLWLWFENLPVSSQTLYEMLKAEGTLIIPGEHFFVGIDTQDYPHAGECIRMSIAQDAQTLEKGIAAIGKTVRKPYDNV

SEQ ID NO: 10210 - DNA, 1332 bp, Psychrobacter arcticus 273-4
  CDS (1)..(1332): transl_table=11
atgaaattctcaaagttcggtcaaaaatttacccagcccactggcatctcacaattgatggatgatcttggcgatgcactaaaaagtgatcagcctgttaacatgctgggcggtggtaaccctgccaaaattgatgccgtcaatgagttgtttttggaaacttacaaggcgcttggcaatgataacgatacgggcaaagccaatagtagcgctattattagcatggcgaattactccaatccacaaggtgactctgcctttatcgatgccttagttggcttctttaaccgtcattatgattggaatctaacctcagaaaatatcgccctgaccaatggctcacagaatgcgtttttctatctgtttaatttatttggcggtgcttttgttaatgagcacagtcaagacaaagaaagtaaatctgtcgataagtcaattctactgccattgacccctgagtatatcggctatagtgacgtgcatgtggaaggtcagcattttgccgctgtactgccgcatatcgatgaagtaacgcatgatggcgaggaaggtttctttaaatatcgtgtcgattttgaagcgttagaaaacttgccagcgttaaaggaaggtcgtattggtgcgatttgctgctcacgcccgaccaatcctactggcaacgtgctgacggatgaagaaatggcgcatttggccgagattgccaaacgctatgacataccgctgattatcgataatgcctacggtatgcccttccctaatattatttattcagacgcgcatctgaattgggataacaatacgattctgtgctttagtctgtctaaaattggcctacccggtatgcgtactggtattatcgttgccgatgctaaagtgatcgaagcggtcagcgcgatgaatgccgtggtgaatctagcgccgacacgctttggcgcagcgattgccacgccattggtcgcaaacgatcgtatcaagcagttatctgataatgagattaagcctttttatcaaaagcaagcgaccctcgctgtgaagcttttgaaacaagcattgggcgattatccgctgatgattcataagcctgagggtgcgattttcttatggctgtggtttaaagatttaccgattagtacactcgatctatatgagcgtctcaaagcaaaaggcacgcttattgtgccaagcgagtacttcttccccggtgttgacgtgagcgactatcagcacgcccatgaatgtattcgtatgagtatcgctgctgatgaacaaacgctgattgacggtatcaaggtgattggagaagtggtacgcgagctttacgataataagtaa

SEQ ID NO: 10211 - protein, 443 aa, Psychrobacter arcticus 273-4
MKFSKFGQKFTQPTGISQLMDDLGDALKSDQPVNMLGGGNPAKIDAVNELFLETYKALGNDNDTGKANSSAIISMANYSNPQGDSAFIDALVGFFNRHYDWNLTSENIALTNGSQNAFFYLFNLFGGAFVNEHSQDKESKSVDKSILLPLTPEYIGYSDVHVEGQHFAAVLPHIDEVTHDGEEGFFKYRVDFEALENLPALKEGRIGAICCSRPTNPTGNVLTDEEMAHLAEIAKRYDIPLIIDNAYGMPFPNIIYSDAHLNWDNNTILCFSLSKIGLPGMRTGIIVADAKVIEAVSAMNAVVNLAPTRFGAAIATPLVANDRIKQLSDNEIKPFYQKQATLAVKLLKQALGDYPLMIHKPEGAIFLWLWFKDLPISTLDLYERLKAKGTLIVPSEYFFPGVDVSDYQHAHECIRMSIAADEQTLIDGIKVIGEVVRELYDNK

SEQ ID NO: 10212 - DNA, 1353 bp, Anabaena variabilis ATCC 29413
  CDS (1)..(1353): transl_table=11
atgatatcggtctgcttcactagacccatatttttgtcaacccttcaattatctttactgttaaagcttatgaaccctgccctaactaaaattggcgatcaaatgtccaacctgactggtgtacgagcgattatgaaggacattatcgaaacgttgaagtctggtggagggcaggatttaattaatttaagtgcaggcaacccgttgattttgccagaggtagaacaattatggcgggactgcacagcagaactcttagcaagtcaagaatatggtgaagtcgtttgtcgttacggttctagtcaaggctatgcgccattaattgaggcagttgtcaaagattttaaccgtcgttatggtttgaatttaaccgatcgcaatgtcttaatcactccaggcagtcaaactctctacttttatgctgccaatgttttcggcggttacactggcaacggcgacctcaagcaaattgttttacccctgagtcccgattacactggctatggtggtatttgtctagttcccgaagctttagttgcttacaaaccatctctagatattgatgcagcagcacacagctttaaatatcgccccgattttagccaggtatctatttccgaaagcactggctgcgttatcttctcccgcccctgtaaccctacgggtaatgttctcaccgatgacgaagtgagaaaaattgctgccctcgccgcaccttataatgtgccagtgctaattgactcagcttacgctcccccattcccagcgttgaatttcacagatatgtccctgatttttggggaaaatattcttcattgcaccagcttatcgaaagcaggtttaccaggggaaagaattggcatcgccattggaaatgaaaggttaattcaagtcctagaatctttccagactaatgctagtttacattcctcacgctacgggcaggcgatcgcagcccgtgccattaactctggtgcattggcgcaaatcgcagaacaagttatccgtcctttctatcaaaacaaattcgccatcgtcgagaacgctttagaagcagccatgcctaaagaattaccttggttcctccatcgcggtgaaggtgctatctttagttggctatggttacaagatttgcccatcaccgattgggaactgtaccaagaactgaagaaagtgggagtaattgtcgtccctggtagtacattcttccctggcttaaaagaagaatgggcgcacaaacaccaatgtgtccgcatcagcttgactggtagcgatacagaaatcgcccttggtatgcagcgcctagcaaaagcagtcgagcaagtttaccagcgtacacctgttagtgcctaa

SEQ ID NO: 10213 - protein, 450 aa, Anabaena variabilis ATCC 29413
MISVCFTRPIFLSTLQLSLLLKLMNPALTKIGDQMSNLTGVRAIMKDIIETLKSGGGQDLINLSAGNPLILPEVEQLWRDCTAELLASQEYGEVVCRYGSSQGYAPLIEAVVKDFNRRYGLNLTDRNVLITPGSQTLYFYAANVFGGYTGNGDLKQIVLPLSPDYTGYGGICLVPEALVAYKPSLDIDAAAHSFKYRPDFSQVSISESTGCVIFSRPCNPTGNVLTDDEVRKIAALAAPYNVPVLIDSAYAPPFPALNFTDMSLIFGENILHCTSLSKAGLPGERIGIAIGNERLIQVLESFQTNASLHSSRYGQAIAARAINSGALAQIAEQVIRPFYQNKFAIVENALEAAMPKELPWFLHRGEGAIFSWLWLQDLPITDWELYQELKKVGVIVVPGSTFFPGLKEEWAHKHQCVRISLTGSDTEIALGMQRLAKAVEQVYQRTPVSA

SEQ ID NO: 10214 - DNA, 1284 bp, Synechococcus elongatus PCC 7942
  CDS (1)..(1284): transl_table=11
atgtccctagaatcgctcagccgctacgggcggcagatgtctcagctcacgggcgtacgcgccatcatgaaggacatcattgagaccttgcgatcggggcaaggccaaacttttatcaatctcagtgctggaaatcccgtcgttctgcctgaggtggagcagctctggcgcgactgtaccgccgatttactcggcagtgctgaatacggtcaggtggtgggtcgctacggcaccagtcaaggctatgaaccgctgatcgccgccatcattcaagagttcaatcagcgctacggctggtcgattagcgatcgcaatattttgattacgcccggtagccagtctctctacttcttggcggccaatgcctttggtggctgggcagaagatggcagccttcgcaaaattctcttgccccttagccccgactataccggctacggtggcgtctgtctggaaccgcaggcggtggttgcggctcgaccacagattgaacgaattggcgatcatcgcttcaaataccgtcctgactttgaacagttgcaaattggcgccgataccgggatgctgctgttttcgcggccctgcaatcccaccggcaacgtcatcagtgacgccgaactagagcgtctggcgacccttgcggcagcccagaacgtgccggtgtttgtcgactctgcctacgcccccccctttcctgggctcaactttacggagatgacccccttctttggggacaacattgttcactgcctcagcctctcgaaggcgggtctgcctggtgaacgcctcggcatcgccattggtccagagccggtgattcaagtcttggaagccttccagaccaatctttgcattcactcctcacgctatggccaagcaatcgcagcccgggcgatcgcctcaggccagttgacggcgatcgcagaaaccgtgattcgcccctactacgccgcaaaatttgcccgagtcgaacgtcagctcgatgccctcttgccggattctttaccctggcgcttgcaccaaggagaaggtggcatttttgcttggctctggttagaagaagcccccctagatgattggcaaatctatcagcagctcaaacaagcgggcgtaattgtcgtgccagggagttctttcttcccggggctgcgggaggattgggtccatacgcgccaatgtctgcggatcagcttggcagctgaagatcacgaattggagaccggcatggaacgcctcgccaccactgtgcagcagatctatcgtcaagcgcccattcccgcctaa

SEQ ID NO: 10215 - protein, 427 aa, Synechococcus elongatus PCC 7942
MSLESLSRYGRQMSQLTGVRAIMKDIIETLRSGQGQTFINLSAGNPVVLPEVEQLWRDCTADLLGSAEYGQVVGRYGTSQGYEPLIAAIIQEFNQRYGWSISDRNILITPGSQSLYFLAANAFGGWAEDGSLRKILLPLSPDYTGYGGVCLEPQAVVAARPQIERIGDHRFKYRPDFEQLQIGADTGMLLFSRPCNPTGNVISDAELERLATLAAAQNVPVFVDSAYAPPFPGLNFTEMTPFFGDNIVHCLSLSKAGLPGERLGIAIGPEPVIQVLEAFQTNLCIHSSRYGQAIAARAIASGQLTAIAETVIRPYYAAKFARVERQLDALLPDSLPWRLHQGEGGIFAWLWLEEAPLDDWQIYQQLKQAGVIVVPGSSFFPGLREDWVHTRQCLRISLAAEDHELETGMERLATTVQQIYRQAPIPA

SEQ ID NO: 10216 - DNA, 1266 bp, Saccharophagus degradans 2-40
  CDS (1)..(1266): transl_table=11
atgccctcctttcctctttcgccctttggtgagcgtttatctgcacctgccggtattgtttctttaatggatgacctaggcgaggccctaaacgtaaaccctgatattttgtttttgggcggggggaaccctgcacgtatccccgagatggagcaggctttcgctcaagcgttgcaagccataagcgctaacccagagcaattacataagatgctgggggtgtaccagtcgccacgagggcacgagggctttattgagcggttagtgccttttttgaatgaacgctgcggttggagcatcaccagcaaaaatatagccctagctaatggcagtcagtcggcgttttttatcttgctgaatatgttggcagtgcccgctaccgctaatacgcccgcacagaaaattcacctgcccatggcccccgagtacctcggttatagcgggcaaaccgtcgcgccagatatgttttgtgctcataaaccccttattgagctggttgagggcaatcaatttcgctaccgagtcgatttagcgactctcgccaacacccaaaatgtggctgcctactgcgtatctatgcctaccaaccccacgggtaacgtgctggcgcgtagtgaagtagaggcattgcaggtgcttgcggcggaacagcaagtaccgcttatattagattgcgcttatggtgcgccgcttcctggaattgtgtatcaagaggttgccttgccgtggtcagacaatagcgtgtacatgtttagcttatccaagcttgggttacctggcgcgcgaacaggcatcattgtggggccggaagagctggtagagcagtttgtgaatgccaataccgtagctagtcttgccaatggcaatgcaggcccagccctagctgaggccctaatggcgcaggggcaattagagccattaattcagcataccgtaacccctttttaccttgccaagcgcaaccacatgctaggtgcgttagagcaggccctagcagggctgccctgcagagtgcattgtgccgacggtgccttttttgtgtggctctggttgcaagatttgcctataagcgcccatgcgctctacctgcaaatgaaagccgagggggtattaattatgcctggtgagcctttcttttttggcttggatgcaccgtgggaccatgcagagcagtgtattcgcttgtcttactgccaaagtgatgaggtgattgtaaaagcggtaaccattttagggcgggtattgcgcaaagcttatggggcttga

SEQ ID NO: 10217 - protein, 421 aa, Saccharophagus degradans 2-40
MPSFPLSPFGERLSAPAGIVSLMDDLGEALNVNPDILFLGGGNPARIPEMEQAFAQALQAISANPEQLHKMLGVYQSPRGHEGFIERLVPFLNERCGWSITSKNIALANGSQSAFFILLNMLAVPATANTPAQKIHLPMAPEYLGYSGQTVAPDMFCAHKPLIELVEGNQFRYRVDLATLANTQNVAAYCVSMPTNPTGNVLARSEVEALQVLAAEQQVPLILDCAYGAPLPGIVYQEVALPWSDNSVYMFSLSKLGLPGARTGIIVGPEELVEQFVNANTVASLANGNAGPALAEALMAQGQLEPLIQHTVTPFYLAKRNHMLGALEQALAGLPCRVHCADGAFFVWLWLQDLPISAHALYLQMKAEGVLIMPGEPFFFGLDAPWDHAEQCIRLSYCQSDEVIVKAVTILGRVLRKAYGA

SEQ ID NO: 10218 - DNA, 1266 bp, Trichodesmium erythraeum IMS101
  CDS (1)..(1266): transl_table=11
atgattaatcctgccttgagtcaatttggtacaacaatgtcccgcctgacaggtgtgcgggctattatggcagatattattgccaccctacgggggggtcaaggtcaggaatttcttgacttcagttctggaaacccgcttgttttaccagaagtagaaaaattatggaaagactgtaccacagaattattggcaagtccagagtatggggaagtagtaggacgctatggttcttctcaaggttatcaaccttttattgatgccgttgttaatgactttaattctcggtatgggttgagtttgagcgatcgcaatgttttgattactcctggttctcagtctatatatttctatgctgctaatgcttttggaggatatactgacaaccaaactctgaaaaaaattgttctaccccttagcccagactacactggttatggtggagttagtttaattccagaggcagtagttgcctacaaaccaactctggaaattgatgatgaggatcatcgcttcaaatattgtcccgactttagtcaactcgtcattgatgaaaatactggttgtgttattttctcacgcccctgtaaccccactggtaatgtcattagtgttgatgaggtcaaaaaaattgcccatcaagccaatgtttatggtgtgccagtattggtggatgcggcttatgctcctccctatccaggattaaattttgtcgacatggaacctgtttttggggacaatattgttcattgtatgagtttatcaaaggctggacttccaggagaacgaattggcattgctattggagatgaaagaataattgaggttttgcaagggtttcagactaatatgtgtattcattctcctcgttatggacaggcgatcgctactgatgcaattaattctggggctctggcagaaatttctactaaagtaattcggcctttttatcaaaataaattttcgattttagaatcaactttagaaaaagctttaccaaaaaatttgccctggtttctccatcgttttgaaggagctatttttgcttggttgtggttaaaagatttaccaatgactgactgggaattttaccaaaagttgaaggaagtaggaattattgttgtgcctggtagttcatttttccctggtttacgagaagaatggcctcataaacaacagtgtattcgtattagtttaacagctcccgatgagcatattcaagagggaatggaacgcttggcaaagatgataatttcaattttttaa

SEQ ID NO: 10219 - protein, 421 aa, Trichodesmium erythraeum IMS101
MINPALSQFGTTMSRLTGVRAIMADIIATLRGGQGQEFLDFSSGNPLVLPEVEKLWKDCTTELLASPEYGEVVGRYGSSQGYQPFIDAVVNDFNSRYGLSLSDRNVLITPGSQSIYFYAANAFGGYTDNQTLKKIVLPLSPDYTGYGGVSLIPEAVVAYKPTLEIDDEDHRFKYCPDFSQLVIDENTGCVIFSRPCNPTGNVISVDEVKKIAHQANVYGVPVLVDAAYAPPYPGLNFVDMEPVFGDNIVHCMSLSKAGLPGERIGIAIGDERIIEVLQGFQTNMCIHSPRYGQAIATDAINSGALAEISTKVIRPFYQNKFSILESTLEKALPKNLPWFLHRFEGAIFAWLWLKDLPMTDWEFYQKLKEVGIIVVPGSSFFPGLREEWPHKQQCIRISLTAPDEHIQEGMERLAKMIISIF

SEQ ID NO: 10220 - DNA, 1275 bp, Alkalilimnicola ehrlichei MLHE-1
  CDS (1)..(1275): transl_table=11
gtgaagatgaccgcttttgccgaaaaattctcccaacaggccggcatcaacagcctgatggatgatttgggcaaggccatggccggggatcagcccatgatcatgatgggtgggggcaacccggggcactttccgccggttcaggaacgcctgggtgaagaactccagaaactggcccatgatccggaggcggtggcccgcctgatcggtgtttacgatgcaccccagggcgaggcgcggttcatccgtgcgctgaaggatctcctgaatgaaacctacggctggggcctgagcgaagagaatatcgccctgaccaacggcagccaggcggccttcttcatgctgttcaacttctttgccggcgagatgccggacggcagccggcgccagatcctgctgcccatggcaccggaatacctgggttatgccgatgcggggctgggtccggataccttccgcagcgtgcgcccccggatcgacatgctggacgcgcacaccttcaagtaccggctggatttcgaagaactggcgctggatgagcaggtgggggcgctttgcgtgtcccggccgaccaatcccaccggcaacgtgctgaccgacgaggagatcggccggcttcacggactggccagggcgtgggatatcccgctgatcgtcgacggcgcctacggcagtccctttcccgagctgatctatacccgggcccggcccttctgggacgagcaggtgatcctttgcctcagcctgtcaaagctggggctgccggccgtgcgtactgggattgtcatcgccgcgcccgaggtgatccgcgccctgagtggcaccaatgccatcctcaacctggcgaccggcagcttcggtccccaactcaccgagggcctggtgcgctccggcgagatcctgtcgttgagtcgcgaccaggtccggccctggtacgaggccaagatgcgcaaggcggtggccgtgcttcacgaagccttcggcgaggcctgtccctggtctgtccatcaaccggaaggggccatgttcctctggctctggttcccgggtctgcccatcaccagccacgagctttaccaacgccttaagggcaagggtgtcttggtggtttcggggcattacttcttcccggggctgccggacgacgaagactggccgcatcgccacgagtgcctgcgggtgacctattcgcaggatgacgaggcggtggcggaggggttgcgggtgatcgccgaggaagtccggcagtgctattcggacgcgggcgtccgatga

SEQ ID NO: 10221 - protein, 424 aa, Alkalilimnicola ehrlichei MLHE-1
MKMTAFAEKFSQQAGINSLMDDLGKAMAGDQPMIMMGGGNPGHFPPVQERLGEELQKLAHDPEAVARLIGVYDAPQGEARFIRALKDLLNETYGWGLSEENIALTNGSQAAFFMLFNFFAGEMPDGSRRQILLPMAPEYLGYADAGLGPDTFRSVRPRIDMLDAHTFKYRLDFEELALDEQVGALCVSRPTNPTGNVLTDEEIGRLHGLARAWDIPLIVDGAYGSPFPELIYTRARPFWDEQVILCLSLSKLGLPAVRTGIVIAAPEVIRALSGTNAILNLATGSFGPQLTEGLVRSGEILSLSRDQVRPWYEAKMRKAVAVLHEAFGEACPWSVHQPEGAMFLWLWFPGLPITSHELYQRLKGKGVLVVSGHYFFPGLPDDEDWPHRHECLRVTYSQDDEAVAEGLRVIAEEVRQCYSDAGVR

SEQ ID NO: 10222 - DNA, 1284 bp, Nostoc punctiforme PCC 73102
  CDS (1)..(1284): transl_table=11
atgaaccctgccctaactcaaattggcgctcaaatgtccaaactgactggcgtaagagcaatcatgaaggatattatcgagacattacgagcgggtgcagggcagcagtttattaatttgagtgctggtaatccgttgattttgccagaagtagagcaattatggcgggattgtactgcacagcttttggctagtccagaatatggtgaagtagtttgtcgctacggctcaagtcagggctatacaccattagttgaagcgatcgctaacgactttaacaaacgctacgggttaaacttaagcgaacgcaatatcctcatcacccccggtagtcaaaccctctacttctacgctgtgaatagcttcggtggctacacccctagcggcgagttaaaacaaatcgttttgcccctcagccctgactacaccggttacggcggtatctgcttagttccaaaagccttaattgcttacaaaccgactctcgatattgatgaagccgcccaccgatttaaatatcgccccgacttcagccaactgtcgattacagaagatacgggttgtgtcctcttctctcgcccttgtaatcccactggtaatgtcctcactgatgatgaggtgaaaaagattgctgccctagctgcgccttacaatctgcccgtattaattgactccgcttatgcgcctcccttcccggcattgaattttaccgaaatgacaccagtgtttggtgataatattttacactgcatgagtttatcaaaagctggattaccaggagaaagggttggtattgccattggggatgaaaagtggattgaagtgctggagtgtttccaagcaaatattggtctccattcttcacgttacggccaagcgatcgcagctcttgcaatcaattctggcgctttagtagaaatttctcacactgtcatccgtcccttttaccaaaataagtttagcgttttagaaaccagcttagaacaagcgatgcccaaggatttaccttggttcctccatcgcggtgaaggagcaatttttgcttggttgtggttagaggatttacccatcagtgattgggaattttaccagcaattaaagcaagtaggtgtgattattgtccctggaagcaccttcttccccggtttagaggaagagtgggcgcacaagcaccaatgtttccgcatcagcctcacaggtacagatgaagagatagccactgctatgcaacgtttagcaaaagtggctgaagaagcttataaaggtgcggcggtgactgcctag

SEQ ID NO: 10223 - protein, 427 aa, Nostoc punctiforme PCC 73102
MNPALTQIGAQMSKLTGVRAIMKDIIETLRAGAGQQFINLSAGNPLILPEVEQLWRDCTAQLLASPEYGEVVCRYGSSQGYTPLVEAIANDFNKRYGLNLSERNILITPGSQTLYFYAVNSFGGYTPSGELKQIVLPLSPDYTGYGGICLVPKALIAYKPTLDIDEAAHRFKYRPDFSQLSITEDTGCVLFSRPCNPTGNVLTDDEVKKIAALAAPYNLPVLIDSAYAPPFPALNFTEMTPVFGDNILHCMSLSKAGLPGERVGIAIGDEKWIEVLECFQANIGLHSSRYGQAIAALAINSGALVEISHTVIRPFYQNKFSVLETSLEQAMPKDLPWFLHRGEGAIFAWLWLEDLPISDWEFYQQLKQVGVIIVPGSTFFPGLEEEWAHKHQCFRISLTGTDEEIATAMQRLAKVAEEAYKGAAVTA

SEQ ID NO: 10224 - DNA, 1248 bp, Photobacterium sp. SKA34
  CDS (1)..(1248): transl_table=11
atggacttttcgcgctttggtaataagtttgcaggcgattctgggatcaccttattaatgcaagatctcaatgatggactcaccaatcccaatgccatcatgctcggtggtggaaatccagcgcaaatcccagccatgaaccactactttaccgagctattaaaagacatggctactagtggtgaacttaccgcgtcgatgactaactatgatggcccacaaggtaaaaatcgctttctagattcgcttgcgacactgttacagcaacaatacggttgggaaattagtgctaaaaatattgtcttaaccaatggcagccaaagtgcgttctttagcttatttaacttgttagctggagaatttgaaaatggtaaaaagaagaaaatattactgccgttatcgccagaatatattggttacgctgatgctggtttaagctctgatatgtttatctcgtaccaacctacaatcagtatgttggaagatggcttttttaaataccatgtcgattttagcaaattagtcatcgatgacagcatcgcagcaatttgcgcctctcgcccgacaaacccgacaggcaatatacttacagataaagaaattgaacatttagcagcgctggctaaagaacaccagataccattaattattgataatgcttacggcttacccttccctgatattatttttgaagaggtaacaccgttttgggatgacaacactattctgtgtatgagtttatccaagcttgggctacccggtgtccgctgcggtatcgtgattgcaaatgaagcgatggttactgctttgtctaacatcaatggtatcgtcaatttagcgcctggtagtattggccccgcggtagcaacgaaaatgatccaccagcaagaactattaccacttagccaaaacgtgattaagccgttttatcaccagaaggtacaacgcgctgttgaattattgcgtcaagctatcccagatcctcgatttaaaattcacaaacctgaaggtgctatcttcttatggctatggtttgaagatttaccgatcaccacgaaggtactgtatcaacgcttaaaacaacgtggcgtaatgatagtgcctggtgaatatttctttatcggattacaagatgagtgggcacatagccatgaatgcttacgcatgaactatgtccaaggtgatgaagcaatgcagcgaggtattgctattattgcagaagaagtcactaaagcttatgcagaataa

SEQ ID NO: 10225 - protein, 415 aa, Photobacterium sp. SKA34
MDFSRFGNKFAGDSGITLLMQDLNDGLTNPNAIMLGGGNPAQIPAMNHYFTELLKDMATSGELTASMTNYDGPQGKNRFLDSLATLLQQQYGWEISAKNIVLTNGSQSAFFSLFNLLAGEFENGKKKKILLPLSPEYIGYADAGLSSDMFISYQPTISMLEDGFFKYHVDFSKLVIDDSIAAICASRPTNPTGNILTDKEIEHLAALAKEHQIPLIIDNAYGLPFPDIIFEEVTPFWDDNTILCMSLSKLGLPGVRCGIVIANEAMVTALSNINGIVNLAPGSIGPAVATKMIHQQELLPLSQNVIKPFYHQKVQRAVELLRQAIPDPRFKIHKPEGAIFLWLWFEDLPITTKVLYQRLKQRGVMIVPGEYFFIGLQDEWAHSHECLRMNYVQGDEAMQRGIAIIAEEVTKAYAE

SEQ ID NO: 10226 - DNA, 1257 bp, marine gamma proteobacterium HTCC2207
  CDS (1)..(1257): transl_table=11
gtgaagttatcaaaatttggtgaaaagttttcaggtcagtccggcatagtcgaacttatggatgatctgggtacggcgctaaatgaaaatcccgagatgatctttatgggtggcggcaatccaggtcgtatcccagaagtggagcagatatttaaggcgcgtctggaaaccgtgctggctgatccagcacaactgcatactctgcttggtgtctaccagtctccccaaggggataaagattttcgagagcagattgccggcctgcttagacagcagtttggctgggatctatcggagcgcaatatcgccgtttccaatggcagccagtcagcattctttgtgctctacaatatgtttgccggtgagatggccgatggcagtcagcgctcgattcacctgcctctggcccctgaatatattggttaccgtgatataggtctaagcgacaatttatttactgccacccgaccagagatcgaacttctcgacgacaatctatttaaatatcatgtggatttctcgcggctgaatatagatcagcagagcgcggcactctgcgtctcgcgaccgaccaaccccactggcaacgtacttacagacgacgagattgagcagttggataccattgctcttgagcaggatattccctttattctcgatggcgcctacggtttgccattcccgggaattatttttaatcaggccaaagcgcattggaatagcaataccattttagtcttgagcctctctaagctgggccttcccggcgtgcgcaccggaattattgttgccagtgaagagatcattcaggcctatacccgggccaatacgattgtcagtttggcctgcggtaatcttggcccagcggtagccagagagttggtcagtagtggcgagattttggcgcttagtgaacagcgtattgcgccgttttatcgccagcgcgctcatcagacagtgcagtggtttcgtgagtctctgggtgatctgccatatcggattcatcggcccgagggggcgatctttttgtggctttggtttaaggatttgccgattaccagtaaagagctctaccaacgacttaaagcgcggggcgttttagtggtgccaggacatgactttttccctgggatcactgacgactggcgtcatcagcaggagtgcattcgcgtttcctacgctcaagatgatgccgtggtgaaaaccggtgtggagattattgcccaagaggtggctcgggcctatgagaccagctag

SEQ ID NO: 10227 - protein, 418 aa, marine gamma proteobacterium HTCC2207
MKLSKFGEKFSGQSGIVELMDDLGTALNENPEMIFMGGGNPGRIPEVEQIFKARLETVLADPAQLHTLLGVYQSPQGDKDFREQIAGLLRQQFGWDLSERNIAVSNGSQSAFFVLYNMFAGEMADGSQRSIHLPLAPEYIGYRDIGLSDNLFTATRPEIELLDDNLFKYHVDFSRLNIDQQSAALCVSRPTNPTGNVLTDDEIEQLDTIALEQDIPFILDGAYGLPFPGIIFNQAKAHWNSNTILVLSLSKLGLPGVRTGIIVASEEIIQAYTRANTIVSLACGNLGPAVARELVSSGEILALSEQRIAPFYRQRAHQTVQWFRESLGDLPYRIHRPEGAIFLWLWFKDLPITSKELYQRLKARGVLVVPGHDFFPGITDDWRHQQECIRVSYAQDDAVVKTGVEIIAQEVARAYETS

SEQ ID NO: 10228 - DNA, 1254 bp, Vibrio sp. Ex25
  CDS (1)..(1254): transl_table=11
atgcagttctcaaagtttggtgaaaaatttaatcagtattcaggtatcacgcagttaatggacgatttgaatgatggtctacgcacaccaggtgccatcatgctcggtggaggtaacccagccgccattcctgccatgctcgattattttcaccaagccagtgaggaaatgctcgccagtggagagctcgtcgccgccctagccaactacgatgggccacagggtaaagacgcgttcgtgaaagcgctggctcagttattccgtgaaacttacggttgggacatttcagagaagaacatcagcctaactaacggcagccaaagtggcttcttctacttgttcaacttactcgcaggtaaacagccagacggttcgcataagaaggtgctactgcctatcgcgcctgagtacatcggctatggtgatgctggcattgatgaagatatctttgtctcttaccacccagaaatcgagctgttagataacggattgtttaaataccatgtcgattttgaacagctaaccgtcgacgattctgttacggcaatctgcgcatctcgcccaaccaacccaacgggtaacgtactgacagacgaagaagtgcgtaaactggacaaactcgcacgtgaaaacaacatcccactgatcatcgataacgcctacggcttgccgttcccgaacatcatctttgaagatgtcgaaccattctggaatgaaaacaccatcctatgcatgagcttatctaaacttggcttaccgggtgtgcgttgtggcattgtgattgcgagtgaagaaatcactcaagcgttaaccaatatgaacggcatcatcagcctagcaccaggcagtgtggggccagcgctggcaaaccacatcatcgctaaaggcgacctgcttaaactgagttcagaggtgattaagccgttttacaagcagaagtcgcaacgtgcggttgaactgctgcaagaagcgattaccgatgagcgcttccgtattcacaaaccggaaggcgctatcttcttgtggttgtggtttgatgaactgccaataacaacaatggaactgtaccaacgcttgaaagcgcgtggcgtattgattgtccctggtgaatatttctttattggtcagcaagacgagtgggatcacgcgcaccaatgcctgcgtatgaactacgttcaagacgatgagatgatgcaaaaaggcattgcgattatcgcggaagaagttgaaaaggcttaccaacaaggtcagtaa

SEQ ID NO: 10229 - protein, 417 aa, Vibrio sp. Ex25
MQFSKFGEKFNQYSGITQLMDDLNDGLRTPGAIMLGGGNPAAIPAMLDYFHQASEEMLASGELVAALANYDGPQGKDAFVKALAQLFRETYGWDISEKNISLTNGSQSGFFYLFNLLAGKQPDGSHKKVLLPIAPEYIGYGDAGIDEDIFVSYHPEIELLDNGLFKYHVDFEQLTVDDSVTAICASRPTNPTGNVLTDEEVRKLDKLARENNIPLIIDNAYGLPFPNIIFEDVEPFWNENTILCMSLSKLGLPGVRCGIVIASEEITQALTNMNGIISLAPGSVGPALANHIIAKGDLLKLSSEVIKPFYKQKSQRAVELLQEAITDERFRIHKPEGAIFLWLWFDELPITTMELYQRLKARGVLIVPGEYFFIGQQDEWDHAHQCLRMNYVQDDEMMQKGIAIIAEEVEKAYQQGQ

SEQ ID NO: 10230 - DNA, 1293 bp, Alteromonadales bacterium TW-7
  CDS (1)..(1293): transl_table=11
ttgcctaatttattaaatgtattaggttttatgaactattcacactttggcagcaaatttactcaacccaatggcattacacagctaatggaagatcttggtaatgctaaaaacagtaataaccctaatttagtgatgcttggcggaggcaaccccgcctctgtgccacaagtaaacacagcgttcattaacgagctaaatcatttagtaaaaaataataaaatagcgcaaataatgggcctttacgatggcccaacgggtaacgatgagtttagagcagtccttgccaatcagttaacacaagaatatgcgtggaatttaacagcgagcaatattgcattaggaaatggtagccaagctaacttttttattttatttaacctatttgcaggcaaaatggctgatggcagccataaaaaagtactttttccacttgcgccagaatacgtaggctatgccgaccaaggtttaactgacgatatgtttgtggccattaaacccgaaatagaaatactaaatacaccaaacggctctaaacagtttaaatatgtaattgattttgatgcggttaaggctgtacttgccaacgacaacagcataagcgcattatgtgtgtcgcgccctaccaacccaacgggtaacgtaatcaccgacgatgaagttcatcagctagatttactcgcaaagcaatacactatcccccttattattgataacgcctatggcgacccattccctggctgtatttataccgatgcaaacctaacctggaactcaaacattatattgtgtatgtcgctttcaaaactgggcttgccaggcctgcgcaccggcatagtggttgccaataacgagattattaaagcaattagccgtgttaatggcgctatggtgttatcacctaatagttttgggccaagcttggtcactcgcttaatcaaagataatgaactactgcctctgtgtaaaaataccattttgcctttttataaaaataaagcacaggtcgctgttagcctatttgatgaaatatttgctgacttaccggtttatttacataaggtagaaggcgcattttttatgtggctatggtttaaagattcaaaaataaccagcgaacagctttaccaaaaacttaaaaaacaagatgtgtatataattcctggccacaatttttttataggtattgaagatagctgggagcacaaacatcaatgcgtgcgtattaattacgccaccgatgaagcaacgctcaaaaaaggcctagaaacaattaaaacactcataatgtaa

SEQ ID NO: 10231 - protein, 430 aa, Alteromonadales bacterium TW-7
MPNLLNVLGFMNYSHFGSKFTQPNGITQLMEDLGNAKNSNNPNLVMLGGGNPASVPQVNTAFINELNHLVKNNKIAQIMGLYDGPTGNDEFRAVLANQLTQEYAWNLTASNIALGNGSQANFFILFNLFAGKMADGSHKKVLFPLAPEYVGYADQGLTDDMFVAIKPEIEILNTPNGSKQFKYVIDFDAVKAVLANDNSISALCVSRPTNPTGNVITDDEVHQLDLLAKQYTIPLIIDNAYGDPFPGCIYTDANLTWNSNIILCMSLSKLGLPGLRTGIVVANNEIIKAISRVNGAMVLSPNSFGPSLVTRLIKDNELLPLCKNTILPFYKNKAQVAVSLFDEIFADLPVYLHKVEGAFFMWLWFKDSKITSEQLYQKLKKQDVYIIPGHNFFIGIEDSWEHKHQCVRINYATDEATLKKGLETIKTLIM

SEQ ID NO: 10232 - DNA, 1278 bp, marine gamma proteobacterium HTCC2080
  CDS (1)..(1278): transl_table=11
atgcatttctcaaattttgccactcgttatcaaaaaagcacgggcaccgtgcgattaatggaagacttgggggcagcaacctcggcaaccggctccatttgccaactgggcggcggtaatcctgcacacatacccgaagtagaagccttactgcgcgaggctatggcagatttgaccgccgatactcaagcctttggcaaaatgatcggtgaatacgatgccccggggggtaatgtcgccttcagggagaccctcgcaaatttactgaccgaacaatttggctgggctctgacgcaaaacaatattgccattacaaacggtagccagagcagcttcgggctgctttttaacagctttgccggctcgtttcccgatgatagccataaacgcattctcttgcctttaacacccgagtacgtaggctattttgatgttggtttagcagaacaacctatttttgaagggcggcgcgctgaaatagatttactcccaaaccgccagttcaaatatcgagtgaacttcgacggcctgcagttaaatgacaaccatggcgctgtctgtgtatcacggcccaccaatccgacaggaaatgtcatcacagacgaggagatggcggagttacgggctgcgtgccgcgaaaaaaacattccgctcattgttgatggtgcttacggcttgcccttccccggaatgatttttacacctgcaacacctgtatgggatgacaacacgatcttactgctgagtttatccaagctggggttgcctggtatccgcacaggcattgtggtcgccgctcccgaagtcattcaacttatccaaaataacaatgccatcaatagcctcgccccttctcgacttggtccaacgcttttgacaccgctcttgcaacgcgggcagctgcaaaacatttgtgagcaactcatccgccctcactacgagaaaaaacgggaccacgcactgtcagttattgaggaggtaatgagcgacctgccagttcgaatccataagcctgaaggcgctctatttctgtggctgtggttcgaggggctaccggtgacttctgaaaacttatatcaacagctgatggctaagggcgtttttgttctgcccagccgtccattttatccgccggcacaatcaagctggcgacatcaagacgagtgcattcgggtcaattatgcagcgagcgatgagacagtggttaaaggtttaaccgaaattgcgcaggttgtgagagagcaatttcgaaacgctgctgctctggtagctcgttag

SEQ ID NO: 10233 - protein, 425 aa, marine gamma proteobacterium HTCC2080
MHFSNFATRYQKSTGTVRLMEDLGAATSATGSICQLGGGNPAHIPEVEALLREAMADLTADTQAFGKMIGEYDAPGGNVAFRETLANLLTEQFGWALTQNNIAITNGSQSSFGLLFNSFAGSFPDDSHKRILLPLTPEYVGYFDVGLAEQPIFEGRRAEIDLLPNRQFKYRVNFDGLQLNDNHGAVCVSRPTNPTGNVITDEEMAELRAACREKNIPLIVDGAYGLPFPGMIFTPATPVWDDNTILLLSLSKLGLPGIRTGIVVAAPEVIQLIQNNNAINSLAPSRLGPTLLTPLLQRGQLQNICEQLIRPHYEKKRDHALSVIEEVMSDLPVRIHKPEGALFLWLWFEGLPVTSENLYQQLMAKGVFVLPSRPFYPPAQSSWRHQDECIRVNYAASDETVVKGLTEIAQVVREQFRNAAALVAR

SEQ ID NO: 10234 - DNA, 1278 bp, Marinobacter sp. ELB17
  CDS (1)..(1278): transl_table=11
atgaaactctctgcgtttggccagaaatttacggcggatgccggtattacctcgttgatggacgatctaggtaatgccatggcctcgggtgatgacctgatcatgatgggcggcggcaaccccggccatattcctgagatacagcagcgggttcgggagattcttgttcagatcagccagagcgacgccgatatgcgtcgcctggtgggcgtttatgatccccctcagggcgaaaagcagtttattgccgcgttggcggaattgttgagacgtgagtacggctgggatctgaccagcgagaacattgcgctcactaacggcagccaggcagcattctttatgctgttcaatatgttcggtggtgactacggcgatggcgtgcacaaacacattctgttgccgctggcaccagagtacatcggttacgccgacgcaggcatagacgcggatctgtttcacgcggtgcagcctgacatttccttcactgatgcccacgagttcaaataccgaatcgactttgacgcggtagaggtgaccggcgaaaccggcgctatttgtgtgtccagaccaaccaatcccaccggcaatgtgatcaccgacgacgaactggcgcaattggaaaccctggcgcggcgccaaaatatccctctcattgtggatggcgcctacggcacaccgtttcccaacctgttgtttaccgaagccaaaccgacctggaacgagcagatcattctgtgcttgagcctgtccaaattagggttgcctgcggcccgcaccggcattgtgattgctgcggcgcctaccatcaaggcgctggcgagcattaatgcgattatgaatctgtccaccgggagctttggtgccatgctggcggagccgctggtgcgctcgggggagatcttgaccctaagccgtgacctggtatgcccgttctacaaggccaaaatgcagcgcgccgtggcagcgttcaccggcgccatggaagacgcgtcttgccgctggtatatccataaacccgagggcgcgatgttcctgtggctgtggtttccggatttaccgattaccagcctggaactgtatcagcgcttgaagcttcgcggtgtgctggtggtgtctggccattactttttcccggggctgcccgaggatggctggaatcaccgtgacgagtgcctgcgggtgacctattcgcagaacgatgagcgggttgccgaagggctgagaattattgctgaagaagttaaagccgtttgggttgaggctgaaactgcggactga

SEQ ID NO: 10235 - protein, 425 aa, Marinobacter sp. ELB17
MKLSAFGQKFTADAGITSLMDDLGNAMASGDDLIMMGGGNPGHIPEIQQRVREILVQISQSDADMRRLVGVYDPPQGEKQFIAALAELLRREYGWDLTSENIALTNGSQAAFFMLFNMFGGDYGDGVHKHILLPLAPEYIGYADAGIDADLFHAVQPDISFTDAHEFKYRIDFDAVEVTGETGAICVSRPTNPTGNVITDDELAQLETLARRQNIPLIVDGAYGTPFPNLLFTEAKPTWNEQIILCLSLSKLGLPAARTGIVIAAAPTIKALASINAIMNLSTGSFGAMLAEPLVRSGEILTLSRDLVCPFYKAKMQRAVAAFTGAMEDASCRWYIHKPEGAMFLWLWFPDLPITSLELYQRLKLRGVLVVSGHYFFPGLPEDGWNHRDECLRVTYSQNDERVAEGLRIIAEEVKAVWVEAETAD

SEQ ID NO: 10236 - DNA, 1269 bp, uncultured bacterium 578
  CDS (1)..(1269): transl_table=11
atgacgaacacagactactcaaagtttggcaaaaggttttctagagaaagtggcattactcagttgatggctgaccttggaaaagctaatcacagtaatgatccaaatacagtgatgctaggaggtggcaacccagcaattattccagccgcccatgataaatttgtagatgagttacaaaaacttattgccggctccggtgttgatcaaatgattggattttatgacggtccgcaagggagcgaggagtttattagagcgttagtggcgatgcttaacgatcactatgattgggatttagatgaaaaaaacatagctattacaaatggctctcaaagtagttttttcagtctctttaatttgtttgcaggagaaatgtcgaacggttcccataaaaaaattctgttgccaatagttcctgaatatattggttatgcagaccaaggaattacagatgacatgtttgtctcgataaagccaaaaatccagatgttggatgacaagcaatttaaatatcaaatcaattttgaagaattaatttatgttgtgaaatctagcaatataggagcaatttgtatctcacgaccgacaaatcctactggtaacgttattaccgatgatgaactcaatcaattagatttaatcgctcaagagtatggagtgccattgattattgataatgcttatggacagccatttccaggcgctatttatacccaagcatcactaaagtggaataccaacatgattttatgcatgtctctatcaaagcttggccttccgggtcttagaactggtatcgtcattgctaatcatgaaaccattgaagctataagcagaattagtggaattatggctttagctccaagtagtgttgggcctagcttgctcacaagaatgattaaggatcaggaattattgcgactttgtaatgaggttataaaaccttactatgaagaaaaggcgacaacagcagtcagtctttttaatactattcttgctgatacagatgtttatcttcataagcttgagggtgcattttttatgtggctttggtttccaaatttgtctataacgtctgaacaactctacaaagacctcaaagctgaaggcatttacatcatacccgggcatgatttttttattggcctcgatgatgagtggaaacaccagcaccaatgtgtaagaataaactatgcaaaagatgaaaagacccttacaaaaggacttgaagctatttgtcgaaacaccaactgggtagagtggtga

SEQ ID NO: 10237 - protein, 422 aa, uncultured bacterium 578
MTNTDYSKFGKRFSRESGITQLMADLGKANHSNDPNTVMLGGGNPAIIPAAHDKFVDELQKLIAGSGVDQMIGFYDGPQGSEEFIRALVAMLNDHYDWDLDEKNIAITNGSQSSFFSLFNLFAGEMSNGSHKKILLPIVPEYIGYADQGITDDMFVSIKPKIQMLDDKQFKYQINFEELIYVVKSSNIGAICISRPTNPTGNVITDDELNQLDLIAQEYGVPLIIDNAYGQPFPGAIYTQASLKWNTNMILCMSLSKLGLPGLRTGIVIANHETIEAISRISGIMALAPSSVGPSLLTRMIKDQELLRLCNEVIKPYYEEKATTAVSLFNTILADTDVYLHKLEGAFFMWLWFPNLSITSEQLYKDLKAEGIYIIPGHDFFIGLDDEWKHQHQCVRINYAKDEKTLTKGLEAICRNTNWVEW

SEQ ID NO: 10238 - DNA, 24 bp, Artificial sequence
  primer
atgacattctccctttttggtgac

SEQ ID NO: 10239 - DNA, 23 bp, Artificial sequence
  primer
ttagtgactttcagcccaggctc

SEQ ID NO: 10240 - protein, 437 aa, Artificial sequence
  consensus sequence
  Variant (2)..(3): Xaa in position 2 to 3 is any amino acid
  Variant (5)..(11): Xaa in position 5 to 11 is any amino acid
  Variant (13)..(16): Xaa in position 13 to 16 is any amino acid
  Variant (18)..(18): Xaa in position 18 is any amino acid
  Variant (20)..(29): Xaa in position 20 to 29 is any amino acid
  Variant (30)..(34): Xaa in position 30 to 34 is any or no amino acid
  Variant (36)..(37): Xaa in position 36 to 37 is any amino acid
  Variant (41)..(43): Xaa in position 41 to 43 is any amino acid
  Variant (45)..(68): Xaa in position 45 to 68 is any amino acid
  Variant (69)..(76): Xaa in position 69 to 76 is any or no amino acid
  Variant (78)..(80): Xaa in position 78 to 80 is any amino acid
  Variant (83)..(98): Xaa in position 83 to 98 is any amino acid
  Variant (100)..(105): Xaa in position 100 to 105 is any amino acid
  Variant (106)..(106): Xaa in position 106 is any or no amino acid
  Variant (109)..(110): Xaa in position 109 to 110 is any amino acid
  Variant (112)..(112): Xaa in position 112 is any amino acid
  Variant (116)..(118): Xaa in position 116 to 118 is any amino acid
  Variant (120)..(122): Xaa in position 120 to 122 is any amino acid
  Variant (124)..(124): Xaa in position 124 is any amino acid
  Variant (126)..(126): Xaa in position 126 is any amino acid
  Variant (128)..(139): Xaa in position 128 to 139 is any amino acid
  Variant (140)..(148): Xaa in position 140 to 148 is any or no amino acid
  Variant (150)..(151): Xaa in position 150 to 151 is any amino acid
  Variant (153)..(153): Xaa in position 153 is any amino acid
  Variant (155)..(155): Xaa in position 155 is any amino acid
  Variant (158)..(171): Xaa in position 158 to 171 is any amino acid
  Variant (172)..(172): Xaa in position 172 is any or no amino acid
  Variant (174)..(174): Xaa in position 174 is any amino acid
  Variant (176)..(182): Xaa in position 176 to 182 is any amino acid
  Variant (183)..(186): Xaa in position 183 to 186 is any or no amino acid
  Variant (190)..(191): Xaa in position 190 to 191 is any amino acid
  Variant (194)..(205): Xaa in position 194 to 205 is any amino acid
  Variant (206)..(212): Xaa in position 206 to 212 is any or no amino acid
  Variant (216)..(216): Xaa in position 216 is any amino acid
  Variant (223)..(223): Xaa in position 223 is any amino acid
  Variant (226)..(226): Xaa in position 226 is any amino acid
  Variant (228)..(234): Xaa in position 228 to 234 is any amino acid
  Variant (236)..(240): Xaa in position 236 to 240 is any amino acid
  Variant (242)..(244): Xaa in position 242 to 244 is any amino acid
  Variant (246)..(246): Xaa in position 246 is any amino acid
  Variant (249)..(250): Xaa in position 249 to 250 is any amino acid
  Variant (254)..(266): Xaa in position 254 to 266 is any amino acid
  Variant (268)..(270): Xaa in position 268 to 270 is any amino acid
  Variant (271)..(272): Xaa in position 271 to 272 is any or no amino acid
  Variant (274)..(274): Xaa in position 274 is any amino acid
  Variant (279)..(279): Xaa in position 279 is any amino acid
  Variant (284)..(284): Xaa in position 284 is any amino acid
  Variant (286)..(286): Xaa in position 286 is any amino acid
  Variant (289)..(307): Xaa in position 289 to 307 is any amino acid
  Variant (309)..(313): Xaa in position 309 to 313 is any amino acid
  Variant (315)..(334): Xaa in position 315 to 334 is any amino acid
  Variant (335)..(336): Xaa in position 335 to 336 is any or no amino acid
  Variant (338)..(338): Xaa in position 338 is any amino acid
  Variant (342)..(362): Xaa in position 342 to 362 is any amino acid
  Variant (363)..(365): Xaa in position 363 to 365 is any or no amino acid
  Variant (367)..(368): Xaa in position 367 to 368 is any amino acid
  Variant (372)..(372): Xaa in position 372 is any amino acid
  Variant (374)..(374): Xaa in position 374 is any amino acid
  Variant (378)..(380): Xaa in position 378 to 380 is any amino acid
  Variant (383)..(387): Xaa in position 383 to 387 is any amino acid
  Variant (390)..(391): Xaa in position 390 to 391 is any amino acid
  Variant (394)..(395): Xaa in position 394 to 395 is any amino acid
  Variant (398)..(399): Xaa in position 398 to 399 is any amino acid
  Variant (403)..(404): Xaa in position 403 to 404 is any amino acid
  Variant (407)..(407): Xaa in position 407 is any amino acid
  Variant (409)..(411): Xaa in position 409 to 411 is any amino acid
  Variant (412)..(414): Xaa in position 412 to 414 is any or no amino acid
  Variant (416)..(416): Xaa in position 416 is any amino acid
  Variant (418)..(420): Xaa in position 418 to 420 is any amino acid
  Variant (422)..(422): Xaa in position 422 is any amino acid
  Variant (424)..(435): Xaa in position 424 to 435 is any amino acid
  Variant (436)..(436): Xaa in position 436 is any or no amino acid
SXXGXXXXXXXGXXXXMXDXXXXXXXXXXXXXXXLXXGNPXXXPXXXXXXXXXXXXXXXXXXXXXXXXXXXXXXXXYXXXQGXXXXXXXXXXXXXXXXGXXXXXXXNIXXTXGSQXXXFXXXNXFXGXXXXXXXXXXXXXXXXXXXXXPXXPXYXGYXXXXXXXXXXXXXXXPXIXXXXXXXXXXXFKYXXDFXXXXXXXXXXXXXXXXXXXSRPXNPTGNVXTDXEXXXXXXXAXXXXXPXXXDXAYXXPFPXXXXXXXXXXXXXNXXXXXCXSLSKXGLPGXRXGIXXXXXXXXXXXXXXXXXXXLXXXXXGXXXXXXXXXXXXXXXXXXXXXXIXPFYXXXXXXXXXXXXXXXXXXXXXXXXHXXEGAXFXWLWXXXLPXXXXXLYXXLKXXGVXXVPGXXFFXGXXXXXXWXHXXXCXRXXXXXXXXXXXXXG

SEQ ID NO: 10241 - protein, 25 aa, Artificial sequence
  protein pattern
  Variant (2)..(3): Xaa in position 2 to 3 is any amino acid
  Variant (7)..(7): Xaa in position 7 is Phe, Ile, Leu or Met
  Variant (9)..(10): Xaa in position 9 to 10 is any or no amino acid
  Variant (13)..(15): Xaa in position 13 to 15 is any amino acid
  Variant (16)..(17): Xaa in position 16 to 17 is any or no amino acid
  Variant (19)..(19): Xaa in position 19 is Pro or Ser
  Variant (20)..(20): Xaa in position 20 is Ile, Leu, Met or Val
  Variant (21)..(21): Xaa in position 21 is Pro, Ser or Thr
  Variant (22)..(22): Xaa in position 22 is Asp, Ser, Thr or Val
  Variant (23)..(24): Xaa in position 23 to 24 is any amino acid
  Variant (25)..(25): Xaa in position 25 is Phe or Leu
HXXEGAXFXXLWXXXXXLXXXXXXX

SEQ ID NO: 10242 - protein, 39 aa, Artificial sequence
  protein pattern
  Variant (2)..(2): Xaa in position 2 is any amino acid
  Variant (3)..(7): Xaa in position 3 to 7 is any or no amino acid
  Variant (13)..(13): Xaa in position 13 is Ile or Leu
  Variant (15)..(15): Xaa in position 15 is Asp or Glu
  Variant (16)..(16): Xaa in position 16 is any amino acid
  Variant (18)..(18): Xaa in position 18 is Ile, Leu, Met or Val
  Variant (19)..(20): Xaa in position 19 to 20 is any amino acid
  Variant (21)..(21): Xaa in position 21 is Ile or Leu
  Variant (22)..(24): Xaa in position 22 to 24 is any amino acid
  Variant (25)..(25): Xaa in position 25 is Ala, Cys or Gly
  Variant (26)..(28): Xaa in position 26 to 28 is any amino acid
  Variant (29)..(29): Xaa in position 29 is Asp, Gly, Asn, Gln or Thr
  Variant (30)..(30): Xaa in position 30 is Ile, Leu or Val
  Variant (32)..(32): Xaa in position 32 is any amino acid
  Variant (33)..(34): Xaa in position 33 to 34 is Ile, Leu or Val
  Variant (36)..(36): Xaa in position 36 is Ala, Gly, Asn or Ser
  Variant (39)..(39): Xaa in position 39 is Ala or Gly
CXXXXXXPTGNVXTXXEXXXXXXXXXXXXXPXXXDXAYX

SEQ ID NO: 10243 - protein, 60 aa, Artificial sequence
  protein pattern
  Variant (2)..(2): Xaa in position 2 is Phe or Tyr
  Variant (4)..(4): Xaa in position 4 is Ala, Asp, Gly, Asn or Ser
  Variant (5)..(11): Xaa in position 5 to 11 is any amino acid
  Variant (12)..(12): Xaa in position 12 is Ala, Leu or Pro
  Variant (13)..(13): Xaa in position 13 is any amino acid
  Variant (14)..(14): Xaa in position 14 is Phe or Trp
  Variant (15)..(16): Xaa in position 15 to 16 is any amino acid
  Variant (18)..(18): Xaa in position 18 is any or no amino acid
  Variant (20)..(22): Xaa in position 20 to 22 is any amino acid
  Variant (23)..(23): Xaa in position 23 is any or no amino acid
  Variant (28)..(28): Xaa in position 28 is Ala, Ile, Leu or Val
  Variant (33)..(33): Xaa in position 33 is any amino acid
  Variant (35)..(35): Xaa in position 35 is any amino acid
  Variant (38)..(38): Xaa in position 38 is Ala, Ile or Val
  Variant (39)..(39): Xaa in position 39 is Ile or Val
  Variant (40)..(40): Xaa in position 40 is Ala or Gly
  Variant (41)..(41): Xaa in position 41 is Ala, Asp, Asn, Pro or Ser
  Variant (42)..(46): Xaa in position 42 to 46 is any amino acid
  Variant (47)..(47): Xaa in position 47 is Ala, Leu or Val
  Variant (48)..(48): Xaa in position 48 is any amino acid
  Variant (49)..(49): Xaa in position 49 is Ala, Glu, Gly, Gln, Ser or Thr
  Variant (50)..(51): Xaa in position 50 to 51 is any amino acid
  Variant (52)..(52): Xaa in position 52 is Asn, Gln or Ser
  Variant (53)..(53): Xaa in position 53 is Ala, Gly or Thr
  Variant (54)..(55): Xaa in position 54 to 55 is any amino acid
  Variant (56)..(56): Xaa in position 56 is Ala, Cys, Gly, Asn, Ser or Val
  Variant (57)..(57): Xaa in position 57 is Ile or Leu
  Variant (58)..(59): Xaa in position 58 to 59 is any amino acid
  Variant (60)..(60): Xaa in position 60 is Gly, Asn, Pro, Ser or Thr
PXPXXXXXXXXXXXXXNXIXXXXSLSKXGLPGXRXGIXXXXXXXXXXXXXXXXXXXXXXX

SEQ ID NO: 10244 - protein, 23 aa, Artificial sequence
  protein pattern
  Variant (2)..(3): Xaa in position 2 to 3 is any or no amino acid
  Variant (5)..(6): Xaa in position 5 to 6 is any or no amino acid
  Variant (8)..(8): Xaa in position 8 is Ala, Asn or Pro
  Variant (12)..(12): Xaa in position 12 is Ala, Asn, Gln, Ser or Thr
  Variant (13)..(13): Xaa in position 13 is any amino acid
  Variant (14)..(14): Xaa in position 14 is Phe or Tyr
  Variant (15)..(16): Xaa in position 15 to 16 is any amino acid
  Variant (17)..(17): Xaa in position 17 is Ala or Leu
  Variant (18)..(18): Xaa in position 18 is any amino acid
  Variant (20)..(20): Xaa in position 20 is any amino acid
  Variant (21)..(21): Xaa in position 21 is Phe or Leu
  Variant (22)..(22): Xaa in position 22 is Ala, Cys or Gly
NXXIXXTXGSQXXXXXXXNXXXG

SEQ ID NO: 10245 - protein, 13 aa, Artificial sequence
  protein pattern
  Variant (2)..(2): Xaa in position 2 is any amino acid
  Variant (4)..(5): Xaa in position 4 to 5 is any amino acid
  Variant (6)..(6): Xaa in position 6 is Glu or Gln
  Variant (8)..(8): Xaa in position 8 is Phe, Ile, Leu, Met or Val
  Variant (10)..(10): Xaa in position 10 is Ile, Leu, Met or Val
  Variant (11)..(11): Xaa in position 11 is Asn, Ser or Thr
  Variant (12)..(12): Xaa in position 12 is any amino acid
  Variant (13)..(13): Xaa in position 13 is Ala, Ser, Thr or Val
WXHXXXCXRXXXX

SEQ ID NO: 10246 - protein, 29 aa, Artificial sequence
  protein pattern
  Variant (2)..(4): Xaa in position 2 to 4 is any amino acid
  Variant (5)..(5): Xaa in position 5 is any or no amino acid
  Variant (7)..(7): Xaa in position 7 is Ile, Leu or Met
  Variant (8)..(8): Xaa in position 8 is any amino acid
  Variant (10)..(10): Xaa in position 10 is Asp or Glu
  Variant (12)..(12): Xaa in position 12 is any amino acid
  Variant (15)..(15): Xaa in position 15 is Ala, Gly, Ser or Thr
  Variant (16)..(16): Xaa in position 16 is Asp or Gly
  Variant (17)..(18): Xaa in position 17 to 18 is any amino acid
  Variant (19)..(19): Xaa in position 19 is Ile, Leu or Val
  Variant (20)..(23): Xaa in position 20 to 23 is any amino acid
  Variant (24)..(24): Xaa in position 24 is Phe, Ile, Leu or Val
  Variant (25)..(25): Xaa in position 25 is any amino acid
  Variant (26)..(26): Xaa in position 26 is Ala, Gly or Ser
  Variant (27)..(28): Xaa in position 27 to 28 is any amino acid
KXXXXPXXPXYXGYXXXXXXXXXXXXXXP

SEQ ID NO: 10247 - protein, 20 aa, Artificial sequence
  protein pattern
  Variant (2)..(3): Xaa in position 2 to 3 is any amino acid
  Variant (4)..(4): Xaa in position 4 is Leu or Met
  Variant (6)..(7): Xaa in position 6 to 7 is any amino acid
  Variant (8)..(8): Xaa in position 8 is Asp or Gly
  Variant (9)..(10): Xaa in position 9 to 10 is any amino acid
  Variant (11)..(12): Xaa in position 11 to 12 is Ile, Met or Val
  Variant (15)..(16): Xaa in position 15 to 16 is any amino acid
  Variant (19)..(19): Xaa in position 19 is any amino acid
YXXXKXXXXXXXPGXXFFXG

SEQ ID NO: 10248 - protein, 17 aa, Artificial sequence
  protein pattern
  Variant (2)..(3): Xaa in position 2 to 3 is any amino acid
  Variant (4)..(4): Xaa in position 4 is Phe or Met
  Variant (5)..(7): Xaa in position 5 to 7 is any amino acid
  Variant (8)..(8): Xaa in position 8 is Ala, Ser or Thr
  Variant (10)..(10): Xaa in position 10 is Ile or Val
  Variant (11)..(12): Xaa in position 11 to 12 is any amino acid
  Variant (13)..(13): Xaa in position 13 is Ile, Leu or Val
  Variant (15)..(15): Xaa in position 15 is any amino acid
  Variant (17)..(17): Xaa in position 17 is Ile or Leu
GXXXXXXXGXXXXMXDX

SEQ ID NO: 10249 - protein, 26 aa, Artificial sequence
  protein pattern
  Variant (2)..(2): Xaa in position 2 is any amino acid
  Variant (3)..(3): Xaa in position 3 is Ala, Ser or Thr
  Variant (4)..(4): Xaa in position 4 is Ile, Leu, Met or Val
  Variant (5)..(8): Xaa in position 5 to 8 is any amino acid
  Variant (9)..(9): Xaa in position 9 is Ile, Leu or Val
  Variant (10)..(13): Xaa in position 10 to 13 is any amino acid
  Variant (14)..(14): Xaa in position 14 is Ile, Leu or Met
  Variant (15)..(16): Xaa in position 15 to 16 is any amino acid
  Variant (17)..(17): Xaa in position 17 is Ile, Leu or Val
  Variant (18)..(18): Xaa in position 18 is Ala, Cys or Ser
  Variant (19)..(21): Xaa in position 19 to 21 is any amino acid
  Variant (23)..(23): Xaa in position 23 is any amino acid
  Variant (25)..(25): Xaa in position 25 is Phe, His or Tyr
GXXXXXXXXXXXXXXXXXXXXIXPXY

SEQ ID NO: 10250 - protein, 11 aa, Artificial sequence
  protein pattern
  Variant (2)..(2): Xaa in position 2 is Gly or Ser
  Variant (3)..(3): Xaa in position 3 is Ala or Gly
  Variant (7)..(8): Xaa in position 7 to 8 is any amino acid
  Variant (9)..(9): Xaa in position 9 is Ile, Leu or Val
  Variant (11)..(11): Xaa in position 11 is Ala, Glu, Gly or Gln
LXXGNPXXXPX

SEQ ID NO: 10251 - protein, 10 aa, Artificial sequence
  protein pattern
  Variant (4)..(4): Xaa in position 4 is any amino acid
  Variant (5)..(5): Xaa in position 5 is Ile, Leu, Pro or Val
  Variant (8)..(8): Xaa in position 8 is Asp, Glu, Gln or Ser
  Variant (9)..(9): Xaa in position 9 is any amino acid
  Variant (10)..(10): Xaa in position 10 is Leu or Val
FKYXXDFXXX

SEQ ID NO: 10252 - DNA, 1818 bp, Escherichia coli
  CDS (1)..(1818): transl_table=11
atggtcgtaatatggcgggtgctcgtgcgctgtgggcccaccggaatgaccgacgccgatttcggtaagccgattatcgcggttgtgaactcgttcacccaatttgtaccgggtcacgtccatctgcgcgatctcggtaaactggtcgccgaacaaattgaagcggctggcggcgttgccaaagagttcaacaccattgcggtggatgatgggattgccatgggccacggggggatgctttattcactgccatctcgcgaactgatcgctgattccgttgagtatatggtcaacgcccactgcgccgacgccatggtctgcatctctaactgcgacaaaatcaccccggggatgctgatggcttccctgcgcctgaatattccggtgatctttgtttccggcggcccgatggaggccgggaaaaccaaactttccgatcagatcatcaagctcgatctggttgatgcgatgatccagggcgcagacccgaaagtatctgactcccagagcgatcaggttgaacgttccgcgtgtccgacctgcggttcctgctccgggatgtttaccgctaactcaatgaactgcctgaccgaagcgctgggcctgtcgcagccgggcaacggctcgctgctggcaacccacgccgaccgtaagcagctgttccttaatgctggtaaacgcattgttgaattgaccaaacgttattacgagcaaaacgacgaaagtgcactgccgcgtaatatcgccagtaaggcggcgtttgaaaacgccatgacgctggatatcgcgatgggtggatcgactaacaccgtacttcacctgctggcggcggcgcaggaagcggaaatcgacttcaccatgagtgatatcgataagctttcccgcaaggttccacagctgtgtaaagttgcgccgagcacccagaaataccatatggaagatgttcaccgtgctggtggtgttatcggtattctcggcgaactggatcgcgcggggttactgaaccgtgatgtgaaaaacgtacttggcctgacgttgccgcaaacgctggaacaatacgacgttatgctgacccaggatgacgcggtaaaaaatatgttccgcgcaggtcctgcaggcattcgtaccacacaggcattctcgcaagattgccgttgggatacgctggacgacgatcgcgccaatggctgtatccgctcgctggaacacgcctacagcaaagacggcggcctggcggtgctctacggtaactttgcggaaaacggctgcatcgtgaaaacggcaggcgtcgatgacagcatcctcaaattcaccggcccggcgaaagtgtacgaaagccaggacgatgcggtagaagcgattctcggcggtaaagttgtcgccggagatgtggtagtaattcgctatgaaggcccgaaaggcggtccggggatgcaggaaatgctctacccaaccagcttcctgaaatcaatgggtctcggcaaagcctgtgcgctgatcaccgacggtcgtttctctggtggcacctctggtctttccatcggccacgtctcaccggaagcggcaagcggcggcagcattggcctgattgaagatggtgacctgatcgctatcgacatcccgaaccgtggcattcagttacaggtaagcgatgccgaactggcggcgcgtcgtgaagcgcaggacgctcgaggtgacaaagcctggacgccgaaaaatcgtgaacgtcaggtctcctttgccctgcgtgcttatgccagcctggcaaccagcgccgacaaaggcgcggtgcgcgataaatcgaaactggggggttaa

SEQ ID NO: 10253 - protein, 605 aa, Escherichia coli
MVVIWRVLVRCGPTGMTDADFGKPIIAVVNSFTQFVPGHVHLRDLGKLVAEQIEAAGGVAKEFNTIAVDDGIAMGHGGMLYSLPSRELIADSVEYMVNAHCADAMVCISNCDKITPGMLMASLRLNIPVIFVSGGPMEAGKTKLSDQIIKLDLVDAMIQGADPKVSDSQSDQVERSACPTCGSCSGMFTANSMNCLTEALGLSQPGNGSLLATHADRKQLFLNAGKRIVELTKRYYEQNDESALPRNIASKAAFENAMTLDIAMGGSTNTVLHLLAAAQEAEIDFTMSDIDKLSRKVPQLCKVAPSTQKYHMEDVHRAGGVIGILGELDRAGLLNRDVKNVLGLTLPQTLEQYDVMLTQDDAVKNMFRAGPAGIRTTQAFSQDCRWDTLDDDRANGCIRSLEHAYSKDGGLAVLYGNFAENGCIVKTAGVDDSILKFTGPAKVYESQDDAVEAILGGKVVAGDVVVIRYEGPKGGPGMQEMLYPTSFLKSMGLGKACALITDGRFSGGTSGLSIGHVSPEAASGGSIGLIEDGDLIAIDIPNRGIQLQVSDAELAARREAQDARGDKAWTPKNRERQVSFALRAYASLATSADKGAVRDKSKLGG

SEQ ID NO: 10254 - DNA, 2135 bp, Zea mays
  CDS (122)..(1897)
cacagctccacttgtccctgtccatccattcatcattccccgtcactccaccaattcaccacccaaaaccctaaaccccattccgtacctcaacgccgccgccgccgccgccgccgctgcgatgcagtccatggcgctcacctccccctcactcccggaggtcggccccgtttccggccgccgtctccagcgcatccgtgccaccgcggtatccgacgagctcaagctgaacaagtacagcgcgcgcatcacggagcccaagtcgcagggcgcctcgcaggccgtgctctatggggtcgggctcactgacgctgacctccgcaagccgcaggtcggcgtctcgtcggtgtggtacgaggggaacacctgcaacatgcacctgctccgcctcgcggaggccgtccgtgacggcgtccgcgaggccggcatggtcggcttccggtttaacaccgtcggtgtcagcgacgccatttccatgggcacccggggcatgtgctacagcctccagtcccgtgacctcatcgccgacagcatcgagaccgtcatgggagcgcagcactacgacgccaacatttccatacctgggtgcgacaagaacatgccaggtacaataatggcaatgggacggcttaatcgacctagcataatgatatatggtggaactattaagcctggtcactttcagggcaattcctatgatatagtatctgctttccagtgctatggagaatatgttagtggttcaatcactgatgagcaaagaaagaacgtcctccgcaattcatgtccaggagcaggtgcctgtggtggtatgtacacagcaaacactatggcatctgctatcgaaactttgggcatgagtcttccatacagttcttcgacacctgctgaggacccactaaaactagaagagtgccgtcttgctgggaagtatcttttagagttgctaaagatggatttgaagcctaaggacattatcactgagaagtcattgcgaaatgcaatggttattgttatggcacttggtggttcgactaatgctgttctgcatttgattgccattgctcggtccgttggtttgcatttgactcttgatgatttccagaaggtcagtgaccaagttcctttccttgcagacctcaagcccagtggcaaatatgtcatggaggatctacataagattggtgggacacctgcagtcattcattaccttttggagcaaggtcttcttgatggtgattgcatgactgttactggtaaaactctagctgagaatgctaaaatcttccctcctctgtctgaggggcagcaaataattcgaccacttgacaatcctatcaaaccaactggccatattcaaatactttatggaaatcttgcaccggaaggttctgtcgcaaaaataactggcaaagagggactgttcttctcaggtcccgcattagtttttgagggtgaagaatccatgatcacagctatctcagaaaacccagcgaatttcaagggaaaggtagtagtaatccgaggagaaggaccaaaaggagggccagggatgcctgaaatgttgactccaacaagtgcaataatgggtgctggtctcggaaaggagtgcgccctgctgacagatggtagattttcaggaggctcacatggatttgttgtcggccacatatgccctgaagcacaggaaggtggcccgattggccttgtccatagtggtgatgtaatcaccatcgatgtaagtaagagggtaatcgacgttgaccttaccgagcagcagctcgaagaaagacggaggaaatggaccccaccgccatacaagtccacctgtggagctctttggaagtacatcaagcttgtggctccagcgtctagaggatgcgtcactgatgagtaggatgtgttacattctgttaggttgtgcacatgatgtgtttgtcaatcaaaagctgttgccaggaacaatttccctgttagagtgattcattgtagttcggttttgcatgtggcaggtatgacaataaattgccggtttctaagagcttagcaatgctgcagaaactgctgaataatcgagtgtaatcggggtccgtgagcaatcacatctttgtcagtcaaaaaaaaaaaaaaaaaaa

SEQ ID NO: 10255 - protein, 591 aa, Zea mays
MQSMALTSPSLPEVGPVSGRRLQRIRATAVSDELKLNKYSARITEPKSQGASQAVLYGVGLTDADLRKPQVGVSSVWYEGNTCNMHLLRLAEAVRDGVREAGMVGFRFNTVGVSDAISMGTRGMCYSLQSRDLIADSIETVMGAQHYDANISIPGCDKNMPGTIMAMGRLNRPSIMIYGGTIKPGHFQGNSYDIVSAFQCYGEYVSGSITDEQRKNVLRNSCPGAGACGGMYTANTMASAIETLGMSLPYSSSTPAEDPLKLEECRLAGKYLLELLKMDLKPKDIITEKSLRNAMVIVMALGGSTNAVLHLIAIARSVGLHLTLDDFQKVSDQVPFLADLKPSGKYVMEDLHKIGGTPAVIHYLLEQGLLDGDCMTVTGKTLAENAKIFPPLSEGQQIIRPLDNPIKPTGHIQILYGNLAPEGSVAKITGKEGLFFSGPALVFEGEESMITAISENPANFKGKVVVIRGEGPKGGPGMPEMLTPTSAIMGAGLGKECALLTDGRFSGGSHGFVVGHICPEAQEGGPIGLVHSGDVITIDVSKRVIDVDLTEQQLEERRRKWTPPPYKSTCGALWKYIKLVAPASRGCVTDE

SEQ ID NO: 10256 - DNA, 2073 bp, Glycine max
  CDS (55)..(1860)
gtaaaccctttttccatctagagttgttgcggctctcttctctgcacactcagaatgcagtccacactcttcaaccccacccattcccttatccccacttcaccacactctatcagatccaattctggtcatgcttctctctccgttcgcgcctccatcgccgtggaaacccccacggagacggtgaagctgaacaagtacagctcccgcatcaccgagcccaaatcgcagggcgcctcccaggccgtgctctacggcgtcggtctctccgaggacgacatggccaagccccaggtcggcgtctcctcggtctggtacgagggcaacacctgcaacatgcacctcctccacctctccgaggccgtgcgtgacggcgttgctgctgctggcatggttcccttccgcttcaacaccgttggcgtcagcgacgccatctccatgggcacccgtggcatgtgctacagcctccagtccagggacctcattgccgacagcatcgagaccgtcatggcagcgcagtggtacgatggcaatatttccatccccggctgtgacaaaaatatgccaggtactatcattgccatggggaggctcaacagacctagcattatggtttatggcgggactataaaacctggtcattttgagggtaacacgtttgacatagtgtctgcctttcagtgctatggagaatatgtgagtggatcaattaatgatgaccaaagacaaaatgttattcgcaactcatgccctggggctggagcctgtggtggaatgtatacagccaataccatggcttctgcaatagaagctatgggaatgtctcttccctatagctcatctacacctgctgaggatccactaaagttggatgagtgtcgtttagctgggaaatatcttcttgagttactgaaaatggacttgaagccccgagatatcatcactcgtaaatcactacgtaatgcaatggttatagttatggcacttggtggatctactaatgctgtgttacatttaattgctattgccaagtctgttggcattgatttgactcttgatgattttcagaaggttagcgatgaggttccttttattgcagatcttaagcctagtgggaaatatgtcatggaagatgttcacaagattggagggactcctgcagttatccgctaccttcttgagcaaggctttttagatggtgactgtatgactgtcactggaaaaaccctagctgaaaatgcagaacttgtccctcctctgtccaacgggcaggaaataataaggccagtagaaaatcccatcaagaagacggctcacattcaaatattatatggaaaccttgcaccacagggttccgttgctaaaattactggaaaagaagggctgtacttctctggtcctgcacttgtctttgaaggagaggaggcaatgattgctgccatttcagaggatccttcgagttttaaggggaaagtggttgtaatcaggggagagggacccaagggtggtccgggaatgcctgagatgttaacaccaacaagtgcaataatgggtgcaggtcttggaaaggaagttgcattattgactgatggaagattttcaggaggttcacatggatttgtggttggccatatatgtcctgaagcacaggaaggtggtccaattggcttgattcaaaatggagacgtaatcaatgttgacatcaagaataggagaattgatgttttggtatcagatgaggagatggaagcacgcaggaaaaagtggactgctcctccatacaaagctaaccgaggagctctgtacaagtatattaaaaatgtgacacctgcttctagtggatgcgtaacagacgagtagaaagacatacctgcagagcaaaagctgatagtatgccttggtgaaattttgtcttgtgtttccagaacaagttggtaaaaattcaaaaacaaacctcatttcagagaatttaaaacaatggaattgaattgctactattgattagtgactatttaatatttatgattttctagagctaaaaaaaaaaaaaaaaaaaaaaaaaaaaaaaaaaaa

SEQ ID NO: 10257 - protein, 601 aa, Glycine max
MQSTLFNPTHSLIPTSPHSIRSNSGHASLSVRASIAVETPTETVKLNKYSSRITEPKSQGASQAVLYGVGLSEDDMAKPQVGVSSVWYEGNTCNMHLLHLSEAVRDGVAAAGMVPFRFNTVGVSDAISMGTRGMCYSLQSRDLIADSIETVMAAQWYDGNISIPGCDKNMPGTIIAMGRLNRPSIMVYGGTIKPGHFEGNTFDIVSAFQCYGEYVSGSINDDQRQNVIRNSCPGAGACGGMYTANTMASAIEAMGMSLPYSSSTPAEDPLKLDECRLAGKYLLELLKMDLKPRDIITRKSLRNAMVIVMALGGSTNAVLHLIAIAKSVGIDLTLDDFQKVSDEVPFIADLKPSGKYVMEDVHKIGGTPAVIRYLLEQGFLDGDCMTVTGKTLAENAELVPPLSNGQEIIRPVENPIKKTAHIQILYGNLAPQGSVAKITGKEGLYFSGPALVFEGEEAMIAAISEDPSSFKGKVVVIRGEGPKGGPGMPEMLTPTSAIMGAGLGKEVALLTDGRFSGGSHGFVVGHICPEAQEGGPIGLIQNGDVINVDIKNRRIDVLVSDEEMEARRKKWTAPPYKANRGALYKYIKNVTPASSGCVTDE

SEQ ID NO: 10258 - DNA, 1839 bp, Bradyrhizobium sp. ORS278
  CDS (1)..(1839): transl_table=11
atgcccgcctatcgctcccgcacctccacccatggccgcaacatggccggcgcccgcggcctgtggcgcgccaccggcatgaccaacgaggatttcggcaagccgatcatcgccgtcgtcaactccttcacccagttcgtccccggccatgtccatctcaaggatctcggccagctggtcgcgcgcgagatcgagaaggccggcggcgtcgcgaaggagttcaacaccatcgcggtcgacgacggcatcgcgatgggccatgacggcatgctctacagcctgccgtcgcgcgagctgatcgccgacagcacggaatacatggtcaacgcgcattgcgccgacgccatggtctgcatctccaactgcgacaagatcaccccgggcatgctgatggccgcgatgcggctgaatattcccgcggtgttcgtctcgggcggcccgatggaggccggcaaggtcaacatcgagggcaagctgcgcaaggtcgacctgatcgacgcgatgatcgtggccgccgacgacaaggtgtcggatgccgacgtcgaggtgatggagcgctcggcctgcccgacctgcggctcctgctccggcatgttcaccgccaactcgatgaactgcctgaccgaggcactcggcctgtcgctgcccggcaatggctcggtgctggcgacgcatgccgaccgcaagggcctgttcgtcgaggccggtcacctgatcgtcgatctcgcccgccgctactacgagcaggacgatgcgagcgtgctgccgcgttcgatcgccaacttcaaggcgttcgagaacgcgatgagcatggacatcgcgatgggcggctcgaccaacaccgtgctgcatctgctcgccgccgcgcatgagggcgagatcccgttcacgatgaccgatattgaccggctgtcgcgcaaggtgccctgcctgtgcaaggtcgcgcccgcggtagccgacgtgcacatggaggacgtgcatcgcgccggcggcgtgatgggcatcctcggcgagctcgcccgcgccggcctgctgcacacggagttgccgagcgtgcattcggcctcgctcgcggcagcgctggagcgctgggacatccgccagacctccagcgagagcgtgaagaacttctacatggccgcccccggcggcgtgccgacccaggtcgccttcagccaggaccgccgctaccaggagctcgatctcgaccggcagacaggctgcatccgcgacctcgaccacgcctattccaaggatggcggcttggccgtgctgaccggcaacatcgcgctcgacggctgcatcgtgaagaccgccggcgttgatgcctcgatcctgaaattcgcaggccccgcgcgggtgatggagagccaggacgcggcggtcgaagcgatcctcaccaacaagatcaaggccggcgacatcgtcgtcatcatctatgaaggcccgcgcggcggcccaggcatgcaggagatgctgtatccgaccagctatctgaagtcgaagggcctcggcaaggcctgcgcgctgatcaccgacggccgcttctccggcggcacctcgggcctgtcgatcggccacgtctcgccagaagccgccgaaggcggtctcatcggcctggtgcaggacggcgatcgtatcgagatcgacatccccaaccgcaccatccatctcgccgtgtcagacgaggaactcgccaagcgccgcgccgcgatggaggcgaagggcgatcaggcctggaagccgaagacccgcgcccgcaaggtctcgaccgcgctcaaggcctatgctgcatttgcgtcaagtgccgccaagggcgcggtgcgggtggtgaagtag

SEQ ID NO: 10259 - protein, 612 aa, Bradyrhizobium sp. ORS278
MPAYRSRTSTHGRNMAGARGLWRATGMTNEDFGKPIIAVVNSFTQFVPGHVHLKDLGQLVAREIEKAGGVAKEFNTIAVDDGIAMGHDGMLYSLPSRELIADSTEYMVNAHCADAMVCISNCDKITPGMLMAAMRLNIPAVFVSGGPMEAGKVNIEGKLRKVDLIDAMIVAADDKVSDADVEVMERSACPTCGSCSGMFTANSMNCLTEALGLSLPGNGSVLATHADRKGLFVEAGHLIVDLARRYYEQDDASVLPRSIANFKAFENAMSMDIAMGGSTNTVLHLLAAAHEGEIPFTMTDIDRLSRKVPCLCKVAPAVADVHMEDVHRAGGVMGILGELARAGLLHTELPSVHSASLAAALERWDIRQTSSESVKNFYMAAPGGVPTQVAFSQDRRYQELDLDRQTGCIRDLDHAYSKDGGLAVLTGNIALDGCIVKTAGVDASILKFAGPARVMESQDAAVEAILTNKIKAGDIVVIIYEGPRGGPGMQEMLYPTSYLKSKGLGKACALITDGRFSGGTSGLSIGHVSPEAAEGGLIGLVQDGDRIEIDIPNRTIHLAVSDEELAKRRAAMEAKGDQAWKPKTRARKVSTALKAYAAFASSAAKGAVRVVK

SEQ ID NO: 10260 - DNA, 1785 bp, Oryza sativa (japonica cultivar-group)
  CDS (1)..(1785)
atgcagtcgcttgccctcacctccccctcccttccggcgccggcgaccgcatccggccgccgccgccgccgcctggagcgcatccgcgccaccgcggtgtccgacgagccgaagctgaacaagtacagcgcgcgcatcacggagcccaagtcgcagggggcgtcgcaggcggtgctctacggcgtggggctcaccgacgccgacctccgcaagccgcaggtgggcgtctcctccgtctggtacgagggcaacacctgcaacatgcaccttctccgcctcgccgaggccgtcagggacggcgtccgcgaggccggcatggtggccttccgcttcaacaccgtcggggtcagcgacgccatctccatgggcacccggggcatgtgctacagcctccagtcgcgcgacctcatcgccgacagcatcgagaccgtcatgggcgcgcagcactacgacgccaacatctccattcctggatgcgacaagaacatgccaggaacaataatggcaatggggcggctgaaccgaccaagtatcatgatatatggtggaactattaagcctggtcattttcagggtaattcttatgacatagtatctgctttccagtgctatggagaatttgttaccggatcaatcagtgatgagcaaagaaagaatgtgctccgcaactcatgcccaggagcaggtgcgtgtggtggtatgtacaccgcaaatacaatggcatccgccatcgagaccatgggtatgagccttccgtacagttcttcaacccctgctgaagacccactaaagctagaggaatgccgtcttgctgggaagtatcttttagaattgttaaagatggatttgaagcctaaagacattatcactgagaaatctttgcggaacgcaatggtcattgtcatggcacttggtgggtctactaatgctgttttgcatttaattgctatcgctaggtctgtaggtctgcaattaactcttgatgattttcagaaggtcagtgaccaagttcctttccttgcggaccttaagcctagtggcaaatatgtcatggaggatctgcataagattggtggaacacctgcagtaattcattatcttctggagcaaggtcttcttgatggtgattgtatgaccgtcactgggaaaactctagcggaaaatgctaaaatcttccctcctctgtccgaaggacagcaaataataaggcccctggacaacccaatcaaatcaactggtcatatacaaatactttatggcaatcttgcaccagaaggttctgtagcaaaaattactggcaaagaggggatgtttttctcaggccctgcactagtgtttgagggtgaagaatctatgattacagctatatcagaaaacccagcgaatttcaaggggaaggtagtagtgatacgaggagaaggaccgaaaggtggaccagggatgcctgaaatgctgactccaactagtgcaataatgggtgctggtcttgggaaggagtgtgccctgctgaccgatggcagattttctggaggatcacatggatttgttgtaggccacatttgtcctgaagcacaggagggaggtccaattggtcttgttcaaaacggtgacaaaattaccattgatgttgtgaagagagtaattgatgttgaactgactgaagctgagctggaagaaagacggaggaaatggacgccgccgccacacaaggctgcccgtggagcgctttggaagtacacgaagctcgtgtcccctgcatcaagaggatgcgtcaccgatgagtag

SEQ ID NO: 10261 - protein, 594 aa, Oryza sativa (japonica cultivar-group)
MQSLALTSPSLPAPATASGRRRRRLERIRATAVSDEPKLNKYSARITEPKSQGASQAVLYGVGLTDADLRKPQVGVSSVWYEGNTCNMHLLRLAEAVRDGVREAGMVAFRFNTVGVSDAISMGTRGMCYSLQSRDLIADSIETVMGAQHYDANISIPGCDKNMPGTIMAMGRLNRPSIMIYGGTIKPGHFQGNSYDIVSAFQCYGEFVTGSISDEQRKNVLRNSCPGAGACGGMYTANTMASAIETMGMSLPYSSSTPAEDPLKLEECRLAGKYLLELLKMDLKPKDIITEKSLRNAMVIVMALGGSTNAVLHLIAIARSVGLQLTLDDFQKVSDQVPFLADLKPSGKYVMEDLHKIGGTPAVIHYLLEQGLLDGDCMTVTGKTLAENAKIFPPLSEGQQIIRPLDNPIKSTGHIQILYGNLAPEGSVAKITGKEGMFFSGPALVFEGEESMITAISENPANFKGKVVVIRGEGPKGGPGMPEMLTPTSAIMGAGLGKECALLTDGRFSGGSHGFVVGHICPEAQEGGPIGLVQNGDKITIDVVKRVIDVELTEAELEERRRKWTPPPHKAARGALWKYTKLVSPASRGCVTDE

SEQ ID NO: 10262 - DNA, 1821 bp, Agrobacterium tumefaciens
  CDS (1)..(1821): transl_table=11
atgtccgttcttccaacaattcaggctgtcaccgagcgcattgcagcacggcgcgcgcagtcgcgtcgagagtatctcgaccttgtcgaggcacagagacagcaaggcgcacaccgcgccgctctgtcctgtgggaaccttgctcatggttttgccgcctgctcctcatccgagaagcgatgcttgtcaggatcgacagctctgaacctgggcattgttacgtcttacaatgacatgttgagcgctcatcagccctacggcaactatccagacgccatcaaatctgcggcgcgctcggtcggcgcgaccgcacaggttgcgcgcggcgtgccggctatgtgcgatggtgtaacccagggtcagccggggatggatctgtcgctgttcagccgcgatgtgatcgcaatgtccactgcgattgcactcagtcacaacatgttcgatgccgctgtctacctcggtgtttgcgacaaaatcgttccaggtcttttgatcggagcactttccttcggccacctccctgcggtttttgtgccagcaggtccgatgacatcgggtctttcaaatgacgagaaggcgcgcatacgccagctgtcatcggaaggaaagattgatcgtccgcaattgctcgatgctgaagcgaaatcctatcactcccccgggacatgcaccttctatggcactgcgaattccaaccagatgctcatggaaatcatgggcctgcacattcctggttcgagcttcgtaaacgccaatacaccccttcgcgacgcgctcactcgggaggcgacgcgccgggcgctttcgctcaccgcaggcggtaacaattacacgccaatcggccacatcatcgatgaaagggcggtcgtcaatggtattgtgggattgctcgcgactggtggctcgaccaatcatacgctgcatatcgtcgccatcgcacaggcagccgggctgaacgttacgtgggaagatatgagtgatctcagcgacgtcgtgccgctgctgacccgcgtttacccgaatggctctgcagacgtgaaccattttcacgccgcaggaggaatgggcttgcttatccgcgagctgatcgatggcggcttcttgcatgaagacgtcaaaactatctggggaaccggccttgagagctacccagtcgaggcaagactagccggcgacgagttggtttttgaacccacaccggcgggctcgcgcaatcccaaagtgcttgcacctgttagcggagccttctcgccgaatggaggtctgaagttgttatcaggtaacatcggcaaatcggtcattaaagtctctgccgtcaagccggaaaaccgggtcgtggaggctccagcacgcgtctttcatgcccaggaggagctccagaaggcgtttagggatggcgagcttgagcgcgacatgattgccgttgtccgcttccaggggccaagatcaatcgggatgccggaacttcataagctcacgcccatgctcggtgtgttgcaggatcgaggcttcaaggttgcgctacttacagatggccggatgtctggcgcatcggggaaggtccctgctgcaatccatattacgcctgaagcgtcggacggcggtgccatttccaggatccgcgatggagaccttatcaggttggatgcgattgagggaacgttgacctaccttggcgatgacgaggaattcaactctcgcgtccctgcgacccacgatcatcgcccacagcattatggcactggccgcgagctctttgcccgctgtcggtccttggttagtccagctgaccttggtgccagcattcttggacgcttctaa

SEQ ID NO: 10263 - protein, 606 aa, Agrobacterium tumefaciens
MSVLPTIQAVTERIAARRAQSRREYLDLVEAQRQQGAHRAALSCGNLAHGFAACSSSEKRCLSGSTALNLGIVTSYNDMLSAHQPYGNYPDAIKSAARSVGATAQVARGVPAMCDGVTQGQPGMDLSLFSRDVIAMSTAIALSHNMFDAAVYLGVCDKIVPGLLIGALSFGHLPAVFVPAGPMTSGLSNDEKARIRQLSSEGKIDRPQLLDAEAKSYHSPGTCTFYGTANSNQMLMEIMGLHIPGSSFVNANTPLRDALTREATRRALSLTAGGNNYTPIGHIIDERAVVNGIVGLLATGGSTNHTLHIVAIAQAAGLNVTWEDMSDLSDVVPLLTRVYPNGSADVNHFHAAGGMGLLIRELIDGGFLHEDVKTIWGTGLESYPVEARLAGDELVFEPTPAGSRNPKVLAPVSGAFSPNGGLKLLSGNIGKSVIKVSAVKPENRVVEAPARVFHAQEELQKAFRDGELERDMIAVVRFQGPRSIGMPELHKLTPMLGVLQDRGFKVALLTDGRMSGASGKVPAAIHITPEASDGGAISRIRDGDLIRLDAIEGTLTYLGDDEEFNSRVPATHDHRPQHYGTGRELFARCRSLVSPADLGASILGRF

SEQ ID NO: 10264 - DNA, 1728 bp, Mesorhizobium loti MAFF303099
  CDS (1)..(1728): transl_table=11
gtgaccgacaccaaacgcaaactgcggtccgaagcctggttcggcggtgaaggcaagaacgccttcatgcaccgcagctggatgaagaaccagggcatcccggccgatgctttcgacggccgcccggtgatcggcatctgcaacacatggtcggagctgacgccgtgcaacgcgcatctgcgggcgctggccgatcacgtcaagcgcggcgtctacgaggccgggggcctgccgctcgaatttccggtgatgtcgctcggtgagagcaacatgcgccccacagccatgctgtttcgcaatctggtcagcatggatgtagaggaatccatccgcggtaaccccatcgacggcgtcatcctgctggtgggctgcgacaagaccacgccggcgctcttgatgggggccgcctcgtgcaatttgccgaccatcaccgtttccggcgggccgatgctcaacggcaagttccgcgggcatgatatcggctcgggcacccatgtctggaaattcgccgaggaagtgaaggccggtcgcatgccggtcgccgacttcctcgccgcggaacagggccagagccggtcggccggcagttgcatgaccatgggcacggcctcgaccatggccagcatggtggaagcgctcggcatcggcatgccggacaacgccgcgatcccggccgtggattcgcgccgtggcgtgctcgcccagatggctggacgccagatcgtcgagctggtccgccgggacgtgaaaatttcggacatcctcacaaggcaagccttcgagaacgccattcgcgtcaatggcgcgatcggcggctcgaccaatgcggtgctgcatctgatcgccatcgccaaccgggtcggtgtcgacctcagccttgaagactgggaccgccttggccgcgacgttccaaccattgtcgacctgatgccgtcgggccggttcctgatggaagatttctactatgccggggggctggctgcggtcatggcgtcgcttgatgaagtggggcttcttcatcgcgacgtcatgaccgtcagcgacaagacgatcggcgcgttgatcgacggagcgcccaactacaaccgcgaggtcatccggccgctgagcgaacctttgaccgaccaaggcggcatctcgatcctgcgcggcaatctggcgcccaacggcgcggtcatcaagccgtcggcggcaacgcccgaactgatgcagcatcgcggcaaggccgtcgtgttcgaggacatcgagcactactacgcccgcatcgacgatccagagctggatatcgacgcctcctcggtgatggtgctgaaaaattgcgggccgcgcggctatcccggcatggccgaggtcggcaacatgccgctgccggcgaagctgctcaagcagggcgtctccgacatggtgcgcatctcggatgcacgcatgagcggcacggcctacggcacggtggtgctgcatatcgcgccagaggccgcggccggtggcgtgctcgccctggtgcgcgacggggatctgatcgagctcgacgtcgccggccgccgcttggagcttttggtgtcggacgaggaactggcgatccgtcgccgcgactggaagccgccggcgccgcccgaaggcggatatcagagcctctatgtcgagcgcgtgctgcaggccgacaagggctgcgatttcgactttctcgtcggccggcgcgatgccggcatcccccggcattcccattag

SEQ ID NO: 10265 - protein, 575 aa, Mesorhizobium loti MAFF303099
MTDTKRKLRSEAWFGGEGKNAFMHRSWMKNQGIPADAFDGRPVIGICNTWSELTPCNAHLRALADHVKRGVYEAGGLPLEFPVMSLGESNMRPTAMLFRNLVSMDVEESIRGNPIDGVILLVGCDKTTPALLMGAASCNLPTITVSGGPMLNGKFRGHDIGSGTHVWKFAEEVKAGRMPVADFLAAEQGQSRSAGSCMTMGTASTMASMVEALGIGMPDNAAIPAVDSRRGVLAQMAGRQIVELVRRDVKISDILTRQAFENAIRVNGAIGGSTNAVLHLIAIANRVGVDLSLEDWDRLGRDVPTIVDLMPSGRFLMEDFYYAGGLAAVMASLDEVGLLHRDVMTVSDKTIGALIDGAPNYNREVIRPLSEPLTDQGGISILRGNLAPNGAVIKPSAATPELMQHRGKAVVFEDIEHYYARIDDPELDIDASSVMVLKNCGPRGYPGMAEVGNMPLPAKLLKQGVSDMVRISDARMSGTAYGTVVLHIAPEAAAGGVLALVRDGDLIELDVAGRRLELLVSDEELAIRRRDWKPPAPPEGGYQSLYVERVLQADKGCDFDFLVGRRDAGIPRHSH

SEQ ID NO: 10266 - DNA, 1827 bp, Arabidopsis thaliana
  CDS (1)..(1827)
atgcaagccaccatcttctctccacgcgccactctcttcccctgtaaacctctcctcccttcccacaatgtcaactctcgccgtccctcaatcatctcctgctccgcccaatccgtaaccgctgatccttcaccacctatcactgacaccaataagctcaacaaatacagctcaagaatcactgaacccaaatcccaaggtgggtctcaagcaattcttcacggtgttggtttatcagacgacgatttgctaaaaccccagattggtatctcgtcggtttggtatgaagggaacacttgtaacatgcatttgctgaaattgtctgaggctgtgaaagaaggagttgaaaatgcaggaatggttgggtttaggtttaatactattggtgtgagtgatgctatttcgatgggaacgagagggatgtgttttagtttgcaatctagggatttgattgctgatagtattgagactgttatgagtgctcagtggtatgatggtaacatatctattcccggttgtgataaaaatatgcctggaactattatggctatgggaaggcttaacagaccagggattatggtttatggtggaaccattaagcctggccattttcaagacaagacatatgacattgtatctgctttccagagttatggagaatttgttagtggctccataagtgatgaacagagaaagactgtcctccatcattcatgtcctggagctggagcctgtggtggcatgtacacagcgaatacaatggcttctgctatcgaagcaatgggaatgtcccttccttacagttcttcaatacctgctgaagacccattgaagttggacgagtgtcgcttagcaggaaaatatcttctagaattgctaaagatggacttaaaaccccgtgacattatcactccaaaatcacttcgtaatgcaatggtttccgtcatggcccttgggggatcgacaaatgcagtattgcatctaattgctattgcaaggtctgttggtttggagttgactcttgacgattttcagaaagttagcgatgcggttccatttctagcagatcttaaacccagtgggaagtatgttatggaggatatacataagataggtggtacgccagctgttctccgctatttattagagctaggattgatggatggtgattgtatgacagtgacagggcagactttggctcaaaatttagaaaacgtcccaagcttaacagaagggcaggagataattagacctctgtcaaatccaatcaaggagactggacacatacaaattttgagaggagaccttgcaccagatggttctgtagcaaaaattaccggcaaagagggcttatatttctctggtcctgcacttgtatttgaaggagaggaatctatgttggctgctatatcagcagacccaatgagttttaagggaactgtggttgttatcagaggagaggggcctaaaggaggtccaggtatgcctgagatgttgacaccgacaagtgcaataatgggtgccggtcttggaaaggaatgtgcattactgactgatggtaggttctctggtgggtcacacggttttgttgttggccacatttgccctgaagctcaggagggtggtccgatcggtctgatcaagaacggagacataatcaccattgacataggaaagaagagaatagacacacaagtctcacccgaagaaatgaatgaccgtagaaagaaatggactgctcctgcatacaaggttaaccgcggagtcctatataagtacatcaagaacgtgcaatcggcttcagatggatgtgtgactgacgagtaa

SEQ ID NO: 10267 - protein, 608 aa, Arabidopsis thaliana
MQATIFSPRATLFPCKPLLPSHNVNSRRPSIISCSAQSVTADPSPPITDTNKLNKYSSRITEPKSQGGSQAILHGVGLSDDDLLKPQIGISSVWYEGNTCNMHLLKLSEAVKEGVENAGMVGFRFNTIGVSDAISMGTRGMCFSLQSRDLIADSIETVMSAQWYDGNISIPGCDKNMPGTIMAMGRLNRPGIMVYGGTIKPGHFQDKTYDIVSAFQSYGEFVSGSISDEQRKTVLHHSCPGAGACGGMYTANTMASAIEAMGMSLPYSSSIPAEDPLKLDECRLAGKYLLELLKMDLKPRDIITPKSLRNAMVSVMALGGSTNAVLHLIAIARSVGLELTLDDFQKVSDAVPFLADLKPSGKYVMEDIHKIGGTPAVLRYLLELGLMDGDCMTVTGQTLAQNLENVPSLTEGQEIIRPLSNPIKETGHIQILRGDLAPDGSVAKITGKEGLYFSGPALVFEGEESMLAAISADPMSFKGTVVVIRGEGPKGGPGMPEMLTPTSAIMGAGLGKECALLTDGRFSGGSHGFVVGHICPEAQEGGPIGLIKNGDIITIDIGKKRIDTQVSPEEMNDRRKKWTAPAYKVNRGVLYKYIKNVQSASDGCVTDE

SEQ ID NO: 10268 - DNA, 1812 bp, Escherichia coli O157:H7 EDL933
  CDS (1)..(1812): transl_table=11
  misc_feature (1709)..(1709): y is t or c
  misc_feature (1752)..(1752): y is t or c
  misc_feature (1797)..(1797): y is t or c
atgaatccacaattgttacgcgtaacaaatcgaatcattgaacgttcgcgcgagactcgctctgcttatctcgcccggatagaacaagcgaaaacgtcgaccgttcatcgttcgcagttggcatgcggtaacctggcacacggtttcgctgcctgccagccagaagacaaagcctctttgaaaagcatgttgcgtaacaatatcgccatcatcacctcctataacgacatgctctccgctcaccagccttatgaacactatccagaaatcattcgtaaagccctgcatgaagcgaatgcggttggtcaggttgcgggcggtgttccggcgatgtgtgatggtgtcacccaggggcaggatggaatggaattgtcgctgctaagccgcgaagtgatagcgatgtctgcggctgtcgggctgtcccataacatgtttgatggtgctctgttcctcggggtgtgcgacaagattgtcccgggtctgacgatggcagccctgtcgtttggtcatttgcctgcggtgtttgtgccgtctggaccgatggcaagcggtttgccaaataaagaaaaagtgcgtattcgccagctttatgccgaaggtaaagtggaccgcatggccttactggagtcagaagccgcgtcttaccatgcgccgggaacatgtactttctacggtactgccaacaccaaccagatggtggtggagtttatggggatgcagttgccaggctcttcttttgttcatccggattctccgctgcgcgatgctttgaccgctgccgctgcgcgtcaggttacacgcatgaccggtaatggtaatgaatggatgccgatcggtaagatgatcgatgagaaagtggtggtgaacggtatcgttgcactgctggcgaccggtggttccactaaccacaccatgcacctggtggcgatggcgcgcgcggccggtattcagattaactgggatgacttctctgacctttctgatgttgtaccgctgatggcacgtctctacccgaacggtccggccgatattaaccacttccaggcggcaggtggcgtaccggttctggtgcgtgaactgctcaaagcaggcctgctgcatgaagatgtcaatacggtggcaggctttggtctgtctcgttatacccttgaaccatggctgaataatggtgaactggactggcgggaaggggcggaaaaatcactcgacagcaatgtgatcgcttccttcgaacaacctttctctcatcatggtgggacaaaagtgttaagcggtaacctgggccgtgcggttatgaaaacctctgccgtgccggttgagaaccaggtgattgaagcgccagcggttgtttttgaaagccagcatgacgttatgccggcctttgaagcgggtttgctggaccgcgattgtgtcgttgttgtccgtcatcaggggccaaaagcgaacggaatgccagaattacataaactcatgccgccacttggtgtattattggaccggtgtttcaaaattgcgttagttaccgatggacgactctccggcgcttcaggtaaagtgccgtcagctatccacgtaacaccagaagcttacgatggcgggctgctggcaaaagtgcgcgacggggacatcattcgtgtgaatggacagacaggcgaactgacgctgctggtagacgaagcggaattggctgctcgcgaaccacacattcytgacctgagcgcgtcacgcgtgggaacaggacgtgaattattyagcgccttgcgtgaaaaactgtccggtgccgaacagggcgcaacytgtatcactttttaa

SEQ ID NO: 10269 - protein, 603 aa, Escherichia coli O157:H7 EDL933
  misc_feature (570)..(570): The Xaa at location 570 stands for Leu, or Pro.
MNPQLLRVTNRIIERSRETRSAYLARIEQAKTSTVHRSQLACGNLAHGFAACQPEDKASLKSMLRNNIAIITSYNDMLSAHQPYEHYPEIIRKALHEANAVGQVAGGVPAMCDGVTQGQDGMELSLLSREVIAMSAAVGLSHNMFDGALFLGVCDKIVPGLTMAALSFGHLPAVFVPSGPMASGLPNKEKVRIRQLYAEGKVDRMALLESEAASYHAPGTCTFYGTANTNQMVVEFMGMQLPGSSFVHPDSPLRDALTAAAARQVTRMTGNGNEWMPIGKMIDEKVVVNGIVALLATGGSTNHTMHLVAMARAAGIQINWDDFSDLSDVVPLMARLYPNGPADINHFQAAGGVPVLVRELLKAGLLHEDVNTVAGFGLSRYTLEPWLNNGELDWREGAEKSLDSNVIASFEQPFSHHGGTKVLSGNLGRAVMKTSAVPVENQVIEAPAVVFESQHDVMPAFEAGLLDRDCVVVVRHQGPKANGMPELHKLMPPLGVLLDRCFKIALVTDGRLSGASGKVPSAIHVTPEAYDGGLLAKVRDGDIIRVNGQTGELTLLVDEAELAAREPHIXDLSASRVGTGRELFSALREKLSGAEQGATCITF

SEQ ID NO: 10270 - DNA, 1821 bp, Agrobacterium tumefaciens str. C58
  CDS (1)..(1821): transl_table=11
atgtccgccgattcccgcattcaggccattaccgcccgcatcgtcgaacgttccaagccctaccgcgagacctatctcgagcggctgcggctgcaggtttcgaagggcgttcaccgttccgttctgtcctgcggcaatcttgcgcatggatttgccgtctgttcccccgccgacaaggacatccttgccggcgaccgggttcccaatctcggcattatcaccgcctataacgacatgctgtcggcgcaccagccctacgagaccttcccggcgatcatccgtgatgcggcgaaggaagcgggcggcatcgcgcaggtagcgggcgcggttcccgccatgtgcgacggcgtgacccagggccagcccggcatggagctttcgctgttttcccgcgatgccattgccatggcagccggcataggcctgtcgcacaacatgttcgacgccgccgtctatctcggcgtttgtgacaagatcgtgcccggcctcgtcatcgccgcgctcgcctttggccacctgcccgccgtcttcgttcccgccggtccaatgacatctggcctgccgaatgacgaaaaatcccgcattcgccagctttatgccgaaggcaaggtcggccgcgccgagctgctggaggcggaatccaagtcctatcacggccccggcacctgcaccttctacggcaccgccaattcgaaccagatgctgatggagatcatgggtttccatatgcccggttcgtccttcatcaatcccggcacaccgctgcgtgatgcactcacccgtgaagcagccaaccgcgcgctggcgatcaccgcgcagggcaatgaattcacgccggcgggcgagatgatcgacgaaagatccgtcgtcaacggcgtcgtcggcctgcatgcgacgggtggctccaccaaccacaccatgcacctgatcgccatggcgcgcgccgccggcatcattctcacctggcaggatatttccgatctttccgacatcgtgccgctgctcgcccgcgtttatcccaacgggcttgccgatgtgaaccatttccatgccgccggcggtatgggcttcctcatcaagcagctgctgaagcagggcttcgtgcatgatgatgtgcgaaccgtcttcggacaggggctttcggcctacaccgtcgatgccatgcttgacgagaagggtgcagtcacccgccagccctcccccgaacagagccatgacccgaaggttctgtccagcatcgaaacgccgttccagtcgaccggcggcctgaagatgctgaccggcaatctcggcaaatcggtgatcaagatttcggccgtcaagccggaacgccacatcatcgaagcaccggcgatcgttttccatgatcagcaggaacttcaagacgcgttcaaggacggcaagcttaaccgtgacttcattgcggttgtccgcttccaggggccgaaggccaatggcatgccggaactgcaccgcctgacgccgccgctcggcgtgctgcaggaccgcggcttcaaggtggcgctggtgactgacgggcgtatgtctggcgcatccggcaaggtgccggctgccatccatgtcacgccggaagcctccgattgcggcccgatctcgcttatccgcgatggcgacatcatccgtctcgacgccatttccggaacgctggaagtgctggtttccgccgccgagctggcaaaacgtgaaccggcgcgtgccgatctttccggtaatgaatggggcatgggccgcgaacttttcgcccccttccgccgcaatgccggcccggccgatcagggcgccagcgttctcttccattga

SEQ ID NO: 10271 - protein, 606 aa, Agrobacterium tumefaciens str. C58
MSADSRIQAITARIVERSKPYRETYLERLRLQVSKGVHRSVLSCGNLAHGFAVCSPADKDILAGDRVPNLGIITAYNDMLSAHQPYETFPAIIRDAAKEAGGIAQVAGAVPAMCDGVTQGQPGMELSLFSRDAIAMAAGIGLSHNMFDAAVYLGVCDKIVPGLVIAALAFGHLPAVFVPAGPMTSGLPNDEKSRIRQLYAEGKVGRAELLEAESKSYHGPGTCTFYGTANSNQMLMEIMGFHMPGSSFINPGTPLRDALTREAANRALAITAQGNEFTPAGEMIDERSVVNGVVGLHATGGSTNHTMHLIAMARAAGIILTWQDISDLSDIVPLLARVYPNGLADVNHFHAAGGMGFLIKQLLKQGFVHDDVRTVFGQGLSAYTVDAMLDEKGAVTRQPSPEQSHDPKVLSSIETPFQSTGGLKMLTGNLGKSVIKISAVKPERHIIEAPAIVFHDQQELQDAFKDGKLNRDFIAVVRFQGPKANGMPELHRLTPPLGVLQDRGFKVALVTDGRMSGASGKVPAAIHVTPEASDCGPISLIRDGDIIRLDAISGTLEVLVSAAELAKREPARADLSGNEWGMGRELFAPFRRNAGPADQGASVLFH

SEQ ID NO: 10272 - DNA, 1929 bp, Agrobacterium tumefaciens str. C58
  CDS (1)..(1929): transl_table=11
gtgcggtttgcgctagaaaaactgcaaaatggggaaaggcggtttgtctgtgttgtggacaaacgccttcgccgagagatcgaggaaaacaccatgccagcctatcgctccagaacgacaacccacggccgcaacatggcgggcgcgcgcggcctttggcgcgccaccggcatgaaggacagcgatttcggcaagccgatcatcgcggtggtcaattccttcacgcagttcgtaccgggccatgtgcatctaaaggatctcggccagctcgttgcccgcgaaatcgaggcggccggcggcgttgccaaggaattcaacacgattgcggtcgatgatggtatcgccatgggccatgacggcatgctctattcgctgccgtcgcgcgagatcatcgctgactcggtcgaatatatggtcaatgcccattgcgccgatgcgatggtctgcatttccaactgcgacaagatcacgcccggcatgctgaatgccgcgatgcgcctcaacattcccgccgttttcgtgtccggtggtccaatggaagcgggcaaggtggttctgcacggcaagaccgttgcgctcgatctggtcgacgcgatggtggctgctgccgacgacaagatttccgatgaggacgtcaagatcatcgagcgctccgcctgcccgacctgcggttcctgttccggcatgttcacggccaattccatgaactgtctgaccgaggcgctcggcctgtcattgcccggcaacggctcgacgcttgccacccactccgatcgcaagcgcctgttcgttgaagccggtcacctgatcgtcgatctggcccgccgttattacgagcaggacgacgaaaccgttctgccgcgcaccatcgccaacaaggcggcgttcgaaaacgccatgtcgctggatattgccatgggcggctccaccaacacggttctgcatattctggcggcagcccacgagggcggcgtcgatttcggtatggaggacatcgaccggctttcccgcaaggttccctgcctttccaaggttgcgcctgcgaagcaggatgtgcacatggaagacgtgcatcgcgccggcggcatcatgcgtattctcggtgagctggagcgtggcggtctcatcaaccgcgatacctataccgtacacgaagcgacgcttggcgatgccatcgaccgctgggacatcacgcgcaccaacagcgaaatggtgcggcagttcttcaaggccgctccgggcggcgtaccgacacaggtggccttcagccagtcctcgcgctgggatgatctggacaccgacagcgacaacggcgtcattcgttcggtcgagaagcctttctccaaggatggcggtctggccgttctttacggcaacatcgcgctcgatggctgcatcgtgaagacggcgggtgttgatgaatccatcctgaaattcaacggatcggcagtcgtttacgaaagccaggacgcggccgtgaagggcattctcggcaacgaggtcaaggcgggcgacgtcgtcgtcatccgctatgaaggaccgaagggcggcccgggcatgcaggaaatgctctatccgaccagctacctcaagtccaagggcctcggtaaagcctgcgcgctcatcaccgatggtcgcttctccggtggcacgtcaggcctttccatcggtcatgcctcgccggaagcggcgcagggcggtgccatcggcctcgtgcgtcagggcgacctgattgagatcgatattccgaaccgcacgatcaatctcaaggtttcggatgcggaactggccgcgcgccgggccgagcaggaagaaaagggctggaagccggaagcaccgcgcaagcgtaatgtcacgacggcgctcaaggcctatgcggcctttgcgtcgagcgcggacaagggtgctgtgcggattctgccggagtaa

SEQ ID NO: 10273 - protein, 642 aa, Agrobacterium tumefaciens str. C58
MRFALEKLQNGERRFVCVVDKRLRREIEENTMPAYRSRTTTHGRNMAGARGLWRATGMKDSDFGKPIIAVVNSFTQFVPGHVHLKDLGQLVAREIEAAGGVAKEFNTIAVDDGIAMGHDGMLYSLPSREIIADSVEYMVNAHCADAMVCISNCDKITPGMLNAAMRLNIPAVFVSGGPMEAGKVVLHGKTVALDLVDAMVAAADDKISDEDVKIIERSACPTCGSCSGMFTANSMNCLTEALGLSLPGNGSTLATHSDRKRLFVEAGHLIVDLARRYYEQDDETVLPRTIANKAAFENAMSLDIAMGGSTNTVLHILAAAHEGGVDFGMEDIDRLSRKVPCLSKVAPAKQDVHMEDVHRAGGIMRILGELERGGLINRDTYTVHEATLGDAIDRWDITRTNSEMVRQFFKAAPGGVPTQVAFSQSSRWDDLDTDSDNGVIRSVEKPFSKDGGLAVLYGNIALDGCIVKTAGVDESILKFNGSAVVYESQDAAVKGILGNEVKAGDVVVIRYEGPKGGPGMQEMLYPTSYLKSKGLGKACALITDGRFSGGTSGLSIGHASPEAAQGGAIGLVRQGDLIEIDIPNRTINLKVSDAELAARRAEQEEKGWKPEAPRKRNVTTALKAYAAFASSADKGAVRILPE

SEQ ID NO: 10274 - DNA, 1785 bp, Agrobacterium tumefaciens str. C58
  CDS (1)..(1785): transl_table=11
atgagcgacgacaagatacccatgcgccgcctgcgatcccaggactggttcgataaccccgatcatctcgacatgacggcgctctatctggagcgcttcatgaattacggcgtgacgccggaagagctgcgctccggcaagcctgtcatcggcatcgcgcagagcggcagtgacctcacgccctgcaaccgggtccatgtggaactggtcaagcgggtacgcgatggcatccgtgatgcgggcggcataccgatcgagtttccaacccatccgatgttcgaaaactgcaagcgcccaacggcggcgcttgatcgcaatctcgcttatctcagcctcgtggaagtgctttacggctacccgctcgatggtgtcgttctgacaaccggctgcgacaagaccacgccttcggcgctgatggcggcgagcacggtggatattcccgccatcgtgctttccggcgggccgatgctcgacgggtatcatgacggcgatctggtcggttccggcaccgtcatctggcgcatgcgccgcaaatatggcgcgggcgaaatcactcgcgaggagtttttgcaggcggcgctggaatcggctccgtcggtcgggcattgcaacaccatgggcaccgcatccaccatgaatgccattgctgaagcgctcggcatgtcacttaccggctgcggcgcgatcccggccgcttaccgcgagcgtggccagatggcctatcgcaccggtcgtcgtgccgtcgagcttgtgatcgagaatatcaagccctccgacatcatgacgcgcgaggcgtttttgaacgcgatccgggtcaactcggcgatcggcggttccaccaatgcccagccgcatcttgcggcgatggccaaacatgcgggcgtcgagcttcgcgaagaggactggcaggctcacggttacgacattccgcttctcgccaatgtccagcctgccggcaaatggctgggtgagaaataccaccgcgccggcggcacgcccgccatcatgtgggagcttctgaaggcaggcaagctcgacggaagttgtccgaccgtgaccggcaaaaccatggcggaaaatctcgacgggcgggaatcgaccgaccgcgacgtgatcctgccctatgacaagccgctcaaggagcgcgccggtttcctcgttctcaagggcaatctgttcgatttcgccatcatgaagacgagcgtgatctcggcggagttccgccagcgttacctcagcgagccgggccgcgaggggatattcgaaggcaagtgcgtcgtattcgatggttcggaggattatcacgcccgcatcaacgagccgtcgctggatattgacgagcgcaccattcttgtcattcgtggcgcggggccgctcggctggccgggttcggccgaggtcgtcaacatgcagccaccggatgcgcttctgaaaaagggcattaccagcctgccgacgatcggcgacggtcggcagtcgggaacggcggacagcccgtcgatcctcaatgcttccccggaaagtgcggcgggtggcgggctggcatggctgcgcactggcgatgtgatccgcatcgacttcaacaagggtgagtgcaatgcgctggtgccgcaagcggagcttgatgcccgcaaggccgacggcatacccgccgtgcccgccgatgcaacgccctggcagcgtatctatcgtcaatcggtgacccagctttcggacggtgcggtgctggaaggggcggcggatttccgtcggatcgccgaaaaaatgccccggcacaatcactga

SEQ ID NO: 10275 - protein, 594 aa, Agrobacterium tumefaciens str. C58
MSDDKIPMRRLRSQDWFDNPDHLDMTALYLERFMNYGVTPEELRSGKPVIGIAQSGSDLTPCNRVHVELVKRVRDGIRDAGGIPIEFPTHPMFENCKRPTAALDRNLAYLSLVEVLYGYPLDGVVLTTGCDKTTPSALMAASTVDIPAIVLSGGPMLDGYHDGDLVGSGTVIWRMRRKYGAGEITREEFLQAALESAPSVGHCNTMGTASTMNAIAEALGMSLTGCGAIPAAYRERGQMAYRTGRRAVELVIENIKPSDIMTREAFLNAIRVNSAIGGSTNAQPHLAAMAKHAGVELREEDWQAHGYDIPLLANVQPAGKWLGEKYHRAGGTPAIMWELLKAGKLDGSCPTVTGKTMAENLDGRESTDRDVILPYDKPLKERAGFLVLKGNLFDFAIMKTSVISAEFRQRYLSEPGREGIFEGKCVVFDGSEDYHARINEPSLDIDERTILVIRGAGPLGWPGSAEVVNMQPPDALLKKGITSLPTIGDGRQSGTADSPSILNASPESAAGGGLAWLRTGDVIRIDFNKGECNALVPQAELDARKADGIPAVPADATPWQRIYRQSVTQLSDGAVLEGAADFRRIAEKMPRHNH

SEQ ID NO: 10276 - DNA, 1725 bp, Agrobacterium tumefaciens str. C58
  CDS (1)..(1725): transl_table=11
atgaccgataaaaaactccgctccgaccgctggttcgcacctgacgacctgcgcagcttcggccaccgctcgcgcatgatgcagcttggttatgcggaggaggattttgtcggcaaacccgtcatcggtatcctcaacacctggtcagagctgaatacctgtcattcgcatttcccggaacgggtgaaggatgtgaaacgcggcgtgctgcaggccggcggcttccccgtcgaaatgccgtcgctctcggtggacgagagcttcaccaagccgacatcgatgctttaccgtaatatgttggccatggagacggaggagatgatccgctctcatccgctcgacggcgtggtgctgatgggtggttgcgacaagacgacacccggcctcgtcatgggggcgatctccgccggtgttccgatgatctatttgccggccggcccgatgttgagcggaaattatgccggcaaggtgctgggttccggttcggacgcctggaaatattgggatgagcgccgtgccggtaacgtcacggacgaagaatggcgtggcgtgcagggcggtatcgcccgctccgccggcgtgtgcatgaccatgggcacggcctcgaccatgacggccattgccgacgcacttggcatcacgctgcccggcgcctcttcaattccggcggtggattccgaacatcagcgcatgtccgcagcttgtggccgccgcattgtcgagatggtttcggaagatctgacaccggaccatatcctcacggcggcagctttccgcaacgcggccatcgtcgcgatggcgacgggttgttccaccaatgccgtcgtccacctcatcgccatggcgcgccgcgccggtgtaccgatgacgctggatgaactggacgaacttggtcgcgttacgccgctcatcgccaatgtccgcccctccggcaaggactatctgatgcaggacttcttttacgccggcggtctgagggcgctgatgaagcagctggaaagtcgtctcgactgttccgtactgaccgtgaccggccgcagcatgggcgaaaatctcgaaggtgcgaaggtctataatgacgacgtcatccgctcgctcgataatcctgtttatgcggaaggatcgcttgcggtgctgcgtggcaatctctgccctgacggcgccgtcatcaagccagcggcctgcgatccaaaactgcatgtgcatcagggcccggcgctggtgtttgacagctaccccgagatgaaagccgccattgacgatgagaatctcgatgtaacgcccgaccatgtgctggtgctgcgtaatgccggtccgctcggcggtccgggctttccggaatggggcatgttgcctatcccaaaggcgctgatcaaaaagggtcatcgcgatatgcttcgtatttccgatgcccgcatgtccggcacgtcctacggtgcctgcgtgctgcacgttgcgccggaaagcttcgtcggcggcccgctggcgctcctgagaaccggcgatatcgtgcgcctcgacctgccgcagcgtcgcctcgacatgctggtcagcgaagaggaaatcgctcgtcgccgggcggcgtggcaggcgccggcaccacggtatgaacgcggctacggttatcttttctccaagcacgtcacccaggccgatcaaggctgcgacttcgacttcctgcagacggatttcggccgcaccgccggcgagcccgatattttctaa

SEQ ID NO: 10277 - protein, 574 aa, Agrobacterium tumefaciens str. C58
MTDKKLRSDRWFAPDDLRSFGHRSRMMQLGYAEEDFVGKPVIGILNTWSELNTCHSHFPERVKDVKRGVLQAGGFPVEMPSLSVDESFTKPTSMLYRNMLAMETEEMIRSHPLDGVVLMGGCDKTTPGLVMGAISAGVPMIYLPAGPMLSGNYAGKVLGSGSDAWKYWDERRAGNVTDEEWRGVQGGIARSAGVCMTMGTASTMTAIADALGITLPGASSIPAVDSEHQRMSAACGRRIVEMVSEDLTPDHILTAAAFRNAAIVAMATGCSTNAVVHLIAMARRAGVPMTLDELDELGRVTPLIANVRPSGKDYLMQDFFYAGGLRALMKQLESRLDCSVLTVTGRSMGENLEGAKVYNDDVIRSLDNPVYAEGSLAVLRGNLCPDGAVIKPAACDPKLHVHQGPALVFDSYPEMKAAIDDENLDVTPDHVLVLRNAGPLGGPGFPEWGMLPIPKALIKKGHRDMLRISDARMSGTSYGACVLHVAPESFVGGPLALLRTGDIVRLDLPQRRLDMLVSEEEIARRRAAWQAPAPRYERGYGYLFSKHVTQADQGCDFDFLQTDFGRTAGEPDIF

SEQ ID NO: 10278 - DNA, 1812 bp, Agrobacterium tumefaciens str. C58
  CDS (1)..(1812): transl_table=11
atgacgacatctgataatcttcctgcaactcagggcaagctccgttcgcgcgcctggttcgacaacccagccaatgcggacatgaccgcgctttatctcgagcgttacatgaacttcggtctcagccaggccgagcttcagtccgaccgcccgattatcggtattgcgcagaccggttccgacctttcgccctgcaaccgtcatcatctggaactcgccaaccgtctgcgtgaaggcattcgtgaagccggcggcatcgccatcgaattcccggtgcatccgatccaggaaaccggtaagcgtccgacagcgggccttgatcgcaacctggcttacctcggcctcgtggaagtgctttatggctatccgctcgacggcgttgttctgaccatcggctgcgacaagaccacgcctgcctgtcttatggcggcggccaccgtcaacattccggccatcgccctttccgtcggtcccatgctgaacggctggttccgcggtgagcgcaccggttccggcaccatcgtctggaaggcccgcgaactgctggcgaagggcgagatcgattaccagggcttcgtcaagctcgttgcctcgtctgccccgtccaccggctattgcaacaccatgggcacggcaacaaccatgaactcgctcgccgaagcgctcggcatgcagcttcccggctccgccgccattccggcgccttaccgtgaccgtcaggaagtctcttacctcaccggcctgcgcatcgtcgacatggtcagggaagacctgaaaccatcagacatcatgaccaaggatgccttcatcaacgccatccgcgttaattcggcgatcggcggttccaccaacgcgccgatccatctaaacggccttgcccgccatgtcggcgtcgagctgacggtggatgactggcagacctatggcgaagacgtgccgctgctcgtcaacctgcagccggcaggcgaatatctcggcgaggactattaccatgccggcggcgttcccgctgtcgtcaatcagctgatgacccaagggctgatcatggaagacgccatgaccgtcaacggcaagaccatcggcgacaattgccgtggcgcgatcatcgaagacgagaaggtcatccgcccctatgagcagccgctcaaggagcgtgccggcttccgcgttctgcgcggcaatctgttctcctcggccatcatgaagacaagcgtgatttcggaagaattccgcggtcgttacctctccaaccctgatgatccggaagccttcgaaggccgcgccgtggtgttcgatggtccggaggattaccatcatcgcatcgacgatccgtcgcttggcatcgacgccaacaccgtcctgttcatgcgcggcgccggtccgatcggttacccgggcgcagcggaagtggtgaacatgcgcgcgccggattaccttctgaagcaaggcgtcagttcgctgccctgcatcggcgatggccgccagtccggcacgtcgggcagcccatccatcctcaatgcctcgccggaagcggcggccggcggcggtctgtctattctgcagacgggtgaccgcgtccgcatcgatgtgggccgcggcaaggccgatatcctgatatcaggtgaagagctcgccaagcgttacgaggcgctggcagctcagggcggttataagttccccgaccaccagacgccgtggcaggaaatccagcgcggtatcgtcagccagatggaaaccggcgcggttctggaaccggccgtaaagtatcagcgcatcgcccagaccaagggcctgccgcgcgataaccactga

SEQ ID NO: 10279 - protein, 603 aa, Agrobacterium tumefaciens str. C58
MTTSDNLPATQGKLRSRAWFDNPANADMTALYLERYMNFGLSQAELQSDRPIIGIAQTGSDLSPCNRHHLELANRLREGIREAGGIAIEFPVHPIQETGKRPTAGLDRNLAYLGLVEVLYGYPLDGVVLTIGCDKTTPACLMAAATVNIPAIALSVGPMLNGWFRGERTGSGTIVWKARELLAKGEIDYQGFVKLVASSAPSTGYCNTMGTATTMNSLAEALGMQLPGSAAIPAPYRDRQEVSYLTGLRIVDMVREDLKPSDIMTKDAFINAIRVNSAIGGSTNAPIHLNGLARHVGVELTVDDWQTYGEDVPLLVNLQPAGEYLGEDYYHAGGVPAVVNQLMTQGLIMEDAMTVNGKTIGDNCRGAIIEDEKVIRPYEQPLKERAGFRVLRGNLFSSAIMKTSVISEEFRGRYLSNPDDPEAFEGRAVVFDGPEDYHHRIDDPSLGIDANTVLFMRGAGPIGYPGAAEVVNMRAPDYLLKQGVSSLPCIGDGRQSGTSGSPSILNASPEAAAGGGLSILQTGDRVRIDVGRGKADILISGEELAKRYEALAAQGGYKFPDHQTPWQEIQRGIVSQMETGAVLEPAVKYQRIAQTKGLPRDNH

SEQ ID NO: 10280 - DNA, 1803 bp, Caulobacter crescentus CB15
  CDS (1)..(1803): transl_table=11
atgagcgtccctaacgtcccccgccgcgcgctccgttcgcgggcctggttcgacaatccggacaatatcgacatgacggcgctttatctggagcgctacctgaacttcggcctgacccttgaggagctgcagtcgggcaagccgatcatcggtatcgcccagacgggctctgatctctcgccgtgcaaccggcatcacctggtgctggccgagcgcgtgcgcgaggggatccgcagcgccggcggcatcgcgctggagtttccggttcaccccatccaggagaccggcaagcggcccacggcgggccttgatcgcaacctgtcgtatctgggccttgtcgagctgttgtacggctatccgctggatggcgtggtgctgaccatcggctgcgacaagaccacgcccgcctgcctgatggcggcggcgacggtcaacattcccgcgattgcgctgtcggtcggtccaatgctgaacggctggcacaagggcaagcgcaccgggtcggggacgatcgtctggaaggcgcgcgagatgctggccgccggcgagatcgacaacgccggtttcatcaagctcgtggccagttccgcgccctcgaccggctattgcaacactatgggcacggccacgacgatgaactcgttgacggaggctctcggcatgtcgctgcccggctccgccgcgatcccggcgccgtatcgcgaccgccaggagaacgcctaccgcaccggtcttcggatcgtcgaaatggtggccgaagacctcaagccctcggacatcctgacccgcgaggcgttcttgaacgccatcgtcgtcaactccgcgatcggcggctcgaccaacgcgccgatccacctcaacgcgctcgcccgccacatggacgtggacctgacgctcgaggactgggagacggcgggcaaggacgtgccgctgctggtcaatcttcagcccgccggcgagtatctcggcgaagactactatcgcgccggcggcgttccggccgtgttcgggcagttgatcgaacagggcctcatccaccaagacgcccgtgcggtctccggtcagagcatcggcgagcagtatcgcggcgccgtcatcgaggatgaagacgtcatccgtccgtttgcgcgcccgctcgttgaacacgccggtttcgcgatcatgcggggcaatctcttcaactccgcgatcatgaagaccagcgtgatcagcgaagagtttcgcgcgcgctacctttcgaaccccgacgatcccgacgctttcgaggggaatgcgatcgttttcgatgggcccgaggactaccatcaccggatcgatgacccggcgctcgggatcacggcgtactcgatcctgttcatgcgtggcgcgggtccgatcggctatccaggctcggccgaggtcgtgaacatgcgtgcgccgaactacttgatcaaacaggggattcatcagcttccctgtatcggcgacgggcgtcagtcgggcacgtctggatcaccatcgatcctcaacgcctcgccggaagcggcggcgggcggcggcctggcgctgcttaaaactggcgaccgcgttcgctttgatctgcgcaagtcccgggtggacgtcctggtctccgcctcagaagtcgtcgagcgtcgcagggccttggaagctgcaggcggctatgcgtatcccgaaagccagacgccttggcaggaaatccagcgcgctgtcgtcggccagatggatacgggcgccgtgcttgaaccggcggtgaagtaccagcgcatcgctcagaccaagggcctgccgcgcgacaaccactag

SEQ ID NO: 10281 - protein, 600 aa, Caulobacter crescentus CB15
MSVPNVPRRALRSRAWFDNPDNIDMTALYLERYLNFGLTLEELQSGKPIIGIAQTGSDLSPCNRHHLVLAERVREGIRSAGGIALEFPVHPIQETGKRPTAGLDRNLSYLGLVELLYGYPLDGVVLTIGCDKTTPACLMAAATVNIPAIALSVGPMLNGWHKGKRTGSGTIVWKAREMLAAGEIDNAGFIKLVASSAPSTGYCNTMGTATTMNSLTEALGMSLPGSAAIPAPYRDRQENAYRTGLRIVEMVAEDLKPSDILTREAFLNAIVVNSAIGGSTNAPIHLNALARHMDVDLTLEDWETAGKDVPLLVNLQPAGEYLGEDYYRAGGVPAVFGQLIEQGLIHQDARAVSGQSIGEQYRGAVIEDEDVIRPFARPLVEHAGFAIMRGNLFNSAIMKTSVISEEFRARYLSNPDDPDAFEGNAIVFDGPEDYHHRIDDPALGITAYSILFMRGAGPIGYPGSAEVVNMRAPNYLIKQGIHQLPCIGDGRQSGTSGSPSILNASPEAAAGGGLALLKTGDRVRFDLRKSRVDVLVSASEVVERRRALEAAGGYAYPESQTPWQEIQRAVVGQMDTGAVLEPAVKYQRIAQTKGLPRDNH

SEQ ID NO: 10282 - DNA, 1740 bp, Sinorhizobium meliloti 1021
  CDS (1)..(1740): transl_table=11
atgaagaagaaagctgagtggccgcgcaagctccgttcgcaggagtggttcggcggtactggcaagaatgccatcatgcatcgctcctggatgaagaaccaggggcttcccgccgacaccttcgacgggcggccgatcatcggcatctgtaacacctggtcggaactcacgccgtgcaatgcgcatctgcgcgacctcgctgagcgcgtgaagcgcggggtttacgaggcgggaggcttcccggtggaattcccggtcttctcgaccggtgagagcacgctacgcccgacggcgatgatgttccgcaacctggcggcgatggatgtcgaggaatcgatccgcggcaatccggtcgatggcgtcgtcctgctcggcggctgcgacaagactacgcccagcctgttgatgggtgcggcaagcgtcgacattccggcgatcgtcgtctccggcggccccatgctcaatggaaagtggcgcggcaaggacgtcgggtccggcacggcgatctggcagttttccgaaatggtgaagtccggcgagatgtcgcttgaggagttcatggacgccgagcagggcatggcccgttccgcgggaagctgcatgaccatgggcacggcctcgaccatggcgtcgatggccgaagcgctaggcatgacgctttcgggcaatgcggccattcccgcggtcgatgcgcgccgccgggtgatttcgcagcttaccggccgtcgcattgtcgagatggtcaaggaggacttgaagccctccgatatcctgaccaaggaggccttcgaaaacgccatccgcgttaacggcgccgtcggcggctcgaccaatgcggtcctgcatctgctcgcgcttgcgggccgtgtcggcgtcgatctttcgctggacgattgggacagactcggccgcgatgtgccgaccatcgtcaacctccagccttccggcaaatatctgatggaggagttctattatgccggcggtctgccggtcgtgattaaggcggtcgcggagatgggcctcctgcacaatgacgccatcaccgtcagcggcgacacgatctggaacgacgttaagggcgtcgtgaactacaacgaggacgtaatcctgccgcgggaaaaggcgctgacgaaatcgggcggcatcgccgtcctgcgcggcaatctggcgccgcgcggtgctgttctgaaaccttcggccgcttcgccgcaccttatgcagcacaagggccgtgcggtcgtattcgaaagcattgaggactatcacgcacgcatcaaccgtgaggatctcgacatagacgagacctgcatcatggtactgaaatattgcggccccaaaggctatccgggcatggccgaggtcggcaatatgggcctgccgccgaaggtcctgaagaagggcatcaccgacatgatccgtatttcggatgctcgcatgtcgggtacggcctacggcaccgtcatccttcataccgcgccggaagccgcggaaggcggacccctggcgctcgtcgagaatggcgacctgatcgaggtcgacatcccgaatcgcacgctgcatctccatgtctccgacgaggaacttgcacgacgccgtgcggcctgggtatcgccggtaaaaccgctcacgggcggttatggcggcctctatatcaagaccgtgatgcaggctgacgccggcgccgatctggacttcctagtcggcgcgcgcggatcggtggtcgagcgcgacagccactga

SEQ ID NO: 10283 - protein, 579 aa, Sinorhizobium meliloti 1021
MKKKAEWPRKLRSQEWFGGTGKNAIMHRSWMKNQGLPADTFDGRPIIGICNTWSELTPCNAHLRDLAERVKRGVYEAGGFPVEFPVFSTGESTLRPTAMMFRNLAAMDVEESIRGNPVDGVVLLGGCDKTTPSLLMGAASVDIPAIVVSGGPMLNGKWRGKDVGSGTAIWQFSEMVKSGEMSLEEFMDAEQGMARSAGSCMTMGTASTMASMAEALGMTLSGNAAIPAVDARRRVISQLTGRRIVEMVKEDLKPSDILTKEAFENAIRVNGAVGGSTNAVLHLLALAGRVGVDLSLDDWDRLGRDVPTIVNLQPSGKYLMEEFYYAGGLPVVIKAVAEMGLLHNDAITVSGDTIWNDVKGVVNYNEDVILPREKALTKSGGIAVLRGNLAPRGAVLKPSAASPHLMQHKGRAVVFESIEDYHARINREDLDIDETCIMVLKYCGPKGYPGMAEVGNMGLPPKVLKKGITDMIRISDARMSGTAYGTVILHTAPEAAEGGPLALVENGDLIEVDIPNRTLHLHVSDEELARRRAAWVSPVKPLTGGYGGLYIKTVMQADAGADLDFLVGARGSVVERDSH

SEQ ID NO: 10284 - DNA, 1812 bp, Salmonella typhimurium LT2
  CDS (1)..(1812): transl_table=11
atgaatcctaatttgttacgcgtaacacagcgtattgtcgaacgctcgcagcagacccgagaagcctatcttgcccgcattgagcaggcgaaaaccgccacggtccaccgatctcaactggcctgcggcaacctggcgcatggcttcgctgcctgtcagccagaggacaaagcctcgctgaaaagtatgttgcgcaataatatcgccattattacctcctacaatgacatgctctctgcgcatcaaccgtatgaacattatccgcagattattcgtcaggccctgcattccgtgaatgcggtaggtcaggtcgcaggcggcgtaccggcaatgtgcgatggcgttacgcaagggcaggatggcatggagttgtcattactcagccgcgaagtgatagcgatgtcggcagcagtaggcctctctcacaatatgtttgacggcgcgttattcctcggcgtatgcgacaaaatcgttccggggctggcgatggccgcgctctcttttggtcatttacccgcgatttttgttccgtcaggcccgatggcgagcggcctgccgaataaagaaaaagtccgtattcgtcagctatatgcggaaggaaaagtagacagaatggcgctgctggagtcggaagccgcctcttaccatgcgccgggcacctgtacattttacggcaccgccaacaccaaccagatggtggtggagtttatgggaatgcagttgccgggttcttcgtttgtgcatccggatgcgccgctgcgcgaggcattgactgccgctgccgcacgtcaggtaacacgtcttaccggcaacggcaatacgtggatgccgctcggtaaaatgatcgacgaaaaagtcgtggtgaacggcattgtcgcgctgctggctaccggcggctccaccaaccacaccatgcatctggttgcaatggcgcgcgcggcgggcattctgatcaactgggatgacttctcggatttgtcggaagtggttccgttgatggcgcgtctgtatccgaacggtccggcggacattaaccacttccaggcggcgggcggcgtaccggtattgatgcgtgagctgctcaatgccggattgctgcacgaagacgttaatactgtcgcaggcttcggcctgaaacgctatacgctggagccctggctcaacaacggcgagctggactggcgtgaaggcgcggaaaggtcactggataacgatgtcattgcctcttttgataagccgttctctcctcacggcggtactaaggtgctaagcggtaatctggggcgcgcagtaatgaagacgtctgcggtaccggttgaaaaccagatcattgaagcgcctgccatggtatttgaaagtcagcatgatgtgctgcctgcgtttgacgcgggcctgcttgaccgggattgtgtcgttgtcgtgcgtcatcagggaccaaaagcgaatggaatgccagaattacataaactcatgccgccacttggtgtattattggaccgccgtttcaaaatcgcgttagttactgatggacgactttcaggcgcttcgggtaaagtgccttcagctatccacgtaacgccggaagcctacgatggcggcttactggcaaaagtgcgcgatggcgacatcattcgcgtgaatgggcagacaggtgagttaactctgctggtcgacgaggcggaacttgccgctcgtcagcctcatattccggacctgagcgcgtcgcgcgtcggaacggggcgtgagttgtttggcgcgctgcgcgaaaagctgtcgggtgcggagcagggcgcaacctgtatcactttttaa

SEQ ID NO: 10285 - protein, 603 aa, Salmonella typhimurium LT2
MNPNLLRVTQRIVERSQQTREAYLARIEQAKTATVHRSQLACGNLAHGFAACQPEDKASLKSMLRNNIAIITSYNDMLSAHQPYEHYPQIIRQALHSVNAVGQVAGGVPAMCDGVTQGQDGMELSLLSREVIAMSAAVGLSHNMFDGALFLGVCDKIVPGLAMAALSFGHLPAIFVPSGPMASGLPNKEKVRIRQLYAEGKVDRMALLESEAASYHAPGTCTFYGTANTNQMVVEFMGMQLPGSSFVHPDAPLREALTAAAARQVTRLTGNGNTWMPLGKMIDEKVVVNGIVALLATGGSTNHTMHLVAMARAAGILINWDDFSDLSEVVPLMARLYPNGPADINHFQAAGGVPVLMRELLNAGLLHEDVNTVAGFGLKRYTLEPWLNNGELDWREGAERSLDNDVIASFDKPFSPHGGTKVLSGNLGRAVMKTSAVPVENQIIEAPAMVFESQHDVLPAFDAGLLDRDCVVVVRHQGPKANGMPELHKLMPPLGVLLDRRFKIALVTDGRLSGASGKVPSAIHVTPEAYDGGLLAKVRDGDIIRVNGQTGELTLLVDEAELAARQPHIPDLSASRVGTGRELFGALREKLSGAEQGATCITF

SEQ ID NO: 10286 - DNA, 1716 bp, Salmonella typhimurium LT2
  CDS (1)..(1716): transl_table=11
atgagccaaaaatgtcaacatgctcgcgacctgtggtcgcagctcgacgccctgcgtcttggaatgaattacagcaaagaagatgtcaataaactgcaggtcctggtggatgattgctatggtgaaagtcatccgggcagtttccatcttaaccaactgggcgatgaagccgtgctgggtgttcatgaaagcggcggtcgcgcggtccgtcaccatgtgacggatatctgcgacggctggggtcagggccacgatgggatgaactacatcctggcatctcgcgaagccattgccaacatggtcgaaattcatgcctcagtggtgccttatgatgccggtattctgatctcaagctgcgataaatctatcccggcgcatctgattgccgccgcacgcctgaacctgccgctactgcatattcccggcggttctatgcgtccggcaccgaatatgagtacttctgacctcggtgggatcactgctaagttgaggaaaggcgaaatcggcattcagcaagtggaagccatgcagcaatgcggttgccccaccgccggagcctgccagtttatgggaacggccagtaccatgcagtgcatgtcggaggccttggggctggccctgccaggcagcgctttgctgccatcgaccctggcggaaattcgccgcgttgccagaactgcaggccaccaggcgctgtatctggcggagaaaaatatcaccacccataagatcctgactcctgcggcgtttgaaaatgctatcaaagtccatgctgctattggtggcagcaccaatgcgatgatccaccttccggccatcgctcatgaacttggatgggagctgaagcccgaactgtttgatcggatcaataacgaaatcccttatctgaccaatattcagcccagcggtgaatacgttaccgaaatgatgtggttcgctggcggcgtgccaatggtgcaatggtatctgcgcgattatctggatcttgatgtgcttaccgtgactggccgtacgctcggcgacaacctggaaatgctccatcaatccggcttctttacccgcaaccacggttacctcaacaattacaaagtcagtccggaggaggtgatccgtaaaccagaaaatgccaccaaaaaagggtcgattgcggtactgaaaggcaacatcgcgcctgaaggagcggtcattaaatacgcggcctgtgcgccggatatgcaccaccataccggtcctgctcgggtctttaactccgaagaagacgctcagcaggccatcatccataaccatatcgaacccggcgacgtcattttcattcgctacgaaggcgcaaaaggctctggcgcaccggaaatgctgatgactaccgatgccatagtgtatgacaaacgcctcgacggaaaagtcgcattgattaccgacggtcgtttctctggagcgaccagcgggccatgtgtcggacacgtctcgccagaagccgctgatggggggccgattgccctggtggaagatggtgatttaatcgaaatggatgtgaaaggccgcaagctcaatattgtagggatcgacgggatgcctaaaacagaagaggaaatacgccgctgtcttgaagagcgtcgagcaagctggaagaaacctgattattcaaaccgtcgcggcgtctttaaacagttcaccgctaatgcaacatcattaatggccggagcctggcttaaataa

SEQ ID NO: 10287 - protein, 571 aa, Salmonella typhimurium LT2
MSQKCQHARDLWSQLDALRLGMNYSKEDVNKLQVLVDDCYGESHPGSFHLNQLGDEAVLGVHESGGRAVRHHVTDICDGWGQGHDGMNYILASREAIANMVEIHASVVPYDAGILISSCDKSIPAHLIAAARLNLPLLHIPGGSMRPAPNMSTSDLGGITAKLRKGEIGIQQVEAMQQCGCPTAGACQFMGTASTMQCMSEALGLALPGSALLPSTLAEIRRVARTAGHQALYLAEKNITTHKILTPAAFENAIKVHAAIGGSTNAMIHLPAIAHELGWELKPELFDRINNEIPYLTNIQPSGEYVTEMMWFAGGVPMVQWYLRDYLDLDVLTVTGRTLGDNLEMLHQSGFFTRNHGYLNNYKVSPEEVIRKPENATKKGSIAVLKGNIAPEGAVIKYAACAPDMHHHTGPARVFNSEEDAQQAIIHNHIEPGDVIFIRYEGAKGSGAPEMLMTTDAIVYDKRLDGKVALITDGRFSGATSGPCVGHVSPEAADGGPIALVEDGDLIEMDVKGRKLNIVGIDGMPKTEEEIRRCLEERRASWKKPDYSNRRGVFKQFTANATSLMAGAWLK

SEQ ID NO: 10288 - DNA, 1842 bp, Brucella melitensis 16M
  CDS (1)..(1842): transl_table=11
ttgaaaatgcctccttatcgttcgcgtacaaccacccatggccgcaatatggccggcgcgcgcggcctatggcgcgccaccggcatgaaggatgaggatttcggcaagccgattatcgccgtggtgaactcgttcacccagttcgtgcccggccatgtgcatctgaaggatctcggccagctcgtcgcgcgcgaaatcgaaagtgcgggcggcgtcgccaaggaattcaataccattgcggtcgatgacggcatcgccatgggccatgacggcatgctctattcgctcccctcccgtgagctcatcgccgactcggtcgaatatatggtcaatgcgcattgcgccgatgcgatggtctgcatctccaattgcgacaagatcacgcccggcatgctgatggcggcgctgcgtctcaatattccggtcgtgttcgtctccggtgggccgatggaagcaggcaaggtcgtgtgggaggattctgtcaagaagctcgacctcgtggacgccatggtggcggcggccgacgaccattataccgacgagcaggtgaaggcgattgagcgttccgcctgcccgacctgtgggtcgtgttcgggcatgttcacggccaattcgatgaattgccttaccgaagcgctcggcctgtcgctgcccggcaatggttcgacgctcgccacccatgcagaccgcaagcgcctcttcgtcgaagctggccacctgatcgtcgatctcgcccgccgctattacgagcaggatgacgaaagtgtgctgccgcgctccatcgccactttctcggctttcgagaacgcgatgacgctcgatatcgccatgggcggttcgaccaatacggttctgcatctgctcgcggctgcgcaggaagcggaaatcgatttcaccatggcggatatagaccgtctgtcgcgccgcgtgccggtgctgtgcaaggtggcgcccgccgtgtcgtcggttcacatggaagacgtgcatcatgccggcggcatcatgggcattctcggacagctcgacaatgcgggcctgctgaccaccagcatcccgaccgtgcacagcgaaacgctcgctaaggcgcttgatcattgggatgtaacgcgcacaaacagcgaaatggtgcacaaattctattccgccgctcccggcggcgtgccgacgcaggtggctttcagccaggagcggcgcttcgacaaggtggacaccgaccgcgaaaaaggcgtcatccactcaaaggaacacgctttcagccaggatggcggcttggccgtgctttacggcaatctggcggaagacggctgcatcgtgaagacggcaggcgtggacgattccatcctgaaattctccggcccggcccgcatttttgaaagccaggattcggctgtgcttggcattttgaacggcaagatcaagccgggcgacatcgtgctgatccgctatgaaggcccgcgcggcggccccggaatgcaggaaatgctctacccgaccagctatctgaagtcgaagggcctcggcaaagcctgcgcacttatcaccgacggacgtttctcgggcggttcatcgggcctttccatcggccatgtttcgccggaagcagccgaaggcggcacgatcggtctggtgcgcgaaggcgatatcatcgatatcgacattccgaaccgcaagatccaccttgccgttgacgacgccacacttgccgaacgccgcgccgagcaggatgcagcaggctggaaaccggcagaggaacgcaagcgtaaaatctccactgcgctgaaagcctatgcggcaatggcgacaagtgccgccaggggcgcggtgcgaaagctgccggattga

SEQ ID NO: 10289 - protein, 613 aa, Brucella melitensis 16M
MKMPPYRSRTTTHGRNMAGARGLWRATGMKDEDFGKPIIAVVNSFTQFVPGHVHLKDLGQLVAREIESAGGVAKEFNTIAVDDGIAMGHDGMLYSLPSRELIADSVEYMVNAHCADAMVCISNCDKITPGMLMAALRLNIPVVFVSGGPMEAGKVVWEDSVKKLDLVDAMVAAADDHYTDEQVKAIERSACPTCGSCSGMFTANSMNCLTEALGLSLPGNGSTLATHADRKRLFVEAGHLIVDLARRYYEQDDESVLPRSIATFSAFENAMTLDIAMGGSTNTVLHLLAAAQEAEIDFTMADIDRLSRRVPVLCKVAPAVSSVHMEDVHHAGGIMGILGQLDNAGLLTTSIPTVHSETLAKALDHWDVTRTNSEMVHKFYSAAPGGVPTQVAFSQERRFDKVDTDREKGVIHSKEHAFSQDGGLAVLYGNLAEDGCIVKTAGVDDSILKFSGPARIFESQDSAVLGILNGKIKPGDIVLIRYEGPRGGPGMQEMLYPTSYLKSKGLGKACALITDGRFSGGSSGLSIGHVSPEAAEGGTIGLVREGDIIDIDIPNRKIHLAVDDATLAERRAEQDAAGWKPAEERKRKISTALKAYAAMATSAARGAVRKLPD

SEQ ID NO: 10290 - DNA, 1791 bp, Streptomyces coelicolor A3(2)
  CDS (1)..(1791): transl_table=11
atgaccgacgaaccgaggacgagtcgccgcagccaggcgtggttcggcgcacagggccgcagcggcatggtgtaccgctcctggatgcgcagccagggcttcggccacgaggtgttcgacggacgccccgtcatcggcatcgcgaccagtgcctccgaactcgccccgtgcaacgcccacctcacccgcgtcgccgaggccgtcaagcgcggggtgtggcaggccggcggcttcccgctgcagttccccaccatggccaccggcgagacgctgatgcgccccaccgccatgctgtaccgcaacctcatggccatggaggtcgaggagctgatccgggccaatccgctcgacggtgtggtgttgctgtcgggctgcgacaagacgacccccgccatgctcatgggcgccgccagcgtcgacctgcccgccgtcatggtcaccggcgggccgatgctcaacggcaagtaccgggggcaggacgtgggatccggcacccatgtgtggaagttcgaggaggacctgaagaccggccggatgaccgaggaggagtgcttcttcgcggaaggctgcatggcccgctccaacgggcactgcatgacgatggggaccgcctcgacgatggcctgcctggccgaggcgctcggcatgcagctgccgggctcggcggcctggcccgcggtcgactcccggcggatggagaccgcgcaggccgcggggcagcgcatcgtggggatggtggaggaggagctgcgcccctctcggatcctgacccgtgaggcgttcgagaacgccgtccgggtcaacgcggccatcggcggctccacgaacgccgtcatccatctcctggccatcgccgggcgcgtcggcgtcgacttgagcctgcgggacttcgacgaactggcccgtgcggtgccgaccctggtcaacctgatgcccagcggcaagtacctcatggaggacttctgctacgcgggcggcctgcccgcggtactggccgaactgctcggcggcgggctgctgcacggcagccagatcacggtcaccggacgcaccatcgccgagaacaacacggggagcaccgacaacaccgggaacaccgggaacaccgaacgggtcggctccgaccccgaccccgaccccgacttcgacgtcatcacccgcctcgacgcccccttccagccggccggcaccgggatcgccgtcctccgcggcaacctgtgccccgacggcgccgtgatcaagcagtccgccgcgtcaccgcacctgctcacccaccgcggccccgcacgcgtcttcgactctcccgaggcgtatcacgaggtggccgacgacccggatctcgacatcgacgagaacaccgtcatcgtcatccgcaacgccggccccaagggctaccccggcatgcccgaggtcgccaacgtccccctgcccgccaagctgctgaaggccggcgtcaaggacatggtgcgcgtctgcgacgggcggatgagcggcaccggctacgggacggtggtcctgcacgtggcacccgaggccgccgtcggcggacccctcgccctggtccacgacggggacccggtcgtcctcgacgtcccccaccgcaccctgcgcctggacgtcgacgacgccgagctcacgcgacgcaggcgggcgtggcgggcacccgccgaacggcacgccggcggttacgcctggctctacacccagaacgtcgaacaggccgaccggggcgccgacttcggattcctgcggggaaaccgcggacacgaggttccccgagactcccactga

SEQ ID NO: 10291 - protein, 596 aa, Streptomyces coelicolor A3(2)
MTDEPRTSRRSQAWFGAQGRSGMVYRSWMRSQGFGHEVFDGRPVIGIATSASELAPCNAHLTRVAEAVKRGVWQAGGFPLQFPTMATGETLMRPTAMLYRNLMAMEVEELIRANPLDGVVLLSGCDKTTPAMLMGAASVDLPAVMVTGGPMLNGKYRGQDVGSGTHVWKFEEDLKTGRMTEEECFFAEGCMARSNGHCMTMGTASTMACLAEALGMQLPGSAAWPAVDSRRMETAQAAGQRIVGMVEEELRPSRILTREAFENAVRVNAAIGGSTNAVIHLLAIAGRVGVDLSLRDFDELARAVPTLVNLMPSGKYLMEDFCYAGGLPAVLAELLGGGLLHGSQITVTGRTIAENNTGSTDNTGNTGNTERVGSDPDPDPDFDVITRLDAPFQPAGTGIAVLRGNLCPDGAVIKQSAASPHLLTHRGPARVFDSPEAYHEVADDPDLDIDENTVIVIRNAGPKGYPGMPEVANVPLPAKLLKAGVKDMVRVCDGRMSGTGYGTVVLHVAPEAAVGGPLALVHDGDPVVLDVPHRTLRLDVDDAELTRRRRAWRAPAERHAGGYAWLYTQNVEQADRGADFGFLRGNRGHEVPRDSH

SEQ ID NO: 10292 - DNA, 1731 bp, Streptomyces coelicolor A3(2)
  CDS (1)..(1731): transl_table=11
atgacccccaggaagtccccggaagagctgcgcagccaccagtggtacggcacggacggcctgcgctccttcagccaccgcgcccgcacccgccagctcggctacctgcccgaggaacacctcggcaagcccgtcatcgccatcctcaacacctggtccgacatcaacccctgccacgtccacctgcgcgaccgcgcccaggcggtcaagcggggcgtgtggcaggcgggcggtttcccgctggagttcccggtctcgacgctcagcgagaccttccagaagccgaccccgatgctctaccgcaacctcctcgccatggagaccgaggagctgctgcgctcctacccggtcgacggcgccgtgctgatgggcggctgcgacaagtccacgcccgccctgctcatgggcgccgccacggtggacctgcccgcggtgttcgtccccgccgggcccatgctccccgggcactggcgcggcgagaccctcggctccggcaccgacatgtggaagtactgggacgacaagcgggccggcctcatcggcgactgcgagatgcaggaactggagagcggcctggcccgctcgcccggccactgcatgacgatgggcaccgcctccaccctgaccgccgccgccgaggcactcggcgtcacggtccccggggcctccagcatcccggccgtcgactccgggcacgaccggatggccgccgcggccggactgcgcgtcgtcgaactggtccaccgggaccggagactgagcgacatcctcaccgccgacgccttcgaggacgccgtcaccaccgtgctcgggctcggcggctccaccaacgccgtgatccacctgatcgccatggcgggccgcgcgggcgtcaccctcacgctcgacgacttcgaccgcatcgcccgcaccgtcccggtgctggccaacgtccgccccggcggacagacccacctgatggaggacttccacttcgccggcggcctgcccggcttcctctcccgcatcaccgacctgctccacctggaccggcccacggtcgcgcacgacaccctgcgcgagcagctggacggcgccctcgtccaccacgacgacgtcatcaggccccgcgacaacccggtcgcgaacgagggcggggtcgccgtactgcgcggcaacctctgcccggacggcgccgtcatcaagcacatcgccgccgagccgcacctgctcaagcacaccggacccgccgtcgtcttcgacgactacaagaccatgcagcgcaccatcaacgacccggagctgggtatcaccgccgacagcgtgctggtgctccgcaacgccggtcccaagggagggccgggcatgcccgagtacggcatgctgcccatccccgaccacctgctcaagcagggcgtacgggacatggtccggatctccgacgcccggatgagcggcaccagctacggcgcgtgcgtgctgcacgtggcccccgagtcgtacgtcggcggaccgctcgccctggtgcgcaccggcgactccatcaccctcgacgtcggggcccgcaccctgcacctgggcgtggacgacgaggagctggagcgccgccgggccgcctggacaccgccgcccgcccgctacgagcgcggttacggcgcgctctacaacgaacagatcacccaggccgacaccggctgcgacttcgagttcctggcccgcccgggcaaggtgcaggacccgtacgccggctga

SEQ ID NO: 10293 - protein, 576 aa, Streptomyces coelicolor A3(2)
MTPRKSPEELRSHQWYGTDGLRSFSHRARTRQLGYLPEEHLGKPVIAILNTWSDINPCHVHLRDRAQAVKRGVWQAGGFPLEFPVSTLSETFQKPTPMLYRNLLAMETEELLRSYPVDGAVLMGGCDKSTPALLMGAATVDLPAVFVPAGPMLPGHWRGETLGSGTDMWKYWDDKRAGLIGDCEMQELESGLARSPGHCMTMGTASTLTAAAEALGVTVPGASSIPAVDSGHDRMAAAAGLRVVELVHRDRRLSDILTADAFEDAVTTVLGLGGSTNAVIHLIAMAGRAGVTLTLDDFDRIARTVPVLANVRPGGQTHLMEDFHFAGGLPGFLSRITDLLHLDRPTVAHDTLREQLDGALVHHDDVIRPRDNPVANEGGVAVLRGNLCPDGAVIKHIAAEPHLLKHTGPAVVFDDYKTMQRTINDPELGITADSVLVLRNAGPKGGPGMPEYGMLPIPDHLLKQGVRDMVRISDARMSGTSYGACVLHVAPESYVGGPLALVRTGDSITLDVGARTLHLGVDDEELERRRAAWTPPPARYERGYGALYNEQITQADTGCDFEFLARPGKVQDPYAG

SEQ ID NO: 10294 - DNA, 1899 bp, Yersinia pestis KIM
  CDS (1)..(1899): transl_table=11
ttgcgacagacattgatttgcaaaataaaaacgcggagtgaagagacaatgcctaagtaccgttcccataccaccacccatggccgcaatatggccggcgcccgcgcactgtggcgcgcaaccggtatgaccgatgatgacttcggcaaaccgattattgcagtcgttaactcctttacccaatttgtaccgggccacgtacatttgcgcgatttaggcaagctggttgcggagcaaattgtagcttctggcggtgtggctaaagagttcaacaccattgcggtggatgatggtatcgcgatgggccacggtggcatgctctactctctgccatcgcgtgaattgatcgccgactccgttgagtacatggttaacgcccactgtgcggatgccatggtgtgtatctctaactgtgacaaaattaccccagggatgctgatggcgtctctgcgcctgaatattccggtgatctttgtgtctggtggcccgatggaagccggtaagaccaagctgtcagataaaatcatcaagctggatttgatcgatgccatgattcagggtgcgaatcctaatgtgagcgatgaagagagcgcccagattgagcgttctgcttgcccgacctgtggttcttgctccggtatgtttacggctaactcgatgaactgcctgaatgaagcgctgggtctggcgttgccgggtaacggttcattgttggcaacccacgctgaccgtaagcaactgttcttggatgcgggtaaacacattgttgccttgaccaaacgttattatgaacaagatgacgtcagcgccttgccacgcaacatcgcgaataaagcggcctttgaaaacgccatgatattggatatcgccatgggcggttccacgaataccgtattgcatttgctggcggcggcgcaggaaggtgaaattgatttcagcatgaccgatatcgatcacctgtcccgtaaagtcccacatttgtgcaaagtggccccgagtactcagaaataccacatggaagatgtgcaccgtgcggggggggtcattggtattttaggtgagttggatcgcgctggtttgcttaaccgcgatgtcagtaacgtgttggggctgaatctgacacaaacgctggaagcctatgacgtgatgctgactcaggatgaaggcgtgaagcagatgtacgccgcaggcccagccggtattcgcaccactaaagcgttctcacaggattgccgttatccgtcactggataccgatcgcgaagagggttgtatccgtacccgtgaacatgcctacagccaggatggtggtttagcggtgttgtacggcaatattgcggcagacggctgtattgttaaaactgcgggtgttgataaagacagcctgacgttccgtggcccggcgaaagtatttgagagccaggatgaggcggtagaggcgatcctcggtggtaaagttgtggcgggtgatgtggttgttatccgttatgaagggccaaaaggggggccgggtatgcaggaaatgctctatccgaccacttatctgaaatccatggggttgggcaagagttgtgccttactgaccgatggccgtttctctggcgggacatccggtttgtctatcggccatgtgtctccagaagccgccagtggtgggttgattggtttggtacaagatggcgatttcatcaatatcgatattccgaaccgtggcattgtcttggatgttagcgaagctgaactggctgctcgccgtgaaactgaagaagcgcatggtgatgcggcctggtcaccgaagggccgtgagcgccaggtctcttatgccttacgcgcttacgcgatgttagcaaccagcgctgataaaggcgcggtgcgcgataaaagtaagctgggaggctaa

SEQ ID NO: 10295 - protein, 632 aa, Yersinia pestis KIM
MRQTLICKIKTRSEETMPKYRSHTTTHGRNMAGARALWRATGMTDDDFGKPIIAVVNSFTQFVPGHVHLRDLGKLVAEQIVASGGVAKEFNTIAVDDGIAMGHGGMLYSLPSRELIADSVEYMVNAHCADAMVCISNCDKITPGMLMASLRLNIPVIFVSGGPMEAGKTKLSDKIIKLDLIDAMIQGANPNVSDEESAQIERSACPTCGSCSGMFTANSMNCLNEALGLALPGNGSLLATHADRKQLFLDAGKHIVALTKRYYEQDDVSALPRNIANKAAFENAMILDIAMGGSTNTVLHLLAAAQEGEIDFSMTDIDHLSRKVPHLCKVAPSTQKYHMEDVHRAGGVIGILGELDRAGLLNRDVSNVLGLNLTQTLEAYDVMLTQDEGVKQMYAAGPAGIRTTKAFSQDCRYPSLDTDREEGCIRTREHAYSQDGGLAVLYGNIAADGCIVKTAGVDKDSLTFRGPAKVFESQDEAVEAILGGKVVAGDVVVIRYEGPKGGPGMQEMLYPTTYLKSMGLGKSCALLTDGRFSGGTSGLSIGHVSPEAASGGLIGLVQDGDFINIDIPNRGIVLDVSEAELAARRETEEAHGDAAWSPKGRERQVSYALRAYAMLATSADKGAVRDKSKLGG

SEQ ID NO: 10296 - DNA, 1806 bp, Brucella suis 1330
  CDS (1)..(1806): transl_table=11
atgaacaagccggttacgccaaaaacacccaaattgcggtcacgcgcatggttcgacaatcccgacaatgtcgatatgacggcgctctatcttgagcgttacatgaattacgggctgagccaggaagagctgcaatccggccgtcccatcatcggtattgcgcaaaccggttctgatctttcgccctgcaaccggcatcatctggaactggccaagcgtgtgagggatggagttcgcgaggcgggtggcatcgtcatcgaatttccggttcatcccattcaggaaaccggcaagcgccccactgcgggtctcgaccgcaatctggcctatcttggtctggtcgaagtgctttacggctatccgctcgatggtgtggtgctgaccatcggctgcgacaagaccacgcccgcctgcctgatggcagcggcgaccgtcaatattccggccatcgcgctgtcggtcgggccgatgctgaacggctggttccggggtgagcgcacgggttcgggcaccatcgtctggaaggcgcgcgaactgcttgccaagggcgaaatcgactatcagggctttgtgaaactggtggcttcttcggctccatcgaccggctattgcaacacgatgggcacggccacgaccatgaattctctggccgaagcgctgggtatgcagcttccgggctcggcggctatccccgcaccttatcgtgaccgtcaggaagtcgcctatctgacggggcggcgtattgtcgagatggttcatgaagacctgaaaccatcggatatcctgacgaaggaagcctttatcaatgcgatccgcgtcaattccgccattggcggctccaccaatgcgccgatccatctcaatgcgctcgcgcgccatatcggtgtggaactgacggtggatgactggcagaaatatggcgaggaaattccgcttctggtcaatctccagcctgcgggcgaatatctgggcgaagactattatcacgcaggcggtgtgccagcggtggtcaaccagttgatggggcagggcctcatccatgaggacgcaatcacggtcaatggcaagaccatcggcgaaaattgcaagaatgcgaccatcgaagacagcaatgtcatcaagacctacgatcagccgctcaagaaacatgccggtttccgcgtgctgcgcggcaatctgttctcgtcggccatcatgaagctcagcgtgatttcggacgaattccgcaatcgctacctgtccgatgccaaggatcccaatgcctttgaaggcaaggcggtcgtgttcgatgggccggaggattatcatcaccgtattgatgatccggcgctggaaatagatgaacatacggtgcttttcatgcgcggtgcgggaccgatcggctatccgggtgcggcggaagtcgtcaacatgcgcgcgccggattaccttttgaagaagggcatcacgtcgctgccctgtatcggcgacggccgccagtcgggtacgtcgggttcgccgtcgatcctcaatgcctcgccggaagcggcggcaggcggggggcttgccattctcaagaccggcgaccgcgtgcgcatcgatcttggccgcgggacggcggataacctgatttccgatgaggaattggccgaacgccgcaaggcgctggaagcggttggcggttataaatatcctgaaagccagacgccatggcaggaaatccagcgtgctgtcatcggccagatggaaaccggggccgtgctggaaaacgcggtcaaatatcaggatatcgcgcatacgcgcgggcttccgcgagataaccattga

SEQ ID NO: 10297 - protein, 601 aa, Brucella suis 1330
MNKPVTPKTPKLRSRAWFDNPDNVDMTALYLERYMNYGLSQEELQSGRPIIGIAQTGSDLSPCNRHHLELAKRVRDGVREAGGIVIEFPVHPIQETGKRPTAGLDRNLAYLGLVEVLYGYPLDGVVLTIGCDKTTPACLMAAATVNIPAIALSVGPMLNGWFRGERTGSGTIVWKARELLAKGEIDYQGFVKLVASSAPSTGYCNTMGTATTMNSLAEALGMQLPGSAAIPAPYRDRQEVAYLTGRRIVEMVHEDLKPSDILTKEAFINAIRVNSAIGGSTNAPIHLNALARHIGVELTVDDWQKYGEEIPLLVNLQPAGEYLGEDYYHAGGVPAVVNQLMGQGLIHEDAITVNGKTIGENCKNATIEDSNVIKTYDQPLKKHAGFRVLRGNLFSSAIMKLSVISDEFRNRYLSDAKDPNAFEGKAVVFDGPEDYHHRIDDPALEIDEHTVLFMRGAGPIGYPGAAEVVNMRAPDYLLKKGITSLPCIGDGRQSGTSGSPSILNASPEAAAGGGLAILKTGDRVRIDLGRGTADNLISDEELAERRKALEAVGGYKYPESQTPWQEIQRAVIGQMETGAVLENAVKYQDIAHTRGLPRDNH

SEQ ID NO: 10298 - DNA, 1740 bp, Streptomyces avermitilis MA-4680
  CDS (1)..(1740): transl_table=11
gtggtccctgtgaagcgcccggaggagttcagaagccaccagtggtacgggagcggcgtctcgtcgggtctgcgctccttcagccaccgggcgcgcacccgccaactcggctacctgcccgaggagcacctgggcaagccggtcatcgcgatcctcaacacctggagcgacatcaacccgtgccatgtgcatctgcgggaccgtgcgcaggcggtcaagcggggtgtgtggcaggcgggcggcttcccgctggagttcccggtgtcgacgctgagcgagaccttccagaagccgaccccgatgctctaccgcaacctgctcgcgatggagaccgaggagctgctgcgctcgtacccggtcgacggcgccgtgctcatgggcggctgcgacaagtccacgccggccctgctgatgggcgccgcctccgtcgacctgccggccgtgttcgtgcccgccgggccgatgctgccgggccactggcgcaacgaggtcctcggctccggcaccgacatgtggaagtactgggacgacaagcgggccggcctcatcggcgactgcgagatgtccgaactggagagcggcctcgcccgttcgcccggccactgcatgaccatgggtacggcgtccacgctgacggccgcggccgaggccctcggggtgacggtgccgggcgcctccagcatccccgccgtcgactccgggcacgaccggatggccgcggccgcggggctcaggatcgtcgaactggtccgcggcgaccggaaactgtccgacatcctcaccgaggaggccttcgcggacgccgtgacgaccgtcctcggcctcggcggctcgaccaacgccgtcatccatctgatcgcgatggccggacgggccggggtctccctcacgctcgacgacttcgaccgcatcgcccggaccgtgccggtgctcgccaacgtccggccgggcggcggcccgtacctcatggaggacttccacttcgcgggcggactgcccggattcctctcccggatcaccgatctgctgcatctggaccggccgaccgtctcgtacgacaccctgcgcgagcagctcgcctccgcccaggtgcacgacgacgacgtcatccgcacccgcgcgaacccggtcgcggacgaaggcggagtcgccgtcctgcgcggcaacctctgtcccgacggcgccgtcatcaagcacatcgccgccgagccgcggctgctcaagcacaccgggcccgcggtcgtcttcgacgactaccggacgatgcagcggaccatcaacgaccccgggttgggcatcaccgccgacagcgtgctggtgctgcgaggcgccggccccaagggcggccccggcatgcccgagtacggcatgctgccgatcccggaccacctgctgaagcagggcgtacgggacatggtgcggatctccgacgcccggatgagcggcacgagttacggcacctgtgtgctgcacgtggcgcccgagtcgtacgtcggcgggccgctcgccctggtgcggaccggggacacgatcaccctcgacgtcgaggcgcggagtctgcggctccacgtggacgacgcggagctggagcggcgcggggcccggtggacgccgccgcccgagcggtacgagcgcggctacggcgcgctctacaacgaacagatcacccaggcggacaccggctgcgacttcgcgttcctggcccggccgggcaaggtgcaggacccgtacgcgggctga

SEQ ID NO: 10299 - protein, 579 aa, Streptomyces avermitilis MA-4680
MVPVKRPEEFRSHQWYGSGVSSGLRSFSHRARTRQLGYLPEEHLGKPVIAILNTWSDINPCHVHLRDRAQAVKRGVWQAGGFPLEFPVSTLSETFQKPTPMLYRNLLAMETEELLRSYPVDGAVLMGGCDKSTPALLMGAASVDLPAVFVPAGPMLPGHWRNEVLGSGTDMWKYWDDKRAGLIGDCEMSELESGLARSPGHCMTMGTASTLTAAAEALGVTVPGASSIPAVDSGHDRMAAAAGLRIVELVRGDRKLSDILTEEAFADAVTTVLGLGGSTNAVIHLIAMAGRAGVSLTLDDFDRIARTVPVLANVRPGGGPYLMEDFHFAGGLPGFLSRITDLLHLDRPTVSYDTLREQLASAQVHDDDVIRTRANPVADEGGVAVLRGNLCPDGAVIKHIAAEPRLLKHTGPAVVFDDYRTMQRTINDPGLGITADSVLVLRGAGPKGGPGMPEYGMLPIPDHLLKQGVRDMVRISDARMSGTSYGTCVLHVAPESYVGGPLALVRTGDTITLDVEARSLRLHVDDAELERRGARWTPPPERYERGYGALYNEQITQADTGCDFAFLARPGKVQDPYAG

SEQ ID NO: 10300 - DNA, 1764 bp, Rhodopirellula baltica SH 1
  CDS (1)..(1764): transl_table=11
ttgaccctttcaaggtgttgccacccatcttcggccgctttcccctgccaaaacgatctcatgaccgcgtctcagcctgaatccgattccaatgcactgaacaagtacagcagcaagatcacccagccgaaaagccagggtgcgtcgcaggcgatgctttacgccaccggcatgtcctcggaggatatgaacaagcctcaagtcggcatcggcagcatgtggtacgagggcaacagctgcaacatgcacctgctcgatctcgcagcggatgttaaagctggagtcaccgacgccggaatggtcggaatgcgtttcaacaccatcggtgtctcggacggcatctcgatggggaccgacgggatgagcttctcactgcaaagtcgcgacctgatcgccgactcgatcgagacgatcatgggggcgcagtggtacgacgcgttgatcaccctgcccggctgcgacaagaacatgcccggctgtttgatggcgatgggacgtctgaaccgtccttccatcatggtctacggtggaacgattaaacctggcagctaccgcgacgagaagctggacatcgtcagcgcgttccagtgctacggccagttcatcgcgggacaaatcagcgaagaagaacgcagtgaaatcgttcgccgcagttgcccaggtgcgggagcatgcggcggcatgtacaccgccaacacgatggccaccgcaatcgaagccttgggcatggccctgccctactccgccagcatccctgcagagcatccagaaaagaaagaggaatgcaaacgtgccggtttggccatcctcgaactgttgaagaaggacatcaagcctcgcgacatcatgactcgcggtgcattcgaagacgcgatggtgacattgatggcactgggcggcagcaccaacgcggtgcttcacttgatcgcgatggctcgcagcgtcgatgtgccactgacgattgaagacttccaatcggtcagcgaccgcacacctttcttggccgacctgaaacccagcggcaagttcgttcaagaagacctgcacagcgtcggtggcacgcccgcggtgatgaagtacttgctcgaaaagggcatgatcaaaggcgagcacatgaccgtcaccggcaagactctcgcggagaacctggccgatttgcctggtttgaagaccggccaaaagatcgtgtcgacggtcgaagagccgatcaaaaaatcgggtcacattcgaatcctgaaaggatcactggccacggaaggcgcggtcgcgaaaatcactggcaaagaaggtctgcagttcagcggaccggctcgtgtctatgacaatgaggaattgatgctcgccgctttggaacaaaagcagattcaaaagggtgacgtcgttgtgatccgctacgaaggtcccaagggcggacccggcatgcctgagatgttgactccaaccagtgccatcatgggtgctggtttgggaagcgacgtcgcgatgctgactgacggccgtttcagcggcggtagtcacgggttcatcgtggggcacatcactcccgaagcacaagttggtggtccgatcgcattgatcgaagatggagacacgatcacgattgatgccgaaaccaactcgttggacttagaagtcgatgcggctgaattggaagcccgccgatccaagtggaccgcaccgccactgaaagccacccgcggaacgctctacaagtacatcaagtgcgtgaagagcgccagcgaaggctgcgtcaccgacgagtga

SEQ ID NO: 10301 - protein, 587 aa, Rhodopirellula baltica SH 1
MTLSRCCHPSSAAFPCQNDLMTASQPESDSNALNKYSSKITQPKSQGASQAMLYATGMSSEDMNKPQVGIGSMWYEGNSCNMHLLDLAADVKAGVTDAGMVGMRFNTIGVSDGISMGTDGMSFSLQSRDLIADSIETIMGAQWYDALITLPGCDKNMPGCLMAMGRLNRPSIMVYGGTIKPGSYRDEKLDIVSAFQCYGQFIAGQISEEERSEIVRRSCPGAGACGGMYTANTMATAIEALGMALPYSASIPAEHPEKKEECKRAGLAILELLKKDIKPRDIMTRGAFEDAMVTLMALGGSTNAVLHLIAMARSVDVPLTIEDFQSVSDRTPFLADLKPSGKFVQEDLHSVGGTPAVMKYLLEKGMIKGEHMTVTGKTLAENLADLPGLKTGQKIVSTVEEPIKKSGHIRILKGSLATEGAVAKITGKEGLQFSGPARVYDNEELMLAALEQKQIQKGDVVVIRYEGPKGGPGMPEMLTPTSAIMGAGLGSDVAMLTDGRFSGGSHGFIVGHITPEAQVGGPIALIEDGDTITIDAETNSLDLEVDAAELEARRSKWTAPPLKATRGTLYKYIKCVKSASEGCVTDE

SEQ ID NO: 10302 - DNA, 1785 bp, Bordetella parapertussis 12822
  CDS (1)..(1785): transl_table=11
atgtccgataataaccggcgagcgtgttgttccgtagcgctgccttccgacagcgatctggccggcccggcatgggcctacgcacctggagacaagaccatgtccgacaacaatcgttcccgtcacattaccgagggcgtggcgcgcgcgcccaatcgggccatgtactacgcgctgggctacaccgaggcggatttccagaatccgatgatcggcgtggccaacggacattccacgatcactccatgcaacagcgggctgcagcgcctggccgacgcggcgatcgaggccatccgcgtctcccgcgccaacccccaggtgttcggcacgccgacgatttccgatggcatgtccatgggcaccgaaggaatgaagtattcgctggtgttgcgcgaggtcatcgccgactgcatcgagaccgccgcgcaggggcagtggatggatggcgtggtggtcatcggcggatgcgacaagaacatgcccggcggcatgatggcgctcgcgcgcatgaatgtgcccggcatctacgtgtatggcggcaccatcaagcccggccactacaagggcaaggacctgaccatcgtatcggtgttcgaagccgtcggcgaatacaccatgggccgcatggacgaaaccgacttcaaggccatcgagcaatgcgccatccccgggtcgggttcctgcggcggcatgtacacggccaacaccatgagctcggccttcgaggccatggggatgagcctgcctcattccagcaccatggccaacgaggaccaggagaaagtcgcgtcggcggcggaatcggcgcgcgtgctggtcgaggcggtgcggcgccagctgcggccgcgcgacatcatcacccgcgcttccatcgagaacgccgtggcggtgatcatggccacgggcggctcgaccaacgccgtgctgcacttcctcgccatcgcccacgcggcggaagtgccgtggaacatcgacgacttcgagcgcatccgcaagcgcgtgccggtcatctgcgatctcaagccgtccggcaagtacgtggcgaccgacctgcatcgcgccggcggcatcccacaagtgatgaagatcctgctgaacgccggcctgttgcatggcgattgcatcaccatcaccggcaagaccgtggccgagacgctggcgaacgtacccgatgcgccgccgcccgggcaggacgtcatcatgcccatcgaacgcgcgttctacccgcaggggcacctggcgatactcaagggcaatctttcgccggaaggctgcgtggccaagatcaccgggttgaagaatccggtcattaccggcccggcgcgcgtgttcgattccgaagacgatgccatgtccgccatcatggaccgccgcatccgcgatggcgatgtggtggtgatccgctacgagggccccaagggcggtccaggcatgcgcgagatgctcgcgcccacttccgcgctggtcggccaggggttgggcgaaaccgtcggcctgatcaccgacgggcggttttccggcggcacctggggcatggtggtcgggcacgtggcgcccgaggcgttcgtcggcgggccgatcgcgctgattcgcgagggcgattcggttaccatcgatgcccatcagctgctgctgcagctcaacatcagcgatgaggaaatggcggctcgtcgcaaggcttgggcccagcccaagccgcgctatgtgcgcggcgtgcttgccaagttcggcaagctggcctgtaccgccagccgtggggcagtaaccgatgcatttgaagagtag

SEQ ID NO: 10303 - protein, 594 aa, Bordetella parapertussis 12822
MSDNNRRACCSVALPSDSDLAGPAWAYAPGDKTMSDNNRSRHITEGVARAPNRAMYYALGYTEADFQNPMIGVANGHSTITPCNSGLQRLADAAIEAIRVSRANPQVFGTPTISDGMSMGTEGMKYSLVLREVIADCIETAAQGQWMDGVVVIGGCDKNMPGGMMALARMNVPGIYVYGGTIKPGHYKGKDLTIVSVFEAVGEYTMGRMDETDFKAIEQCAIPGSGSCGGMYTANTMSSAFEAMGMSLPHSSTMANEDQEKVASAAESARVLVEAVRRQLRPRDIITRASIENAVAVIMATGGSTNAVLHFLAIAHAAEVPWNIDDFERIRKRVPVICDLKPSGKYVATDLHRAGGIPQVMKILLNAGLLHGDCITITGKTVAETLANVPDAPPPGQDVIMPIERAFYPQGHLAILKGNLSPEGCVAKITGLKNPVITGPARVFDSEDDAMSAIMDRRIRDGDVVVIRYEGPKGGPGMREMLAPTSALVGQGLGETVGLITDGRFSGGTWGMVVGHVAPEAFVGGPIALIREGDSVTIDAHQLLLQLNISDEEMAARRKAWAQPKPRYVRGVLAKFGKLACTASRGAVTDAFEE

SEQ ID NO: 10304 - DNA, 1743 bp, Bordetella bronchiseptica RB50
  CDS (1)..(1743): transl_table=11
atgacccagcgcgaccaaggcggcaagccgcccggcggcctgtccaagggcctgaccaactacggcgacaccggcttttcgctgttcctgcgcaaggccttcatcaagggcgcgggctataccgacgacgcgctggcgcgcccggtcatcggcatcgtcaacaccggcagcagctacaacccctgccacggcaacgccccgcaactggtcgaggcggtcaagcgcggcgtgatgctggccggcgggctgccggtggactttcccaccatctcggtgcacgagagcttctcgcagcccaccagcatgtacctgcgcaacctgatgtcgatggacaccgaagagatgatccgcgcccagcccatggacgcggtggtgctgatcggcggctgcgacaagacggtgcccgcgcagctgatgggcgcggcctcggccggcgtgccggccatccagctggtgaccggctcgatgctgaccggctcgcaccgcggcgaacgggtcggcgcctgtaccgattgccgccgctactggggccgctaccgcgccgacgaaatcgacaccgccgagatcaccgacgtcaacaaccagctggtggccagcgtgggcacctgctcggtgatgggcacggccagcaccatggcgtgcctgaccgaggcgctgggcatgatgatcagcggcggcgcctcggcgcccgcggtcacggccgaccgcatccgcgtggccgaacgcaccggcgccaccgccgtggccatggccgcggcgcgcctgacgcccgagcgcatcctgaccggcaaggccatcgagaacgcgttgcgcgtgctgctggccatcggcggctcgaccaatggcatcgtgcacctgacggccatcgccggccgcctgggcatcgacatcgacctggccggcctggaccgcatgagccgcgagacaccggtactggtggatctcaagccctcgggccagcactacatggaagacttccacaaggccggcggcatgccggcgctgctgcgcgaactgcgcccgctgctgcacctggacgccctcaccgtctcgggccgcacgctgggcgaagagctcgacgccgcgcccgcgccgttcgcgcaggaggtgatccgcgccttggacgccccgatctacccggtgggcgggctggcggtgctgcgcggcaacctggcgccgggcggcgccatcatcaagcagtcggccgccgacgcccggctgatggagcacgaaggccgcgccgtggtgttcgaggacgccgaagacatggcgcgccgcatcgacgacgacgcgctcgatgtcacggccgacgacatcctggtgctcaagcgcatcggccccaccggcgcgcccggcatgcccgaggcgggctacatgccgattccgcgcaagctggcgcgcgccggcgtcaaggacatggtgcgcgtatccgacggccgcatgagcggcaccgccgccggcaccatcgtgctgcacgtcacgcccgaggccgccatcggcggaccgctggcccacgtgcgcaatggcgaccgcatccgcctgtcggtgcgccagcgcgagatcagcctgctggtcagcgaggccgagctggcgcagcgcgcggccgcccagccgatcgaacggccgcaggccgagcggggctaccgcaagctgttcctcgacacggtcacgcaggccgaccagggggtagacttcgacttcctgcgcgcacccgccagcaagcaaaccgtgccgcctcgctga

SEQ ID NO: 10305 - protein, 580 aa, Bordetella bronchiseptica RB50
MTQRDQGGKPPGGLSKGLTNYGDTGFSLFLRKAFIKGAGYTDDALARPVIGIVNTGSSYNPCHGNAPQLVEAVKRGVMLAGGLPVDFPTISVHESFSQPTSMYLRNLMSMDTEEMIRAQPMDAVVLIGGCDKTVPAQLMGAASAGVPAIQLVTGSMLTGSHRGERVGACTDCRRYWGRYRADEIDTAEITDVNNQLVASVGTCSVMGTASTMACLTEALGMMISGGASAPAVTADRIRVAERTGATAVAMAAARLTPERILTGKAIENALRVLLAIGGSTNGIVHLTAIAGRLGIDIDLAGLDRMSRETPVLVDLKPSGQHYMEDFHKAGGMPALLRELRPLLHLDALTVSGRTLGEELDAAPAPFAQEVIRALDAPIYPVGGLAVLRGNLAPGGAIIKQSAADARLMEHEGRAVVFEDAEDMARRIDDDALDVTADDILVLKRIGPTGAPGMPEAGYMPIPRKLARAGVKDMVRVSDGRMSGTAAGTIVLHVTPEAAIGGPLAHVRNGDRIRLSVRQREISLLVSEAELAQRAAAQPIERPQAERGYRKLFLDTVTQADQGVDFDFLRAPASKQTVPPR

SEQ ID NO: 10306 - DNA, 1689 bp, Vibrio vulnificus YJ016
  CDS (1)..(1689): transl_table=11
atgaactgtaattcatgtaaaggatgtggagcgccacaccacaatcaaatcttgcagggtgatgatggtgcgcttaaacgcgcactctacaagtcgatggatcactctgatgaagatttaaggcagccgatcattgcggttgtaaatagttacaccaatgcaaccgctggacacgctaatctcgatgtgattggtcagcaagtgattaagggcatagaagaagccggtggtacggcaatgacgtttggtaccattgcgccgtgtgatggtattgcagaaggtcaccttgggatgcgttatatccttgccgcgagagagatcattgctgcctctattgaagttatggtcagagcgcaccgctttgatgccatggttctgcttggctcgtgtgacaaaattgtccctgggatgctgatggcagctgcgcgcctcgacatccctgcgattgtggtcaatgcagggcctatgtatccagcagaatacaaagggaagcattgggacggtaacatcgtaacggaagctattggctggaaggccaaaggtgaaattgacgaagaggagtttcgtaagattgaagacctcgcagagccgacaatcggttcatgtaccatgtttggtacagccaatactatgtgttgtcttgctgaatctctaggtatgtcgctacctggtagtgccaccatcccagccattgatcagcagcgtttggacgttgcttatcaaagtggtcaacagatcatgaccttggtggaaaataatgtcaccgccagacagatcataactaagcaatcgatcgataacgcaatctgcgctttgcttgcaacgggtggctcaaccaatgccatcattcatctgcaagcaatacactatgaagcgggacttggccctttgccgttggataggtttgctcagttgagtgataaggtgccacttctcgcttctatctaccctgcgtcagagtatgacatgattgattttcatctcgccggtggcgttgccgcagtggagcgagaaatgcgttcactacttaaccttgacacgctcaccgttgcgggacgaaaaggtgacgtattagagcagatcccagttaccaccaaccgcaatatcatcaagtctttagatgagccgtttatgcaccaatctggcattggggtgatgcgcggcaatgtagcgccggagggctcagtgattaaacctgcggcagtgcctaagcatatgttcaagtttagcggtaaagcggtggtgtttgactctgagcaagcggctattgatgcgatcgttgccaatcaagttatcgtcggttctgtgattgtaattcgttatgaagggccaaaaggtggggctgggttacctgaaatgtacaaaccgatgaaattgctcgaagggatgggactttctgagtcttgcgctctgattactgatggtcgattctcaggatccaatcgcggcttgtttgttggccatatttcaccagaggcctacgaaggcggagttatcgggctgattgaaaatggcgatcaagtttccctcgatattagtgcgggcactattacgcttgatgtcgcagaggatgagattgacaagcgtcgtcaacagtggaaaccagtagaaaaaaccatgccaaatgggattcttggtctctatcgtgatcgcgtttcgtcagcggcaacaggagcattattacgatga

SEQ ID NO: 10307 - protein, 562 aa, Vibrio vulnificus YJ016
MNCNSCKGCGAPHHNQILQGDDGALKRALYKSMDHSDEDLRQPIIAVVNSYTNATAGHANLDVIGQQVIKGIEEAGGTAMTFGTIAPCDGIAEGHLGMRYILAAREIIAASIEVMVRAHRFDAMVLLGSCDKIVPGMLMAAARLDIPAIVVNAGPMYPAEYKGKHWDGNIVTEAIGWKAKGEIDEEEFRKIEDLAEPTIGSCTMFGTANTMCCLAESLGMSLPGSATIPAIDQQRLDVAYQSGQQIMTLVENNVTARQIITKQSIDNAICALLATGGSTNAIIHLQAIHYEAGLGPLPLDRFAQLSDKVPLLASIYPASEYDMIDFHLAGGVAAVEREMRSLLNLDTLTVAGRKGDVLEQIPVTTNRNIIKSLDEPFMHQSGIGVMRGNVAPEGSVIKPAAVPKHMFKFSGKAVVFDSEQAAIDAIVANQVIVGSVIVIRYEGPKGGAGLPEMYKPMKLLEGMGLSESCALITDGRFSGSNRGLFVGHISPEAYEGGVIGLIENGDQVSLDISAGTITLDVAEDEIDKRRQQWKPVEKTMPNGILGLYRDRVSSAATGALLR

SEQ ID NO: 10308 - DNA, 1788 bp, Magnaporthe grisea 70-15
  CDS (1)..(1788)
atgatgtcctcaaacctgctgcgcgccagggtgcccaaggccctggctgccaccaggagccatgcggccctcttctccacaacctcgcgccgcgctgagcaactgaacaagacttcggccaagatcacacagcccaagtcccagggtgcgtcacaggccatgctgtacgccaccggcttgaccgaggaggacatgaacaagccgcaggtcggcatctcgtcggtctggtacgagggcaacccctgcaacatgcacatcctcaagctgtcggagcggatccgcgactccgtcaaggccgccaacctggtccccatgcgcttcaacaccattggagtctcggacggtatcagcatgggcacgaccggcatgcgctattcgctgcagagccgtgagatcatcgccgacagtatcgagaccgtcatgcagggccagtggtacgatgccaacatctccatcccgggctgcgacaagaacatgcccggtgttctcatcgccctcggccgtgtcaaccgccccagtttgatcgtttacggcggtaccatcaagcccggctgcagccaaaagggcgagcccatcgacatcgtcagcgccttccaggcctacggccagtacctgactggtgagatcaccgaggagcagcggttcgacatcatccggaacgcgtgccccggcggtggtgcatgcggtggcatgtacactgccaacactttggcgtcggctatcgagactctgggcatgagcttgccgggaagcagcagcaaccccgcagagcaccccagcaagctggccgaatgtgaccaggttggcgaggccatcaagaacatcctccgtgaggacgtgcgcccccgcgacatcatgacgaggcaggcctttgagaacgccatggttgtagtcagcatccttggtggaagcaccaacgccgtcctgcacctgcttgccgttgccgatgcggtcggtgtcaagcttaccattgacgacttccaagccgtttccgaccggacaccgctcctggcagacctcaagccttcgggcaaatacgtcatggaggatgtacacaagattggtggcacgccatctctcctgcgcttcctggccaaggagggcttgatcgatgcttctggcatcaccgtcactggcaagaccatgaaggagaacttggacaagtaccccgacttcccggccgaccagcccatcatccggcctctcagcaaccccctcaagtccacgggccacatccagatcctccgcggtagtctcgcacccggtggctctgtcggcaagattaccggcaaggagggtcttcagttcactggcaaggcccgctgctacgactgcgaggacgactttatcgagtcgctcgagcgtggcgagatcaagaagggtgagaagacggttgtcatcatccgttacgagggccccaagggtggtcccggcatgcccgagatgctgaagcccagctcggccatcatgggtgccggtctcggcaaggacgttgccctcatcactgacggtcgcttctctggcggttcgcacggattcctcatcggacacgttgtgcccgaggccatggagggcggacctatcgcacttgttcgcgatggcgacaccattactattgatgcggagaagcgggtgatcgacacggacgtgtcggacaagaccatggcggagcgccgcgccgagtggaaggctcccccgatcagggagaccaggggaacgctggccaagtacgcagcgctggttagcgacgcgagcagtggttgcgtgacggacaaggtcgcgcgataa

SEQ ID NO: 10309 - protein, 595 aa, Magnaporthe grisea 70-15
MMSSNLLRARVPKALAATRSHAALFSTTSRRAEQLNKTSAKITQPKSQGASQAMLYATGLTEEDMNKPQVGISSVWYEGNPCNMHILKLSERIRDSVKAANLVPMRFNTIGVSDGISMGTTGMRYSLQSREIIADSIETVMQGQWYDANISIPGCDKNMPGVLIALGRVNRPSLIVYGGTIKPGCSQKGEPIDIVSAFQAYGQYLTGEITEEQRFDIIRNACPGGGACGGMYTANTLASAIETLGMSLPGSSSNPAEHPSKLAECDQVGEAIKNILREDVRPRDIMTRQAFENAMVVVSILGGSTNAVLHLLAVADAVGVKLTIDDFQAVSDRTPLLADLKPSGKYVMEDVHKIGGTPSLLRFLAKEGLIDASGITVTGKTMKENLDKYPDFPADQPIIRPLSNPLKSTGHIQILRGSLAPGGSVGKITGKEGLQFTGKARCYDCEDDFIESLERGEIKKGEKTVVIIRYEGPKGGPGMPEMLKPSSAIMGAGLGKDVALITDGRFSGGSHGFLIGHVVPEAMEGGPIALVRDGDTITIDAEKRVIDTDVSDKTMAERRAEWKAPPIRETRGTLAKYAALVSDASSGCVTDKVAR

SEQ ID NO: 10310 - DNA, 1797 bp, Gibberella zeae PH-1
  CDS (1)..(1797)
atgctttcccggtcactgctgcgctctagagctgtgggagctttccccctctctgccaggaatcatggccgcttcctgtctaccacctccatccgctccgatgacaagctcaacaagatctcctccaacatcactcagcccaaggcccagggtgcttcccaggctatgctctacgccaccggcctctctgaagctgacatgaacaaggctcaagttggcatctcgtccgtctggtacgagggaaacccttgcaacatgcaccttatggacctctctgcccacgtcaaggagtctgtcgccaaggccggtcttattccctaccgattcaacaccatcggtgtctctgatggtatctccatgggtaccactggtatgcgatattccctccagagccgagagattattgccgatagtgttgagactgtcatgaacggtcaatggtatgacgccaacgtcagcttgcccggttgcgacaagaacatgcccggtgttgccattgccatgggtcgtgtcaaccgtcccagcatcatggtttacggtggtaccattaagcccggttgcaccaagcagggcgagtctatcgatatcgtctctgctttccaggcctacggtcaatacatcaccggcgagatcaccgaggagcagcgattcgacattatccgaaatgcctgccctggtggtggtgcttgtggtggcatgtacactgccaacaccatggctactgccattgagactctgggacttaccctccctggtagcagcagcagccctgctgaggaccccagcaagatcgccgagtgtgaggctgttggacctgctatccgcaacattctcaaggaagatatccgacctcgtgacatcatgactcgccaagcctttgagaatgccatgatcgtcactaccatccttggtggcagcaccaacgctgttctgcatcttatcgcaattgccgactctgtcggtatcaagctcgacatcgaggacttccaaaaggtttccgaccgcactcccttccttgccgacctgaagccctctggaaagtgggtcatggccgatatgcacaagattggtggtactcctgctcttctcaagttcctcttgaaggagggtatcattgacggctctggtatcactgtcactggcaagaccatgaagcagaacgtcgaggagttgcctggattccccgaggatcaaaccatcattcgcccccttagcaaccccattaagcctaccggtcacatccagattctccgtggatccctggctcctggtggctgtgttggtaagatcactggcaaggagggtctccgattcgagggtaaggcccgtgtctacgactccgagcccgccttcatctctagccttgaggctggtgagatcaagaagggtgagaagactgtcgttatcatccgatatgatggacccaagggtggccccggtatgcctgagatgctgaagccttcttctgccattatgggtgctggccttggacaggatgtcgcccttctcactgacggtcgcttctctggtggttctcacggtttcattattggtcacattgtccccgaggcaatggagggtggccctatcgcccttgtcgaggacggtgacaccatcgttatcgacgccgagtctcgtgctatcgacctcgttgttcccgaggcagaggttgatcgccgtcgcaaggcctggaaggctcccgctccccgatacaccaagggcacactcagcaagtacgctcgactggtgaccaacgccagtgagggctgtgtcaccgatagcggtctcaagaactaa

SEQ ID NO: 10311 - protein, 598 aa, Gibberella zeae PH-1
MLSRSLLRSRAVGAFPLSARNHGRFLSTTSIRSDDKLNKISSNITQPKAQGASQAMLYATGLSEADMNKAQVGISSVWYEGNPCNMHLMDLSAHVKESVAKAGLIPYRFNTIGVSDGISMGTTGMRYSLQSREIIADSVETVMNGQWYDANVSLPGCDKNMPGVAIAMGRVNRPSIMVYGGTIKPGCTKQGESIDIVSAFQAYGQYITGEITEEQRFDIIRNACPGGGACGGMYTANTMATAIETLGLTLPGSSSSPAEDPSKIAECEAVGPAIRNILKEDIRPRDIMTRQAFENAMIVTTILGGSTNAVLHLIAIADSVGIKLDIEDFQKVSDRTPFLADLKPSGKWVMADMHKIGGTPALLKFLLKEGIIDGSGITVTGKTMKQNVEELPGFPEDQTIIRPLSNPIKPTGHIQILRGSLAPGGCVGKITGKEGLRFEGKARVYDSEPAFISSLEAGEIKKGEKTVVIIRYDGPKGGPGMPEMLKPSSAIMGAGLGQDVALLTDGRFSGGSHGFIIGHIVPEAMEGGPIALVEDGDTIVIDAESRAIDLVVPEAEVDRRRKAWKAPAPRYTKGTLSKYARLVTNASEGCVTDSGLKN

SEQ ID NO: 10312 - DNA, 1803 bp, Gibberella zeae PH-1
  CDS (1)..(1803)
atggcggaccaagtcactcacgatcccaagcagtcaagcgactacatccccttcccttgccttcctcccggcggagctctcaaccgttggtctacaaagatcacccgcgagcatgactaccccggagctcaggctatgctctacggagctggtgtcaaggaccagcacacaatgaagaacgcgccccaggttggtgttgctaccgtctggtggcaaggaaacccgtgcaatacccatctccttgatcttggccagatcgtcaagaactccatcgagaaggaaggcatgatcggctggcagttcaacaccgttggtgtatctgacgccatcaccatgggcggcgagggcatgcgcttctctcttcaaactcgagaaatcattgctgattctatcgagtccgtaacctgcgcccagcatcatgacgccaacatctccattcccggctgtgacaagaacatgcccggcacagtcatggccgccgctcgtcacaaccgccccttcatcatgatctacggcggtaccatccgcaagggccactccaacctccttgagaagcccatcaacatcagcacctgctacgaggcctcgggtgctttcaactacggtcgtctgcatgccaagacgaaccccggcgagcctggtcgcgagagctccgatgtcatggatgatatcgagaagcacgcttgtcccggcgccggagcttgtggtggcatgtatacagccaacaccatggctaccgctatcgaggccatgggccttactctgcctggttcatcatcgtaccctgccgagtctcctgagaagcgtcgtgagtgtgagcgcgctgcccaggttatccgaactaccatggagaaggaccttcgtcctcgcgatatcatgacccgtgcctctttcgagaacgctcttgtcctgaccatgattctcggtggttcaacaaacggtgttcttcacttcctcgccatggccaacaccgccgatgttcccctgaccattgacgacatccagcgtgccagtgaccgcacccccttcctcgctgatctcgcccccagtggaaagtactacatggaggatctctacaaggtcggcggtacaccctccgtcatcaagatgctcgtcgcccgtggtcttctcgacggtagcatcatgaccattaccggcaagactctcgccgagaacgtcgcggactggcctagtctggaccccggccaggacatcatccgtcctcttgagaaccccatcaaggactctggccacatccgcatcctaaagggtaactttgcccccggcggcgccgtcgctaagatcactggaaaggagggtctgtccttcaccggcaaggcccgtgtcttcaacaccgagaaggagctcaacggcgcactgaaccgaagcgagatcaagcagtccgatggtaacctcgtcgtcatcgtccgatacgagggccccaagggcggtcccggtatgcctgaacagctcaaggcttctgcagccatcatgggtgccggcctctccaacctggcacttgtcaccgacggacgatacagtggtgcttctcacggtttcatcgtgggccacgttgtgcctgaggctatggtcggaggtcccatcgctctggtcaaggatggagacgagatcactatcgatgcgattaacaaccgaatcgatgtcgacatcactgacgaggagatggagaagcgaaggagtgagtggaagcctcctgcgccccgtgttacgaggggtgtgttggccaagtatgcccgcttggtcggtgatgcttcccacggtgctgtaacagatcagtggtag

SEQ ID NO: 10313 - protein, 600 aa, Gibberella zeae PH-1
MADQVTHDPKQSSDYIPFPCLPPGGALNRWSTKITREHDYPGAQAMLYGAGVKDQHTMKNAPQVGVATVWWQGNPCNTHLLDLGQIVKNSIEKEGMIGWQFNTVGVSDAITMGGEGMRFSLQTREIIADSIESVTCAQHHDANISIPGCDKNMPGTVMAAARHNRPFIMIYGGTIRKGHSNLLEKPINISTCYEASGAFNYGRLHAKTNPGEPGRESSDVMDDIEKHACPGAGACGGMYTANTMATAIEAMGLTLPGSSSYPAESPEKRRECERAAQVIRTTMEKDLRPRDIMTRASFENALVLTMILGGSTNGVLHFLAMANTADVPLTIDDIQRASDRTPFLADLAPSGKYYMEDLYKVGGTPSVIKMLVARGLLDGSIMTITGKTLAENVADWPSLDPGQDIIRPLENPIKDSGHIRILKGNFAPGGAVAKITGKEGLSFTGKARVFNTEKELNGALNRSEIKQSDGNLVVIVRYEGPKGGPGMPEQLKASAAIMGAGLSNLALVTDGRYSGASHGFIVGHVVPEAMVGGPIALVKDGDEITIDAINNRIDVDITDEEMEKRRSEWKPPAPRVTRGVLAKYARLVGDASHGAVTDQW

SEQ ID NO: 10314 - DNA, 1752 bp, Candida glabrata CBS 138
  CDS (1)..(1752)
atgtcctccagactaacttttgctaggaagttctccagcacaagaaatgttgcaaagaaactgaataaatactcatatatcatcactgagcctaaggaccaaggtgcctctcaggctatgttgtatgccactggtttcaacaaggatgatttcagcaaagcgcaagttggtgttggttcttgttggtggtctggtaacccatgtaacatgcatctattggatttgaaccacagatgttcccaatccatcgagaaagccggtatgaaaggtatgcaatttaacacaattggtgtctctgacggtatctcgatgggtactaaaggtatgagatattctttacaaagtagagaaattatcgcagactctttcgagactatcatgatggcacaacactacgatgccaatattgctattccatcctgtgacaagaatatgcctggtgttatgatggctatgggtagacacaacagaccatctattatggtttatggtggtaccattatgccaggtcacccaacttgtggctccaagaacattccagagaacattgatgttgtctctgctttccaatcctacggtcaatacatctcgaagcaattcaatgaagaagagagaagtgatgttgtacaacactcttgtccaggtcctggctcttgtggtggtatgtacaccgccaacaccatggcctctgctgccgaagttttaggtatcactatgccaaactcttctgctttcccagctgtttctgctgaaaagattgctgaatgtgacaacattggtgctgctatcaagaacactatggaacttggtattaccccacgtcaaatcttcaccaaggaatcctttgaaaacgctatcacttacgtcattgctactggtggttccactaacgcagttcttcacttggtagctattgcacactctgctggtgtcaagatcaccccagatgatttccaaaggatcagtgacaagacaccattgctaggtgacttcaagccatctggtaagtatgtcatggccgatttgattaaggtcggtggtactcaaagtgtcatcaagttcttgtatgacaacggtttcttatacggtgacgccttaactgttactggtgaaactttggctgagcgtgccaagaaagccaagggtctaagtgaaactcaagacattattagaccattgtcaaacccaattaagccaagtggccatctacaaattctatacggttctcttgctccaggtggttctgttggtaagattactggtaaggaaggtacttacttcaaaggtaaggctcgtgttttcgaagaagaagacgctttcatctctgcattggagaatggtgaaatcaagaaaggtgaaaagacagttgttattatcagatatgaaggtccaaagggtggtccaggtatgccagaaatgttgaagccatctagtgcactaatgggttatggtctaggtaaagatgttgccttgctaactgatggtagattctctggtggttctcatggtttcttgattggtcacattgttccagaagctgccgaaggtggtccaattggtttggtcagagatggtgatgaaattgtgattgatgcagacaacaacaagattgacctcctaatctctgaatctgagatgtctcaacgtaaggccgaatggaaacctccagccccacgttacaacaggggtactctatccaaatatgctaagttagtctctaatgcctcccaaggttgtgttacagacgcttaa

SEQ ID NO: 10315 - protein, 583 aa, Candida glabrata CBS 138
MSSRLTFARKFSSTRNVAKKLNKYSYIITEPKDQGASQAMLYATGFNKDDFSKAQVGVGSCWWSGNPCNMHLLDLNHRCSQSIEKAGMKGMQFNTIGVSDGISMGTKGMRYSLQSREIIADSFETIMMAQHYDANIAIPSCDKNMPGVMMAMGRHNRPSIMVYGGTIMPGHPTCGSKNIPENIDVVSAFQSYGQYISKQFNEEERSDVVQHSCPGPGSCGGMYTANTMASAAEVLGITMPNSSAFPAVSAEKIAECDNIGAAIKNTMELGITPRQIFTKESFENAITYVIATGGSTNAVLHLVAIAHSAGVKITPDDFQRISDKTPLLGDFKPSGKYVMADLIKVGGTQSVIKFLYDNGFLYGDALTVTGETLAERAKKAKGLSETQDIIRPLSNPIKPSGHLQILYGSLAPGGSVGKITGKEGTYFKGKARVFEEEDAFISALENGEIKKGEKTVVIIRYEGPKGGPGMPEMLKPSSALMGYGLGKDVALLTDGRFSGGSHGFLIGHIVPEAAEGGPIGLVRDGDEIVIDADNNKIDLLISESEMSQRKAEWKPPAPRYNRGTLSKYAKLVSNASQGCVTDA

SEQ ID NO: 10316 - DNA, 1752 bp, Kluyveromyces lactis NRRL Y-1140
  CDS (1)..(1752)
atgttttcacagtctgctgtaagaaggttttcaaccactagaaatgtgggcaagaagttgaacaagtactcgcatatcatcaccgaaccaaaggaccagggtgcatcgcaagcgatgctttatgccacggggtttaaggaagacgatttcggcaaggctcaagttggtgttggttcatgttggtggtctggtaatccatgtaatatgcatttgatggatttcaacaacagaatcaccgaatccgttaacaaggctgggttgaaaggtatgcaattcaataccattggtgtttctgatggtatttccatgggtaccaagggtatgagatattctttgcaatctagagaagttattgctgattcgttcgaaaccattatgatggctcaacattacgatgccaatatcgccattccatcttgtgataaaaacatgcctggtgttttgatggctatgggtagacataacagaccttccattatggtttatggtggtaccattttgccaggttctccaacttgtggttctgctaagattccaaagaagattgacgttgtttctgcgttccagtcctatggtcaatacttatccaaggaatttactgaaactgaaagacaagatgttgtgcaacatgcttgtccaggtccaggttcttgtggtggtatgtacactgctaacaccatggcctctgtggccgaagtcttgggtatgactttgccaaactcttcctctttcccagcagtttcaaaggaaaaattgaacgaatgtgacactatcggtgaagctatcaagaagactatggaactaggaattactcctcgtgacgttatgaccaaagaagctttcgaaaacgctatgacatatgtcattgctaccggtggttccactaacgctgttcttcatatggttgctgtcgctcactctgccggtgtcaagattactccagatgatttccaaagaattagtgacaagactccattgttgggtgatttcaaaccttctggtaaatatgtgatggcagatttgattaccgtcggtggtacccaagctgttatcaaatacttgtacgaagaaggcttcctacatggtaacactattaccatctccggtgacactttagcagaaagagcagctaaggctgtatctttgaaggatggtcaagacatcattcgtcctctaactaacccaattaagacaagtggtcatttacaaattctatacggaagtttggccccaggtgggtcagtcggaaaaattactggtaaagaaggtacttacttcaagggtaaggctagagtattcaacgacgaaccaggctttatttctgctttagaaaacggtgaaatcaagaagggtgaaaaaaccgttgtcattatcagatacgaagggccaagaggtggtccaggtatgcctgaaatgttaaagccatcttctgcattgatgggttacggtctaggtaaggatgttgctctattgactgacggtagattctccggtggttctcacggtttcttgatcggtcacatcgtcccagaagctgccgaaggtggtcctatcggtttggttcgtgacggtgacgaaattatcattgatgctgataacaacaagattgacttgttagttccagaagaagaaatcgctgaacgtagaagtacatggactgctccacctccacgttatactagaggatgtttatccaagtacgcaaaattggtttcaaatgcttcccatggttgcgtgactgatttgaactaa

SEQ ID NO: 10317 - protein, 583 aa, Kluyveromyces lactis NRRL Y-1140
MFSQSAVRRFSTTRNVGKKLNKYSHIITEPKDQGASQAMLYATGFKEDDFGKAQVGVGSCWWSGNPCNMHLMDFNNRITESVNKAGLKGMQFNTIGVSDGISMGTKGMRYSLQSREVIADSFETIMMAQHYDANIAIPSCDKNMPGVLMAMGRHNRPSIMVYGGTILPGSPTCGSAKIPKKIDVVSAFQSYGQYLSKEFTETERQDVVQHACPGPGSCGGMYTANTMASVAEVLGMTLPNSSSFPAVSKEKLNECDTIGEAIKKTMELGITPRDVMTKEAFENAMTYVIATGGSTNAVLHMVAVAHSAGVKITPDDFQRISDKTPLLGDFKPSGKYVMADLITVGGTQAVIKYLYEEGFLHGNTITISGDTLAERAAKAVSLKDGQDIIRPLTNPIKTSGHLQILYGSLAPGGSVGKITGKEGTYFKGKARVFNDEPGFISALENGEIKKGEKTVVIIRYEGPRGGPGMPEMLKPSSALMGYGLGKDVALLTDGRFSGGSHGFLIGHIVPEAAEGGPIGLVRDGDEIIIDADNNKIDLLVPEEEIAERRSTWTAPPPRYTRGCLSKYAKLVSNASHGCVTDLN

SEQ ID NO: 10318 - DNA, 1782 bp, Debaryomyces hansenii CBS767
  CDS (1)..(1782)
atgagtgcattgacaaagtgtaaacgtaacttaggaggtagaaacatccggttattttccaattctgctttgaattgtgacaacaagttaaataagtactcttctattgtgacccagcccaagtcgcaaggggcatcccaagcgatgttgtatgcgaccgggtttgatgaagaagatatgaacaaggcacaggttggtgttggatctgtctggtggtcaggaaatccgtgcaacatgcacttgatggagatgaacaacaaggtgaccgaatctgttaacagagccggtttgaaggggatgcagttcaactcgattggtgtctcggatgggatcactaatggtactgatggtatgagatactcgttgcaatcgcgtgaaattattgctgactcgtttgagaccatgatgatggcccagatgtacgatgccaacatcgcaattccgctgtgtgacaagaacatgccaggtaccttgatggctatgggtagacacaacagaccatctattatggtttacggtggtactattatgccaggttctccaacttgtggtaactcgattattcctgacaagattgatatcatctctgcgttccaatcgtatggtcaattcttatcggaccagatcaatgagggcgaaagaaaggatatcattaagaatgcatgtcctggtgctggtgcatgtggtggtatgtacactgccaacaccatggcctctgctgctgaagttttaggtatgtccttaccattttcgtccagtgccccagccatttcgaaggaaaaggcacatgaatgtgctactgtcggtgatgccatcaagaatttgttagtccttgacttgaagccaatggatatcatgaccaagaaggcttttgaaaatgcaatcacttatattatcgctactggtggttctactaatgccgttttacatttgattgccatggcaaacaccgttggtgttgacttaactgtcgatgatttccaaagaatttcggactccactccattattagccgatttcaagccaagtggtaagtacgttatggctgacttacaaaagtacggtggtaccccagctgtcatgaagttgttattcgaggaaggtttaattgatggatctcaatatactgtcacaggtaagactatcaaagaaaatttggaatctgttaaaggcttgccagctgaacaagaaattgtcagacccttatctaacccattaaagccaagtggccacttacaaattttaaagggtactttagctccaggtagtgctgtcggtaaaattactggtaaggaaggtacttatttcaagggtaaatctagagttttcgatgatgaaatggcattcattactgctttagaaaatggcgaaatcaagaaaggtgaaaagactgtttgtgtcattagatacgaaggtcctcaaggtggccctggtatgccagagatgttgaagccttcttctgcattaatgggttacggtttaggccaagacgttgcgttattaactgatggtagattctctggtggctctcatggtttcttaattggtcatattgttccagaagctgcagttggtggaccaattgcgttagtgcatgatggtgatgaaattgttattgacgctgaaaacaatagaatcgacttattagtatctgaagatattttagccgaaagaaagaaggaatggaccccaccaaagccaagatatacaagaggtacattggctaaatattctaagttagtcagtgatgcttcgttgggttgtgttactgatttggtataa

SEQ ID NO: 10319 - protein, 593 aa, Debaryomyces hansenii CBS767
MSALTKCKRNLGGRNIRLFSNSALNCDNKLNKYSSIVTQPKSQGASQAMLYATGFDEEDMNKAQVGVGSVWWSGNPCNMHLMEMNNKVTESVNRAGLKGMQFNSIGVSDGITNGTDGMRYSLQSREIIADSFETMMMAQMYDANIAIPLCDKNMPGTLMAMGRHNRPSIMVYGGTIMPGSPTCGNSIIPDKIDIISAFQSYGQFLSDQINEGERKDIIKNACPGAGACGGMYTANTMASAAEVLGMSLPFSSSAPAISKEKAHECATVGDAIKNLLVLDLKPMDIMTKKAFENAITYIIATGGSTNAVLHLIAMANTVGVDLTVDDFQRISDSTPLLADFKPSGKYVMADLQKYGGTPAVMKLLFEEGLIDGSQYTVTGKTIKENLESVKGLPAEQEIVRPLSNPLKPSGHLQILKGTLAPGSAVGKITGKEGTYFKGKSRVFDDEMAFITALENGEIKKGEKTVCVIRYEGPQGGPGMPEMLKPSSALMGYGLGQDVALLTDGRFSGGSHGFLIGHIVPEAAVGGPIALVHDGDEIVIDAENNRIDLLVSEDILAERKKEWTPPKPRYTRGTLAKYSKLVSDASLGCVTDLV

SEQ ID NO: 10320 - DNA, 1842 bp, Aspergillus nidulans FGSC A4
  CDS (1)..(1842)
atgcttctttcacagactcggggccgcctgccctctgctctccgcagcttggccaacagagctgctattcgtccaatctctactacactcccccgccaaaaagcgtcgccaaaagatgatgagcccgtcctcaacaaggtctcccgccatatcacacagccggtgtcccagggtgcttcccaggcgatgctgtacgctacgggtcttactgaggccgacatgaacaaggcccaggttggtatttcctcggtctggtacaacggcaacccttgcaacatgcacctcctcgacctgaacaaccgtgtccgcgagggtgtgcaaaaggctggccttatcgggtaccagttcaacaccattggtgtcagtgatggaatcagtatgggtaccagtggtatgcgttactcgcttcagagccgtgacctcatcgccgactctatcgagaccgtcatgggtggtcagtggtacgacgccaacatcagcatccccggttgcgacaagaacatgcccggtgttttgatggctatgggacgagtcaaccgccccagtttgatggtttacggtggaaccatcaagcccggctgcgcatccatgcagggcaacgctgacatcgatatcgtctctgccttccaagcctacggccagttcatcagcggtgagatcaacgagccccagcgcttcgatatcatccgccacgcctgccccggtggcggcgcttgcggtggaatgtacactgccaacaccatggccacggccatcgaagtcatgggtatgaccctcacgggctcctcgtccaacccggccgaatcgcaagccaaatacgacgaatgtcttcgcgctggtgaagccatcaagcgcctcctcgtcgaagacatccgcccctccgacatcatgactcggcaagccttcgagaacgccatggtcgttgtcaacatcaccggcggctccaccaatgctgtccttcacctcatcgccattgccgactccgtcggcatcaagctcacaattgacgacttccaagccgtctctgaccgcacccccttcctcgcagacctcaagccatccggcaaatacgttatggccgacctccacaacatcggcggcaccccctccctcctcaaattcctcctcaaggaaggcgtcattgatggctccggcatcacagttaccggtgaaactctcgccaagaacctcgagaaagtccccgatttccccgaggaccagaaaatcattcgccccttctccaaccccatcaaggaaacaggccacatccagatcctgcgcggttcgctcgcgccgggcggttgcgttggtaagattaccggtaaggagggaaccgttttcacgggcaaggcccgcgtctttaaccacgaagacgacttcattgccgccctggagcgcaaggaaatcaccaaggatgagcaaactgtcgttgtgattcgctacaccggtcccaagggtggtcccggtatgcctgaaatgctcaagccttcaagcgccctcatgggtgctggcctcggccaaacctgcgccctgatcacagacggacgcttctccggtggttcgcacggcttccttattggacacatcgtcccagaggctgccgtcggtgggccgattggtctcgtacacgacggcgacgtgatcaccattgatgccgagaagcgcgttttggaccttgacgttgacgaggcggaactcgctaagcgacggaagcagtgggaggctgataaggcggcgggcaagttgccccagaccgggttgaacttgcgcgggacgcttggaaagtatgcccggaatgtcaaggatgctagttccgggtgtattacggacgctttcgattaa

SEQ ID NO: 10321 - protein, 613 aa, Aspergillus nidulans FGSC A4
MLLSQTRGRLPSALRSLANRAAIRPISTTLPRQKASPKDDEPVLNKVSRHITQPVSQGASQAMLYATGLTEADMNKAQVGISSVWYNGNPCNMHLLDLNNRVREGVQKAGLIGYQFNTIGVSDGISMGTSGMRYSLQSRDLIADSIETVMGGQWYDANISIPGCDKNMPGVLMAMGRVNRPSLMVYGGTIKPGCASMQGNADIDIVSAFQAYGQFISGEINEPQRFDIIRHACPGGGACGGMYTANTMATAIEVMGMTLTGSSSNPAESQAKYDECLRAGEAIKRLLVEDIRPSDIMTRQAFENAMVVVNITGGSTNAVLHLIAIADSVGIKLTIDDFQAVSDRTPFLADLKPSGKYVMADLHNIGGTPSLLKFLLKEGVIDGSGITVTGETLAKNLEKVPDFPEDQKIIRPFSNPIKETGHIQILRGSLAPGGCVGKITGKEGTVFTGKARVFNHEDDFIAALERKEITKDEQTVVVIRYTGPKGGPGMPEMLKPSSALMGAGLGQTCALITDGRFSGGSHGFLIGHIVPEAAVGGPIGLVHDGDVITIDAEKRVLDLDVDEAELAKRRKQWEADKAAGKLPQTGLNLRGTLGKYARNVKDASSGCITDAFD

SEQ ID NO: 10322 - DNA, 1770 bp, Candida albicans SC5314
  CDS (1)..(1770): transl_table=12
atgagttttgtcaaatcttgcagagggtgtcttaggacatttgctacatccacaatcaagcatgagaaaaagttaaacaagtactcgtctattgtcacaggcgacccatctcagggtgcttcccaagcaatgctttatgccactggtttcagtgatgaagatttcgatcgtgcacaaatcggtgtcggttctgtttggtggtcaggtaacccatgtaacatgcacttgatggagttgaacaacaggtgttccgaatcagtcaacaaggccggcttaaaagccatgcaattcaactccattggtgtgtcggacggtatcaccaacggtactgaaggtatgaagtactctttacagctgagagaaattatcgccgactcctttgaaaccatgaccatggcccaactatatgacggtaacattgccattccttcatgtgataaaaatatgcccggggtattgatggctatgggaagacacaacagacctgccattatggtctatggtggtactatcttgcctggatctccaacttgcggaacccaaaaccctgctgtagccgacaaaatcgatatcattagtgctttccaatcctacggacaatacttgtcaaaacaaatcaacaacgaagaaagaatagatattgtcaaacatgcctgtccagggcccggtgcatgtggtggtatgtacactgccaacactatggcctctgcctctgaagtcttggggttgaccttaccattttcgtcctcgtccccggcagtctccaaagaaaaagccgaagagtgtgccaacgtcgggttcgccttaaagaatttgttagagttggacttgaaaccaagagatattgtcaccaaaaaatcatttgaaaacgctattgcttatatcattgccactggtggttctactaatgccgttttacatcttattgccattgcctcttcatttgacattactattactgttgacgatttccaaagaatctccgacaacactcccttgttggccgatttcaaaccatcgggtaaatacgttatggccgacttgcaaaatgtcggcggtacacctgctgttatgaaatacttgatcaaagaaggcattatcgacggtacccaattgagtgtcaccggtaaaaccatcaacgaaaacttggctaaacttgctgatttgcctgagggccaagacattgttagaccagtatcaaacccattgaagccaagtggccacttacaaatcttgaaaggtactttggctccagggtctgctgtcgctaaaatcaccggtaaagaaggtacttatttcaaaggtaaagctagagtattcaacgacgaaggtgcatttattgttgccttggaaaatggcgagatcaaaaaaggcgaaaaaacagtttgtgtgatcagatacgaaggtccaaaaggtggtccaggtatgccagaaatgttgaaaccttcgtctgcattaatgggttacgggttaggtaaagacgttgctttgttgactgatggtagattttcgggtggttcccacgggttccttattggccacattgttcctgaagccgctgaaggtggtccaattgctttggttgaagatggcgatattattgtcatcgacgcagacaataacaaaatcgatttgttggttgagccagacgtcttgaccgaaagaagaaaacactggacgcctccagaaccaagatacaaaagaggtactttggccaaatacgccaagttggtcagcgatgcatctaagggatgtgttacagatttataa

SEQ ID NO: 10323 - protein, 589 aa, Candida albicans SC5314
MSFVKSCRGCLRTFATSTIKHEKKLNKYSSIVTGDPSQGASQAMLYATGFSDEDFDRAQIGVGSVWWSGNPCNMHLMELNNRCSESVNKAGLKAMQFNSIGVSDGITNGTEGMKYSLQSREIIADSFETMTMAQLYDGNIAIPSCDKNMPGVLMAMGRHNRPAIMVYGGTILPGSPTCGTQNPAVADKIDIISAFQSYGQYLSKQINNEERIDIVKHACPGPGACGGMYTANTMASASEVLGLTLPFSSSSPAVSKEKAEECANVGFALKNLLELDLKPRDIVTKKSFENAIAYIIATGGSTNAVLHLIAIASSFDITITVDDFQRISDNTPLLADFKPSGKYVMADLQNVGGTPAVMKYLIKEGIIDGTQLSVTGKTINENLAKLADLPEGQDIVRPVSNPLKPSGHLQILKGTLAPGSAVAKITGKEGTYFKGKARVFNDEGAFIVALENGEIKKGEKTVCVIRYEGPKGGPGMPEMLKPSSALMGYGLGKDVALLTDGRFSGGSHGFLIGHIVPEAAEGGPIALVEDGDIIVIDADNNKIDLLVEPDVLTERRKHWTPPEPRYKRGTLAKYAKLVSDASKGCVTDL

SEQ ID NO: 10324 - DNA, 1794 bp, Ustilago maydis 521
  CDS (1)..(1794)
atggtcaacggagaagtcgagctgcgcacaacttcgcgcaccaatggtgacgctcccgccccgatcctgaacaggatcagtcgatacatcacgcaatcctccgacaagggagctgctcaatccatgcttcacgcgtgcggtctttcggtacaagacctcgacaagccccaggttggcatctcatctgtatggtgggaaggcaacccatgcaatactcacctgctcgaatttggccgcaagatcaagcaaggctgcgaagcggaaggtctggtgggcttgcaaaataacacggtgggcgtttccgatgccatcaccatgggcggccccggaatgcagtattcgcttccttcgagagagctgatcgccgactctatcgagacgatcaccctcgcgcagtatcatgacgctaatgtgtccatccccggttgtgacaagaacatgcctggctgtctcattgcttgtctgcgtcacaaccgcccatcaatcatcgtttatggcggcacgatccaacccggcaagcacggaatggacatacccgctcttggaaggaagaagggcgacccatgcaatgtcgccgacaatttcgaagcgacaggagcttacgccaagggcctcatcacggcagaagagcgtgtcgacctgatccgcaacgcctgtcccggtcctggtgcttgcggaggcatgtacaccgccaacaccttgtctatcgcgatcgaagtcatggggatgggtctcccgttgaccagcagtactcccgctgtctaccctgaaaagatgcaagaatgtctgcgtgttggagcctacatcaagaatctgctagccaaggatatcaagcctcgcgacatcatgaccaagaaggcttttgagaatgctatcgtgatgactcatgttcttggtggctcgactaatgctgttctccatctcatcgctgttgcacgtgctggcgatatcgacattaccatcgacgacttccaaaggctcggcgacaagacacccatgttggccgacgtcaagccatcgggcaagtattacatggaagacattcacaagatcggaggtgttcctcgtgtgctcaagtacattctggagaacacggatctgcttcatggtgacgtgatgacggtgacgggtaaaacgatgcgcgagaatctcgtcgatgttgaaccactggagtttgagacgcaagatatcatccgacctctcagcaaccctatcaaggcaacgggccacctgaccatcatgcgtggatcgctgtgccccggcggagctgtgtccaagctgacgggcaaagaggggctgtactttgacggcagcgctgttgtctttgactctgaagacggcatcaccgaagcaatcgcagaaggccgtgtcaaagaaggcagcgttgtcgtcattcgctatgttggaccaaaaggtggtcctggtatgcccgagatgctcggaccaaccggtgcgatcatgggcgcaggtctcggaaaaacagtagcgctcatcaccgacggtcgtttctctggcgcttcgcacggattttgcacaggacatgttgtgccagaagcagccctgggaggaccgatcgcgctcgtacaagacggagacaggatcactgtcgatgccaacacgcgcgagatcaacttgcacatcagtgacgaagagatggagaagaggaaacagtggtggctcaaagagaaaaagcctactctgacaaagaaacacaagcgcggttggctgtacaagtttgcaagggatgtacaaaacgcttccgagggttgtgttactgatcgcgatctgttttga

SEQ ID NO: 10325 - protein, 597 aa, Ustilago maydis 521
MVNGEVELRTTSRTNGDAPAPILNRISRYITQSSDKGAAQSMLHACGLSVQDLDKPQVGISSVWWEGNPCNTHLLEFGRKIKQGCEAEGLVGLQNNTVGVSDAITMGGPGMQYSLPSRELIADSIETITLAQYHDANVSIPGCDKNMPGCLIACLRHNRPSIIVYGGTIQPGKHGMDIPALGRKKGDPCNVADNFEATGAYAKGLITAEERVDLIRNACPGPGACGGMYTANTLSIAIEVMGMGLPLTSSTPAVYPEKMQECLRVGAYIKNLLAKDIKPRDIMTKKAFENAIVMTHVLGGSTNAVLHLIAVARAGDIDITIDDFQRLGDKTPMLADVKPSGKYYMEDIHKIGGVPRVLKYILENTDLLHGDVMTVTGKTMRENLVDVEPLEFETQDIIRPLSNPIKATGHLTIMRGSLCPGGAVSKLTGKEGLYFDGSAVVFDSEDGITEAIAEGRVKEGSVVVIRYVGPKGGPGMPEMLGPTGAIMGAGLGKTVALITDGRFSGASHGFCTGHVVPEAALGGPIALVQDGDRITVDANTREINLHISDEEMEKRKQWWLKEKKPTLTKKHKRGWLYKFARDVQNASEGCVTDRDLF

SEQ ID NO: 10326 - DNA, 1833 bp, Ustilago maydis 521
  CDS (1)..(1833)
atgctgcgatccgccctcagtccctcagcacgttgcgtcctgcgcggcggcctcgcctcccgccgcgctctccacacctcctcagccgctctcaacacagagcgcgctccgccgggcgctctaaacaagtactcgcgtatcatcacccggcccaaggatcagggagcatcgcaagccatgctctacgccaccgacggcatccagtcggacgaggacctcacgcgtgctatggttggtatcggctcgatttggtacgagggcaacccatgcaacgcgcacctgctcgccatctcgcagcgcgtcaaaaagtcggtgcagcaagccggtctcaccggttatcagtttggatctgtcggtgtttcggatggtatctcgatgggtacagacgccatgtcgtactcgctcccgtcgcgtgatctgatcgctgactcggtggaatcggcttgcggtggtcattggcttgatggctgtgtggtgattcccggttgcgacaagaacatgcctggtgtgctgatggctctcggccgtctgaatcgtcccggaatcatgctctacggcggaacgatccgtcccggtggatgtgctagcgtcgagggcacgctcgacattgtctctgctttccagtcgtacggccagtacctcgccaacggaggctctccggctgctgaaaagattcgctatgacaccgtccgcaacgcctgtcccggtcccggtgcgtgcggtggcatgtacaccgccaacaccatggcttcatgcgccgaggctctcggcatgacgctcccaggtagctcgtcgttcccggcagaataccctgaaaagatcgccgaagccgaaaatatgggagccgccatgcgcctcgtcctcgaaaaggacatcaagccgcgcgacatcatgacgcgatccgccttcgaagatgcgatcgctctcaccatggttctcggaggcagcacgaatgcagtcttacatctgattgctgtcgctcactcggtcggcatcgagctcagcattgacgacttccagcgcatcgccgacgtgactccattccttgccgacctcaagccgtcgggcaagtacgtgatggaagatgttcactcgaaactcggcggtatcccgacgattattcagtactgcatcgagaacaagctgatgaagggtgaacacatgaccgtcaccggtcgaacgcttgccgagaacgtcgaccgatggacgcacgagcgcggcaaactgcctgcaggccaagacgtgctccgaccgatcgacaagcctctcaagagcaccggccacattcgaatcctcaagggcaatcttgcgcctggtggcgccgtcgccaagatcactggaaaagagggtctgcgattcacaggtaaagcgcgcgtctttgacaccgaagatgccatggttggcgccgttgaaaagggcgagatcaagaagggtgaaaagacagtgatcgtgttgcgctacaagggtcctaagggtggacctggtatgcccgagatgctcaaacctaccagtttgatcatgggcgctggtcttgggcaggatgtagcctgtttgaccgacggtcggttctccggtggaagtcacggtttcgtcatcggtcacgtcgttcccgaggcacaggtcggaggtccgatcggcctcgtaaaggatggtgatgtgatcagcatcgatgccgagaccaacacgttggagcttgtcggtgtatccgctgccgatctcgagtcccgaagagagtcgtggaagcctctaccgctcaaaccgaaatcgggccacctgctcaagttcgttcgtaacgttgccgatgcttcgcatggttgcatcaccgatatgtga

SEQ ID NO: 10327 - protein, 610 aa, Ustilago maydis 521
MLRSALSPSARCVLRGGLASRRALHTSSAALNTERAPPGALNKYSRIITRPKDQGASQAMLYATDGIQSDEDLTRAMVGIGSIWYEGNPCNAHLLAISQRVKKSVQQAGLTGYQFGSVGVSDGISMGTDAMSYSLPSRDLIADSVESACGGHWLDGCVVIPGCDKNMPGVLMALGRLNRPGIMLYGGTIRPGGCASVEGTLDIVSAFQSYGQYLANGGSPAAEKIRYDTVRNACPGPGACGGMYTANTMASCAEALGMTLPGSSSFPAEYPEKIAEAENMGAAMRLVLEKDIKPRDIMTRSAFEDAIALTMVLGGSTNAVLHLIAVAHSVGIELSIDDFQRIADVTPFLADLKPSGKYVMEDVHSKLGGIPTIIQYCIENKLMKGEHMTVTGRTLAENVDRWTHERGKLPAGQDVLRPIDKPLKSTGHIRILKGNLAPGGAVAKITGKEGLRFTGKARVFDTEDAMVGAVEKGEIKKGEKTVIVLRYKGPKGGPGMPEMLKPTSLIMGAGLGQDVACLTDGRFSGGSHGFVIGHVVPEAQVGGPIGLVKDGDVISIDAETNTLELVGVSAADLESRRESWKPLPLKPKSGHLLKFVRNVADASHGCITDM

SEQ ID NO: 10328 - DNA, 1791 bp, Cryptococcus neoformans var. neoformans B-3501A
  CDS (1)..(1791)
atgctttcaagacgcatcgctactgcaagcccagccgctcatactagagcattccatgcgtcggctgccaaggcctcgaaagaggtcataatgaatcgttactctaggactattactcaacctaaggctcaaggcgcttctcaggccatgctttacgccacggaaggcattgtgaatgacgaagacttcaataaggccatggttggcgttgccagtgtttggtacgaaggcaacccatgcaatcgacacattttgggccttggccagagggtgaagaagtctcttatgaatgctggcatcgttggctaccaatttggtactgtcggtgtctctgacggtattagcatgggtacctctggaatgtcttactccctgcaatctcgtgacctcattgccgactctgttgagacggctgctggtggtcattggctggatgggatggtcgttttacctggttgcgataaaaacatgcctggtgctttgattgctctcggtcgacttaatcgacccagtatgatggtttatggcggtactatccgtcctggctcttgtggcggagaggtgctcgacattgtgtcagctttccagagttatggacgatacctccaagaaggccaaacacctgaggctgaaaagacccgctacaataccattcgaaacgcatgtcctggtcctggagcctgtggaggcatgtacactgctaacacaattgcgtccgcctccgaagccttgggtatgactcttcctgggtcgtcgtctttccctgcggaatatcctgaaaagcatgcggaatgtgacgctgttggcgagactatgcgcaaggttttggaagataaccttctccccagacaaatcatgaccaggcaggctttcgaaaatgcaatggctcttacaatggcgctcggtggatctaccaacgttgttctccatttgatcgccatcgctcggtcggttggtatcaaccttaccattgacgatttccaaacggtctccgatcgagtacctttgctggccgatctcaaacccagtggtaaatacgttatggaagacatcaacaccatcggtggcacgccttccgtcattcactatctgatcaaaaacggaattatgaccggtgacgagatgaccatcaccggtaagactcttggagagaattgtgatcgctgggtggaggagcacggtagcaagtgggaaggacagaagattttgcgacctattaacgatcctcttaagtccactggacacatccgaattctgcgcggtaatcttgcccctggaggtgctgtctctaagatcacaggcaaagaaggcttgcgctttaccggtaaatgccgggctttcgatgatgaggagggcttcgtgaaggccgtcgaaagcggttctatcaaaaagggagagaaaactgttgttgtcttgaggtaccttggccccaagggcggacctggtatgcctgaaatgctcaaacctaccagtttgatcatgggcgctggtctaggatatgatgtcgcttgtctgacagatggacgatttagcggaggttctcatggcttcgttgttggccatgtcgttccggaggcccaggttggaggacccattgctttggttcaagacggcgatgttattcatattgatgccgttgcgaacactttgtctgtggacgtatccgacgaagagatggcccgcagaaaggagaactgggttgcccctcctctcaaggtcactcacggaacattgctcaaatacgcccgagctgttaccgatgcttctcatggatgtgtcacggatgcttaa

SEQ ID NO: 10329 - protein, 596 aa, Cryptococcus neoformans var. neoformans B-3501A
MLSRRIATASPAAHTRAFHASAAKASKEVIMNRYSRTITQPKAQGASQAMLYATEGIVNDEDFNKAMVGVASVWYEGNPCNRHILGLGQRVKKSLMNAGIVGYQFGTVGVSDGISMGTSGMSYSLQSRDLIADSVETAAGGHWLDGMVVLPGCDKNMPGALIALGRLNRPSMMVYGGTIRPGSCGGEVLDIVSAFQSYGRYLQEGQTPEAEKTRYNTIRNACPGPGACGGMYTANTIASASEALGMTLPGSSSFPAEYPEKHAECDAVGETMRKVLEDNLLPRQIMTRQAFENAMALTMALGGSTNVVLHLIAIARSVGINLTIDDFQTVSDRVPLLADLKPSGKYVMEDINTIGGTPSVIHYLIKNGIMTGDEMTITGKTLGENCDRWVEEHGSKWEGQKILRPINDPLKSTGHIRILRGNLAPGGAVSKITGKEGLRFTGKCRAFDDEEGFVKAVESGSIKKGEKTVVVLRYLGPKGGPGMPEMLKPTSLIMGAGLGYDVACLTDGRFSGGSHGFVVGHVVPEAQVGGPIALVQDGDVIHIDAVANTLSVDVSDEEMARRKENWVAPPLKVTHGTLLKYARAVTDASHGCVTDA

SEQ ID NO: 10330 - DNA, 1671 bp, Prochlorococcus marinus str. MIT 9303
  CDS (1)..(1671): transl_table=11
atgctcagatctgcagccatcacaaagggaactcaacgctctcccaaccgagccatgcttcgcgcagtgggctttggcgacgaagatttcaataaaccaatcatcggtatagccaacggctacagcacgatcactccttgcaacatcggtcttaatgacctggcgcgacgttcagaagaagcagcccgccaggccggtgcaatgccccagatgttcggcaccatcaccgtcagtgatggcatctctatgggcaccgaagggatgaaatattccctggtaagccgcgaggtgattgctgattcgatcgagacagcctgcaacgcccaaagcatggatggcgtcctagcaatcggtggctgtgacaaaaacatgcctggagccatgatcgccctggcgcgaatgaacatcccaggtgtctttgtctatggcggaacgatcaaaccagggaaattggctgaccgcgacctcacggtagtcagcgcctttgaagctgttggccagcatgccagcggcaagattaacgaggagcaactcaccgctatcgagaagaacgcatgcccaggagcaggaagttgcggtggcatgttcacagccaacacgatgtcagccgcgattgaaacattgggattgagtttgccttacagctcaacgatggctgcagaggatgaggaaaaagcaaatagcgcagcccgtagtgctgaagtgcttgtggatgccattaaggcaaatatctgtcccctcgatctactcaccaagaacgcatttgaaaacgcgattagcgttgtcatggcagtgggcggctccaccaatgcagttctgcatctgcttgcgattgcccgtagcgcaggcgtagacctttgcatcgacgactttgagcgcatccgccagcgtgtaccagtgatttgtgatctaaaacccagcggccgttacgtgactgttgatttgcataaagctggcggcattccccaagtcatgaaacagttgctcgatgcaggcttactccatggagactgctgcaatgtggaaggtaaaaccttgagagaactgctcaaggatgtgccatccgagccttcagcagagcaagacgtcattcatcccctctcgaaaccggtctatgccaaggggcacctggcgatccttaaaggcaatctggccagtgaaggatgcgtggccaagatcagcgggatcaaaactcctgtacttaccggacctgcaagggtttttgaaagcgaggaggcctgccttgctgccattctcaacaacaaggtgaaggcgggagatgtcgtcgtcatacgtaacgaaggcccggttggcgggcctggaatgcgagagatgcttgctcctacatccgccatcgtcggtgcagaccttggcgacaaggtggccctgatcacagatggacgcttcagcggaggtacctatggtttagttgtgggtcacgtggcacctgaagcagcggtaggcggcatgattggccttgtgcatgaaggcgacagcatcaccatcgatgccgatcaactgctgatccaactcaatatcgagaacgatgagttggagcgtcgctccagcgcatggaaaaaaccacagccgcgttatcaaacaggagtgctcggtaaatatgcccgaatggtgagtagctccagcaagggtgctgtcaccgaccagccctga

SEQ ID NO: 10331 - protein, 556 aa, Prochlorococcus marinus str. MIT 9303
MLRSAAITKGTQRSPNRAMLRAVGFGDEDFNKPIIGIANGYSTITPCNIGLNDLARRSEEAARQAGAMPQMFGTITVSDGISMGTEGMKYSLVSREVIADSIETACNAQSMDGVLAIGGCDKNMPGAMIALARMNIPGVFVYGGTIKPGKLADRDLTVVSAFEAVGQHASGKINEEQLTAIEKNACPGAGSCGGMFTANTMSAAIETLGLSLPYSSTMAAEDEEKANSAARSAEVLVDAIKANICPLDLLTKNAFENAISVVMAVGGSTNAVLHLLAIARSAGVDLCIDDFERIRQRVPVICDLKPSGRYVTVDLHKAGGIPQVMKQLLDAGLLHGDCCNVEGKTLRELLKDVPSEPSAEQDVIHPLSKPVYAKGHLAILKGNLASEGCVAKISGIKTPVLTGPARVFESEEACLAAILNNKVKAGDVVVIRNEGPVGGPGMREMLAPTSAIVGADLGDKVALITDGRFSGGTYGLVVGHVAPEAAVGGMIGLVHEGDSITIDADQLLIQLNIENDELERRSSAWKKPQPRYQTGVLGKYARMVSSSSKGAVTDQP

SEQ ID NO: 10332 - DNA, 1665 bp, Clostridium thermocellum ATCC 27405
  CDS (1)..(1665): transl_table=11
atgagaagcgatgcggtaaaaaaaggcatagaaagagcccctcacagggctttgtttaaagcaatgggctatacagatgaagaattggaaagaccgcttataggagttgttaattccagaaacgaaattgttccgggacatatacatctggacaagattgccgaagctgtaaaggcaggtatcagaatggcaggaggtactcctgttgagttcggtgcaatcggtgtgtgtgacgggatagcgatgggtcatacgggaatgaaatattccctggccacaagggagcttatagccgactcctgcgaggcaatggcgttggcccacagctttgacggaatggttttcatacccaattgtgacaagatagtgccgggaatgctgatggcagctgcaagaataaatgttcccgccattgtggtaagcggaggtcccatgctgtctttaaggcataatgacaaaaacctggatttaaacagcgtgtttgaagctgtaggggcatacaaggcgggaaagatgacggagaaagaagtttgggagtatgaggaaaaagcttgtcccggctgcggttcctgttccggtatgtttaccgccaactccatgaactgcctcactgaggttttgggaatgggtcttccgggcaacggaacggtccctgcggtttatgcggaaagaatacgccttgcaaagaaagccggaatgaagatagtggaattggttgaaaaagatataaaaccttcggatattctcactccaaaggctttcgagaatgctctggccgtggacatggctttgggctgctcgacaaactctgtgcttcatcttcctgctattgccaatgaagtgggaatggagataaaccttgacataataaacgaaataagcagcaaggtaccgaacctttgcaagctggctccggcgggccaccatcatgttcaggacctctatgcggcgggaggaatacctgctgtgatgaaggaactttcaaagaagaatttgctgcatctggatttgataaccgttaccggcaaaactgtaagggaaaacattgaaaacgcaaaagtcagggactatgaggttataagaagcattgacaatccttacagtccgacgggcggtatagcggtgctgaggggtaatcttgctccggacggtgcggttgtaaagcgctcggctgttgcccctgaaatgttggttcacaagggaccggcaagggtgtttgactcggaggatgctgccatagaagcaatttacaacggtaaaataaacaaaggtgacgtggtcataatacgctatgaaggtcccaaaggaggtcccggcatgagggaaatgctgtccccgacttccgcaattgcaggtatgggacttgacaaggacgttgccttgattactgacggacgtttttccggtgctacgagaggagcttcaataggtcatgtgtctccggaggctatggcgggcggacctatagcaattgtcagagacggggatattatcagcatagacatacctaacggaaagcttgatgtagaaatccccgacagcgaaattcagaagagacttaaagagtggaaggcaccggcgccgaaaataacaaagggttaccttggaagatatgcaaaacttgtttcttctgcaaacaaaggcgccatcctggaaaacaaataa

SEQ ID NO: 10333 - protein, 554 aa, Clostridium thermocellum ATCC 27405
MRSDAVKKGIERAPHRALFKAMGYTDEELERPLIGVVNSRNEIVPGHIHLDKIAEAVKAGIRMAGGTPVEFGAIGVCDGIAMGHTGMKYSLATRELIADSCEAMALAHSFDGMVFIPNCDKIVPGMLMAAARINVPAIVVSGGPMLSLRHNDKNLDLNSVFEAVGAYKAGKMTEKEVWEYEEKACPGCGSCSGMFTANSMNCLTEVLGMGLPGNGTVPAVYAERIRLAKKAGMKIVELVEKDIKPSDILTPKAFENALAVDMALGCSTNSVLHLPAIANEVGMEINLDIINEISSKVPNLCKLAPAGHHHVQDLYAAGGIPAVMKELSKKNLLHLDLITVTGKTVRENIENAKVRDYEVIRSIDNPYSPTGGIAVLRGNLAPDGAVVKRSAVAPEMLVHKGPARVFDSEDAAIEAIYNGKINKGDVVIIRYEGPKGGPGMREMLSPTSAIAGMGLDKDVALITDGRFSGATRGASIGHVSPEAMAGGPIAIVRDGDIISIDIPNGKLDVEIPDSEIQKRLKEWKAPAPKITKGYLGRYAKLVSSANKGAILENK

SEQ ID NO: 10334 - DNA, 1674 bp, Herminiimonas arsenicoxydans
  CDS (1)..(1674): transl_table=11
atggcattcaatcgccgctcgaaaaacatcacgcaaggcgtgtcccgcagtcctaaccgttccatgtattacgccatgggttacgaaaaggccgatttcgacaagcctatggtcggcatcgccaacggtcactcgacgattacgccatgtaactccggcctgcaaaaactggccgatatcgcgatcaagaccatcaaggatgcaggcggcaatccgcaagtgttcggtacgccgacgatttccgacggcatgtccatgggcaccgaaggcatgaagtattcgctgatttcgcgcgaagtcattgccgactgtatcgaaaccgcagtcaacggccaatggatggatggcgtgctggtcatcggcggctgcgacaagaatatgccgggcggcatgatcgccatgttgcgcaccaacgtgcctagtatttatgtctacggcggcaccatcaagccggggcactggaaaggcaaagacctgaccatcgtttccgcgtttgaagcggtcggcgaattcactgccggccgcatgtcacaagaagattttgacggcatcgaacgcaatgcctgcccatcatccggttcctgcggcggcatgtatacagccaataccatgtcgtcctcgttcgaggcgctgggcctggccttgccttactcgtcgacgatggccaatcctgacgatgaaaaagtcggctccgcagcggaatccgcgcgcgtgctgatcgaagcaatcaagaaggatctgaagccgcgcgacatcgtgacacgcaaggctatcgaaaacgcagtggccgtcatcatggcaaccggcggttcgaccaatgccgtgctgcacttcctggcgattgcgcacgctgcagaaatcgactggaccatcgacgacttcgaacgcatgcgcaaaaaagtccctgtcatctgcgatctgaaaccatccggcaaatacgtggcaaccgatctgcataaggccggcggcattccgcaagtgatgaaggtgttgctcgacgccggcttgttgcacggtgattgcatgacgatcaccggccagaccgttgcagaagcgctggcgcacatcccgtcggtaccaagtgccgaccaggacgtgatccacaccatcgacaaggctttgtacgcacaaggtcaccttgcaatcctgaagggcaatctgtcgcctgaaggttgcgtggcaaaaatcaccggtctgaaaaatcctgtcatcaccggacctgcacgcgtatttgacgacgaatactcggcaatggacgccatcatggcgaaccagatcaaggccggcgacgtactcgtcatgcgctacctcggacctaaaggcggcccgggcatgccggaaatgctggcaccgacttccgcactggtcggtcagggtctgggtgagtcagtcggcttgattaccgatggccgtttctccggcggtacctggggcatggtggttggccacgtttcgccggaagcgtttgtcggcggtaccatcggtctggtggaagaaggcgattccgtcaccatcgatgcgcgtcaattgctgattcagttgaacgtatcggaagaggaaatcgcacgccgtcgcgccaactggaagcagcctgcaccgcgttacacacgtggcgtgctggcaaaatatgcagctctggcatcgacggcaagcaaaggcgctgtcaccggctga

SEQ ID NO: 10335 - protein, 557 aa, Herminiimonas arsenicoxydans
MAFNRRSKNITQGVSRSPNRSMYYAMGYEKADFDKPMVGIANGHSTITPCNSGLQKLADIAIKTIKDAGGNPQVFGTPTISDGMSMGTEGMKYSLISREVIADCIETAVNGQWMDGVLVIGGCDKNMPGGMIAMLRTNVPSIYVYGGTIKPGHWKGKDLTIVSAFEAVGEFTAGRMSQEDFDGIERNACPSSGSCGGMYTANTMSSSFEALGLALPYSSTMANPDDEKVGSAAESARVLIEAIKKDLKPRDIVTRKAIENAVAVIMATGGSTNAVLHFLAIAHAAEIDWTIDDFERMRKKVPVICDLKPSGKYVATDLHKAGGIPQVMKVLLDAGLLHGDCMTITGQTVAEALAHIPSVPSADQDVIHTIDKALYAQGHLAILKGNLSPEGCVAKITGLKNPVITGPARVFDDEYSAMDAIMANQIKAGDVLVMRYLGPKGGPGMPEMLAPTSALVGQGLGESVGLITDGRFSGGTWGMVVGHVSPEAFVGGTIGLVEEGDSVTIDARQLLIQLNVSEEEIARRRANWKQPAPRYTRGVLAKYAALASTASKGAVTG

SEQ ID NO: 10336 - DNA, 1860 bp, Burkholderia vietnamiensis G4
  CDS (1)..(1860): transl_table=11
atgcccacataccgctccaaaacctccaccgccggccgcaacatggcgggcgcgcgctcgctgtggcgcgccaccggcatgaaagacgacgatttctcgaagccgatcatcgcggtcgtcaattcgttcacgcaattcgtgcccgggcacgtccacctgaaggatctcggccagctggtcgcgcgcgagatcgaggctgccggcggcgtcgcgaaggaattcaacacgatcgccgtcgacgacggcatcgcgatgggccacgacgggatgctgtactcgctgccgagccgcgacatcatcgccgactcggtcgagtacatggtgaacgcgcactgcgcggacgcaatggtctgcatctcgaactgcgacaagatcacgccggggatgctgatggccgcgatgcgcctgaacatcccggtgatcttcgtgtcgggcgggccgatggaagccggcaagacgcgcctcgcgaacccggtcaccaagaccatcgagctgaagaagctcgacctcgtcgacgcgatggtgatcgcagccgaccagtcgtactccgacgccgacgtcgccgaagtcgagcgctcggcatgcccgacctgcggttcgtgctcgggcatgttcaccgcgaactcgatgaactgcctgaccgaagcgctcggcctgtcgctgcccggcaacggcacggtggtcgcgacgcacgccgatcgcgagcagctgttcaagcgcgccggccgccggatcgtcgagctgacccgccagtactacgaacaggacgacgtgcgcgtgctgccgcgctcggtcggcttcaacgcgttcgagaacgcgatgacgctcgacatcgcgatgggcggctcgaccaacacgatcctgcacctgctcgcgatcgcgcgggaagccggcatcgacttcacgatgagggacatcgaccgcctgtcgcgcgtcgtgccgcagctgtgcaaggtcgcgccgaacacgaacaagtaccacatcgaagacgtccatcgcgcgggcggcatcatggcgatcctcggcgagctcgaccgtgcgggccggctgcacaccgacgtgccgacggtccacgcgccgacgctgaaagatgcgctcgaccagtgggacatcgtccgtacgcaggacgaagcggtgcgcaagttctacctggccggcccggccggggtcccgacgcagatcgcgttcagccaggacacgcgctggcccagcctcgacctcgaccgcgccgagggctgcatccgctcgtacgagcacgcgttctcgaaggaaggcggcctcgccgtgctgaccggcaacatcgcgctcgacggctgcgtggtgaagacggccggcgtcgacgagagcattctcgtgttcgagggctccgcgcacgtgaccgagtcgcaggacgaagcggtcgagaacatcctgaacgacaaggtcaaggccggcgacgtggtgatcgtgcgctacgaaggcccgaagggcggccccggcatgcaggaaatgctgtacccgacgagctacatcaagtcgaagggcctcggcaaggcatgcgcgctgctgaccgatggccgcttctcgggcggcacgtccgggctgtcgatcggccattgctcgccggaggcggccgcgggcggcgcgatcggcctcgtgcgcgacggcgaccgcatccgcatcgacatcccgaaccgcacgatcgacgtgctggtgtcggatgaagaactcgcgcgccgccgcgaagagcagaacgcgaagggctggaagccggcgcagccgcgtccgcgcaaggtgtcggcggcgctgaaggcctatgcgaagctcgtgatgtcggcggacaagggcgcggttcgcgacctgtcgctgctcgacgactga

SEQ ID NO: 10337 - protein, 619 aa, Burkholderia vietnamiensis G4
MPTYRSKTSTAGRNMAGARSLWRATGMKDDDFSKPIIAVVNSFTQFVPGHVHLKDLGQLVAREIEAAGGVAKEFNTIAVDDGIAMGHDGMLYSLPSRDIIADSVEYMVNAHCADAMVCISNCDKITPGMLMAAMRLNIPVIFVSGGPMEAGKTRLANPVTKTIELKKLDLVDAMVIAADQSYSDADVAEVERSACPTCGSCSGMFTANSMNCLTEALGLSLPGNGTVVATHADREQLFKRAGRRIVELTRQYYEQDDVRVLPRSVGFNAFENAMTLDIAMGGSTNTILHLLAIAREAGIDFTMRDIDRLSRVVPQLCKVAPNTNKYHIEDVHRAGGIMAILGELDRAGRLHTDVPTVHAPTLKDALDQWDIVRTQDEAVRKFYLAGPAGVPTQIAFSQDTRWPSLDLDRAEGCIRSYEHAFSKEGGLAVLTGNIALDGCVVKTAGVDESILVFEGSAHVTESQDEAVENILNDKVKAGDVVIVRYEGPKGGPGMQEMLYPTSYIKSKGLGKACALLTDGRFSGGTSGLSIGHCSPEAAAGGAIGLVRDGDRIRIDIPNRTIDVLVSDEELARRREEQNAKGWKPAQPRPRKVSAALKAYAKLVMSADKGAVRDLSLLDD

SEQ ID NO: 10338 - DNA, 1668 bp, Dehalococcoides sp. BAV1
  CDS (1)..(1668): transl_table=11
atgaaaagcgaagatgtcaaactaggtattgaacgtgcccctcaccggtctttgctgcgcgctctgggtctgaataccgaaagtttccaaaaaccctttataggtatagtgaacagctttaccgaagtagtccccggtcatattcacctcagacagatttccgaagccgtcaaagaaggcataaatgccgccggcggagtaggttttgagtttaataccattgcggtttgtgacggtatcgccatgaaccatgccggcatgaaatacagcctgcccagccgtgaaatcattgccaacacagttgaaataatggctatggcccatgcctttgacggtctggttttcatacctaactgtgacaaggttgtgcccggtatgctcatggccgcctgccgtttgaatatcccctctatatttgtcagcggcggccctatgctggccggacgtttacgaaagaatgaccaggttagctgtgtagatttaaatagcgtttttgaagcagttggtcaggttgccaaaggccagatgacagaagaagaactgctggaactggaaaaagtggcttgccccggttgcggcagttgtgcaggcatgtttaccgccaatactatgaactgccttaccgaagctctgggtatggccttgccaggtaacggcaccataccggcggtagattcacgccgcactcagcttgccaaaagtgccggacagcagataatgcagctgataaaagataatatttgccccaaagatataataactcctgatgccattcacaatgcattcagtctggatgtggcactgggcggcagtaccaattcggtactgcacgtgatggctgttgctcatgaagccggggctgatttttcactggaacagataaaccggataagtgattgtaccccgaatttgtgcaagcttcgcccgtccggtccgtaccatattgaaaatcttgaccagtcaggcggaataggcagtgtccttaaggaactgaaaccttggctgaaaaatgatgcacgcactgtctccggtaaaactataggacaactggcagatgccgcacccaaagcagataataaagttatccgttttgcttccaacccatactcccccaaaggcggattggctgttttattcggcaaccttgcacctaatggcagtgtagtcaaacgttctgcggttgcccctgagatgatggttcatcgcgggcctgcccgcatatttgactctgaagagctggcgactaaagctattatgggcgggaaaataaagacgggtgatgtactggttatccgttacgaagggcctaaaggcgggcctggtatgcgggaaatgcttacccccacctcacttttggccggcatggggctggataaagaagtagccctgattactgacgggcgtttttccggagcaacccgcggagccgccatgggacatgtttcacctgaagcagccgcttgcgggcctatagcagccttgcaggacggggatatgataaatattgatatccataactataaactttcggtagagctttcagatgaagaaatccaaaagcgtttggcaaatgtgcctgtttttgaaccgaagattaaaagcggttacttgaaattttatacagagaacgtcacctcggccagtaccggggcggtttttaaagactaa

SEQ ID NO: 10339 - protein, 555 aa, Dehalococcoides sp. BAV1
MKSEDVKLGIERAPHRSLLRALGLNTESFQKPFIGIVNSFTEVVPGHIHLRQISEAVKEGINAAGGVGFEFNTIAVCDGIAMNHAGMKYSLPSREIIANTVEIMAMAHAFDGLVFIPNCDKVVPGMLMAACRLNIPSIFVSGGPMLAGRLRKNDQVSCVDLNSVFEAVGQVAKGQMTEEELLELEKVACPGCGSCAGMFTANTMNCLTEALGMALPGNGTIPAVDSRRTQLAKSAGQQIMQLIKDNICPKDIITPDAIHNAFSLDVALGGSTNSVLHVMAVAHEAGADFSLEQINRISDCTPNLCKLRPSGPYHIENLDQSGGIGSVLKELKPWLKNDARTVSGKTIGQLADAAPKADNKVIRFASNPYSPKGGLAVLFGNLAPNGSVVKRSAVAPEMMVHRGPARIFDSEELATKAIMGGKIKTGDVLVIRYEGPKGGPGMREMLTPTSLLAGMGLDKEVALITDGRFSGATRGAAMGHVSPEAAACGPIAALQDGDMINIDIHNYKLSVELSDEEIQKRLANVPVFEPKIKSGYLKFYTENVTSASTGAVFKD

SEQ ID NO: 10340 - DNA, 1797 bp, Silicibacter pomeroyi DSS-3
  CDS (1)..(1797): transl_table=11
atgactgactttcaaaagaaaaaactgcggtcgcaagactggttcaacaatctcgaagatcccgagatgacggcgctctacctggaacgctatctgaattatggactgaccatagaagagctgacctcggggcgtccgatcatcgcaatcgcacagaccggtagcgacctttccccgtgcaaccggcatcacgtgacgcttgctcagcgcacacgcgaggcgatccggacggctggaggtatcgctctggagatcccggtgcatcccatccaggagaccggcaaacgaccaaccgcaatgctggatcgcaaccttgcctacctgagcttggtcgagacgcttttcggctatccgattgacggtgtcgttctgacgatcggatgcgacaagaccacgccggccctgctcatggcggcggcaaccgtcaacattcccgcgatcgcattgtcggtcgggccgatgctgaacggctggcacgaaggcgaacgagccggatccggcaccgccatctggatggcccggcaaaagttcgcagcgggtgaaatcgatgcgaaggggttcctggagattgccgccgcgtccgccccgtccgtgggatattgcaacacgatgggaaccgcatcgaccatgaactccctcgcagaagttctggggatgcagttgcccggcgccgctgccattccggcaccctaccgggaacggggacagatggcatacgcaaccggcctgcgcatcgtggaaatggttcacgaagacctgcggcccagtgacatcatgactcgcgaggcccttgaaaacgcgattgtgctgggttcggcgattggtggatcgaccaacgcccccatccacctgaacgcgattgcccgccacctggggattcatctgacgaacgacgactgggagcgtcttggctttaacattcccctgctcgtcaacatgcaacccgcaggcgcctatcttggtgaggatttctatcgagcaggcggcgttcccgccgtggtttcagagcttctggaagtggggaggataccccacccggcggccaagggtgccaatggcaagacgttggcggaaaactacgcggggatcaaagcaaccaatagcgacgtcatcaggcccgtcgatcgcgctttgatgcgaaacgccggtttcctcaatctgaaggggaacctgtttgacagcgccttgatgaaaacctctgtcatcgacgctgcgttccgcgaaaggtatttgtccaacccggaggatccggaagccttcgaggggcgcgcaatcgttttcgacggtccagaggattttcacgccaggattgacaaccccgcgctcaagctcgatgcgaactgcattctcgtgatgcgcggggctgggccaaagggatatcccggcggtgcagaggtcgtgaacatgcgcccgcccagctatctgatcaagcagggtgtacgggcgctcccgtgcatcggggatggtcgacaatcgggaacctccggatcggcttcgatcctgaatgcatcgcccgaggcggcggatggtggggggcttgcgctgctgcagacaggtgaccgcattcgggtcgatctgggcaagcgatccgtcaatgtgctcctctcagacgaagagatggcgcgccgccgcgaaagattggacgccgccggcggctttcccatcccgcaaagccagtcgccatggcaagacatcttccggcaatccgtcacacagttttcggagggtatggtgctgaaacaggccactgagcaccaggatatcgcccgcaaacacaccttgcgcaacaatcattga

SEQ ID NO: 10341 - protein, 598 aa, Silicibacter pomeroyi DSS-3
MTDFQKKKLRSQDWFNNLEDPEMTALYLERYLNYGLTIEELTSGRPIIAIAQTGSDLSPCNRHHVTLAQRTREAIRTAGGIALEIPVHPIQETGKRPTAMLDRNLAYLSLVETLFGYPIDGVVLTIGCDKTTPALLMAAATVNIPAIALSVGPMLNGWHEGERAGSGTAIWMARQKFAAGEIDAKGFLEIAAASAPSVGYCNTMGTASTMNSLAEVLGMQLPGAAAIPAPYRERGQMAYATGLRIVEMVHEDLRPSDIMTREALENAIVLGSAIGGSTNAPIHLNAIARHLGIHLTNDDWERLGFNIPLLVNMQPAGAYLGEDFYRAGGVPAVVSELLEVGRIPHPAAKGANGKTLAENYAGIKATNSDVIRPVDRALMRNAGFLNLKGNLFDSALMKTSVIDAAFRERYLSNPEDPEAFEGRAIVFDGPEDFHARIDNPALKLDANCILVMRGAGPKGYPGGAEVVNMRPPSYLIKQGVRALPCIGDGRQSGTSGSASILNASPEAADGGGLALLQTGDRIRVDLGKRSVNVLLSDEEMARRRERLDAAGGFPIPQSQSPWQDIFRQSVTQFSEGMVLKQATEHQDIARKHTLRNNH

SEQ ID NO: 10342 - DNA, 1692 bp, Anabaena variabilis ATCC 29413
  CDS (1)..(1692): transl_table=11
atgtcggagaatcttagaagcaaggctatcacacaaggggtgcagcgatcgcctaacagagcaatgctgcgggctgttggttttcaggatgcagattttaccaaagccattgtcggtgttgccaatggttacagcactattaccccgtgtaatatggggataaatcaactagcacaaagggcagaagctggtataaatcgcgctggagcgaagccacaaatattcggtacaattacgattagtgatgggatttcgatgggaaccgaagggatgaaatattccctggtatcacgagaggtaattgctgactccattgaaaccgtttgtaatgggcaaagtttagatggggtaattgccattggtggctgtgataaaaatatgccaggggcaatgatagcgatcgctcggatgaacatccctgctatctttgtttacggtggcacaattaaacccggacactacaacggcaaagatttaactgttgttagttcttttgaagctgtcggtgagtacagcgctggcaaaatcgacgaaaatgaactgttagcagtagaacgcaatgcttgtcctggtgcaggttcctgcggtgggatgtacacagcaaatactatgtcctctgcttttgaagcactgggaatgagtttgccctattcgtctacaatggcagcagaagacgacgaaaaagctgatagtacggaagaatcagccaaggtattagtagaagcaattcgtcatcagctattacccaggcagattatcactcgtaaatccatagagaatgccatagcagtaattatggcggtgggaggttccaccaatgccgtgttacattttctagcgatcgcccgtgcagctggtgtagagttaaatctagacgactttgaaactattcgtggtcgtgtccccgttttgtgcgacttgaaaccaagcggtagatatgtagctacagacctgcacaaagctggtggtataccccaagtcatgaaaatgttacttgtgcatggtttactccacggcgactgtataaccatcacaggtaaaaccattgccgaagttttagcagatatcccagaagaaccatcgcctaatcaagacgtgattcgtccttggaataaacccatgtatgcccaaggtcacttggctatactcaaaggtaatttggctacagaaggcgcagtcgccaaaattacaggtgtgaaaaatcctgtgattaccgggccagccaaagtatttgaatcagaagaagattgtttagatgcaattttggcaggtaagattaaagccggagacgtgattgtcgtccgttacgaaggccccaaaggcggccctgggatgcgagaaatgttagcccccacctcagctattatcggtgcaggtttaggtgattcagtgggattaattaccgatggacgcttctccggtggtacttatgggatggtagtcggacacgttgcaccagaagcagccgttggtggagcgatcgcactggtacaagaaggtgatagcatcacaattgatgcccatacccgttctttgcagttgaacatatcagacgaagaattagcccatcgtcgtgccaactggcaaccccgtcccccacgttacactaaaggcatactcgcaaaatacgccaagttagtagcttctagtagtgtaggtgcggtcaccgatttagacttatttaatgaatag

SEQ ID NO: 10343 - protein, 563 aa, Anabaena variabilis ATCC 29413
MSENLRSKAITQGVQRSPNRAMLRAVGFQDADFTKAIVGVANGYSTITPCNMGINQLAQRAEAGINRAGAKPQIFGTITISDGISMGTEGMKYSLVSREVIADSIETVCNGQSLDGVIAIGGCDKNMPGAMIAIARMNIPAIFVYGGTIKPGHYNGKDLTVVSSFEAVGEYSAGKIDENELLAVERNACPGAGSCGGMYTANTMSSAFEALGMSLPYSSTMAAEDDEKADSTEESAKVLVEAIRHQLLPRQIITRKSIENAIAVIMAVGGSTNAVLHFLAIARAAGVELNLDDFETIRGRVPVLCDLKPSGRYVATDLHKAGGIPQVMKMLLVHGLLHGDCITITGKTIAEVLADIPEEPSPNQDVIRPWNKPMYAQGHLAILKGNLATEGAVAKITGVKNPVITGPAKVFESEEDCLDAILAGKIKAGDVIVVRYEGPKGGPGMREMLAPTSAIIGAGLGDSVGLITDGRFSGGTYGMVVGHVAPEAAVGGAIALVQEGDSITIDAHTRSLQLNISDEELAHRRANWQPRPPRYTKGILAKYAKLVASSSVGAVTDLDLFNE

SEQ ID NO: 10344 - DNA, 1662 bp, Geobacter metallireducens GS-15
  CDS (1)..(1662): transl_table=11
atgcgcagtgacaccataaagcaggggatcgaacggactccgcaccgagccctcatcaagggaaccggggttccccaaagcgaaatggcaaaacccttcatcggcgttgccaccagcttcactgaccttatccctggtcacgtaggaatgcgtgacctggagcgatttattgagaagggaatccacagcggcggcggttacgcctttttcttcggcattcccggtgtctgtgacggaatcgccatggggcacaaggggatgcactactctctcccgacccgcgaactgattgccgatatggttgagtcggtggccgaagcccatcgcctcgatggcctcgtgctgctcaccaactgcgataagatcacccctggtatgcttatggcggctgctcggcttgatatccccaccatcgtggtaaccgccggccccatgatggccggccgcggtgttgaagggcgccgcttttccttcgtgaccgatacttttgaggccatggcacgctacaaggccggtgtcatcgatgcgaaggagcttcaggtctgcgaggacaacgcctgtcccggtatggggtcgtgccaggggctctttaccgccaataccatggctattctcaccgaaaccctcggcatgagtctccctcgttgtgggacggccctggcggtttccgccctcaagcgtcgcatagcattcgcctcgggtgagaagatcgtggacctggtccgcaatggggttaccccgcgccagatcctgacacgtgctgcatttgaaaacgccatccgggtggatctcgccctcggcggttcctctaatacggtcctccacctcctggccattgcccgggaggcaggggttgatctccctctcgaaaccttcgatatcctttccaaggagacgccgcagattgcctccatgaatcccgctggagagtatttcatggaggatctcgacgcggccggcggtgttgtcggggtgttgaaacaactcggtggcaccattaaggacagcccgaccgtcttggggcttaccacccgcgagttggcctccacggtggaatcggtggatgagcgggtgatccgtcccgtttccgacccggtcaagaaagaagggggaatcgctgtcctcttcggtaatctcgcacccaaaggtgccgtggtgaagcagtcgggggtgtctgctcccatgatgcagttcgaggggactgcccgctgtttcgactcggaggaactcgccatggccgccctcatgggggggaagatcacgtctggcgacgtggtggtcattcgttacgaagggcccaagggtggtccggggatgcgggagatgctcgcaccgaccgcaaccctcatgggactcggcctcggcgattccgttgcccttgttaccgacggccgtttttccggcggcacccgtggcccctgtatcggccacatatccccggaggcggcagaagggggccccatcgccctggttgaagagggggacaggatccgtctcgatattcccaaccggaagctggagctccttgtggatgagtcgatcctcgcggaacgccgcagccgctgggtagcccctgagcccaagatcaagaccggatggcttgcccgctatgccaaggtggttacttcggcatacaccggcgcggttaccacagccgaatag

SEQ ID NO: 10345 - protein, 553 aa, Geobacter metallireducens GS-15
MRSDTIKQGIERTPHRALIKGTGVPQSEMAKPFIGVATSFTDLIPGHVGMRDLERFIEKGIHSGGGYAFFFGIPGVCDGIAMGHKGMHYSLPTRELIADMVESVAEAHRLDGLVLLTNCDKITPGMLMAAARLDIPTIVVTAGPMMAGRGVEGRRFSFVTDTFEAMARYKAGVIDAKELQVCEDNACPGMGSCQGLFTANTMAILTETLGMSLPRCGTALAVSALKRRIAFASGEKIVDLVRNGVTPRQILTRAAFENAIRVDLALGGSSNTVLHLLAIAREAGVDLPLETFDILSKETPQIASMNPAGEYFMEDLDAAGGVVGVLKQLGGTIKDSPTVLGLTTRELASTVESVDERVIRPVSDPVKKEGGIAVLFGNLAPKGAVVKQSGVSAPMMQFEGTARCFDSEELAMAALMGGKITSGDVVVIRYEGPKGGPGMREMLAPTATLMGLGLGDSVALVTDGRFSGGTRGPCIGHISPEAAEGGPIALVEEGDRIRLDIPNRKLELLVDESILAERRSRWVAPEPKIKTGWLARYAKVVTSAYTGAVTTAE

SEQ ID NO: 10346 - DNA, 1878 bp, Rhodospirillum rubrum ATCC 11170
  CDS (1)..(1878): transl_table=11
gtgatcaagacaggctcaaggcaaatgaccccataccgttcccgcacatcaacccacgggcgcacgatggccggtgcccgtggcctttggcgcgccactggcatgaaggacgaggatttcggcaagccgatcatcgccatcgccaattccttcacccaattcgtgcccggccatgtccacctgaaggacatgggccaattggtggccgccgagattgccgccgccggtggcgtggccaaggaattcaacaccatcgccgtcgatgacggcatcgccatgggccatgacggcatgctctatagcctgccgtcgcgcgaactgatcgccgatgcggtcgaatacatggtcaacgcccattgcgccgacgccctggtgtgcatttccaattgcgacaagatcaccccgggcatgctgatggcggcgatgcgcctgaacatcccgaccatcttcgtctccggcgggccgatggaagcgggcaaggtggtgttgggcggcacggaacgcagcgtcgatctgatcgacgccatggtggtcgccggcgatgccaaggtttcggatgccgatgtcgagaccatcgagcgctcggcctgtccgacctgcggctcgtgttcgggaatgttcaccgccaattcgatgaactgcctgaccgaggccctggggctgtcgctgccgggcaatggcagcgccctggccacccatgtggcgcggcgcgggctgttcgaggaggccggacggcgcatcgtcgatctggccaagcgacgctatgagcacgacgacgaaagcaccctgccgcgcgccatcgcctcgttcaaggcctttgaaaacgccatgagcgtcgatatcgccatgggcgggtcgaccaatacggtgctccacctgctcgccgccgcccaggagggcgaggtgcccttcaccatggccgatatcgaccggctgtcgcggcgcattccccatctgtgcaaggtttcgccaagcacggccgacttctatatggaggatgttcaccgcgccggcggcgtcatgggcatcatgggcgagttgtcgcgggccggcctgctccatgaggacctgccgacggtgcatacgccgacgctgaaggcggcgcttgatcactgggatatccggcggccggtcgacgacgcggtgcgcgccttctttcgggcggcgcccggcggcgtgcgcaccgtcgtgccgttttccaccgaccgcctgtgggacagcctggacgatgaccgcgagaccggctgcatccgcgatctcgaccacgcctattcccgcgatggcgggctggccgtgctctatggcaatctggcgcccaacggctgcatcgtgaaaaccgccggagtcgacgcctcgatcctcaccttcacaggcaccgtccgcctctgcgaaagccaggacgaggcggtggcgcgtattctcggcggcgaaattcaggccggcgacgtcgtgctggtgcgctatgagggtcccaagggcggcccgggcatgcaggaaatgctttatcccaccagctatctgaagtcgcgcggcctgggcaaggtctgcgccctggtcaccgatggccgtttctcgggcggcagctcgggcctgtcgatcggccatgtctcgccggaagccgccgctggcgggccgatcggtctggtcgaggagggggatatcatcgtcatcgatatcccggcgcgcagcattgtcgtcgacctgtccgacgaggagctggcggcgcggcgaagcgccatggaggcgcggggacgcgcgggatggaagccggccaaaccgcgcaagcgggcggtctctccggccctgcgcgcctatgcggccctgaccaccagcgccgatcgcggcgccgtccgcgacgtgtcgcaggtcgagcgctaa

SEQ ID NO: 10347 - protein, 625 aa, Rhodospirillum rubrum ATCC 11170
MIKTGSRQMTPYRSRTSTHGRTMAGARGLWRATGMKDEDFGKPIIAIANSFTQFVPGHVHLKDMGQLVAAEIAAAGGVAKEFNTIAVDDGIAMGHDGMLYSLPSRELIADAVEYMVNAHCADALVCISNCDKITPGMLMAAMRLNIPTIFVSGGPMEAGKVVLGGTERSVDLIDAMVVAGDAKVSDADVETIERSACPTCGSCSGMFTANSMNCLTEALGLSLPGNGSALATHVARRGLFEEAGRRIVDLAKRRYEHDDESTLPRAIASFKAFENAMSVDIAMGGSTNTVLHLLAAAQEGEVPFTMADIDRLSRRIPHLCKVSPSTADFYMEDVHRAGGVMGIMGELSRAGLLHEDLPTVHTPTLKAALDHWDIRRPVDDAVRAFFRAAPGGVRTVVPFSTDRLWDSLDDDRETGCIRDLDHAYSRDGGLAVLYGNLAPNGCIVKTAGVDASILTFTGTVRLCESQDEAVARILGGEIQAGDVVLVRYEGPKGGPGMQEMLYPTSYLKSRGLGKVCALVTDGRFSGGSSGLSIGHVSPEAAAGGPIGLVEEGDIIVIDIPARSIVVDLSDEELAARRSAMEARGRAGWKPAKPRKRAVSPALRAYAALTTSADRGAVRDVSQVER
